(19) United States
(12) Patent Application Publication
(10) Pub. No.: US 2025/0135039 A1
(43) Pub. Date: May 1, 2025

(54) INHIBITOR-RESISTANT MGMT MODIFICATIONS AND MODIFICATION OF MGMT-ENCODING NUCLEIC ACIDS

(71) Applicants: Ensoma, Inc., Boston, MA (US); Fred Hutchinson Cancer Center, Seattle, WA (US)

(72) Inventors: Robert Thomas Peters, Needham, MA (US); Hans-Peter Kiem, Seattle, WA (US); Ashvin Reddy Bashyam, Cambridge, MA (US); Anthony Leo Forget, Charlton, MA (US); Olivier Humbert, Seattle, WA (US)

(21) Appl. No.: 18/836,708

(22) PCT Filed: Feb. 7, 2023
(86) PCT No.: PCT/US23/12540

§ 371 Date: Aug. 7, 2024

Related U.S. Application Data
(60) Provisional application No. 63/307,426, filed on Feb. 7, 2022.
(60) Provisional application No. 63/307,427, filed on Feb. 7, 2022.
(60) Provisional application No. 63/307,429, filed on Feb. 7, 2022.

(51) Int. Cl. A61K 48/00; A61K 38/45; C12N 9/22; C12N 15/11

(52) U.S. Cl. CPC A61K 48/0058; A61K 38/45; C12N 9/22; C12N 15/11; C12N 2310/20

(57) ABSTRACT

The present disclosure includes MGMT modifications that cause MGMT resistance to MGMT inhibitors. The present disclosure also includes in vivo, in vitro, and ex vivo modification of MGMT-encoding nucleic acids to encode and express an MGMT variant that is resistant to MGMT inhibitors. Inhibitor-resistant MGMT modifications and modification of an MGMT-encoding nucleic can occur or be used in conjunction with a therapeutic modification, e.g., in a single cell. Expression of inhibitor-resistant MGMT can selectively protect modified cells from a selection regimen, such as a selection regimen including an MGMT inhibitor and an alkylating agent. Accordingly, in vivo, in vitro, and ex vivo modification of MGMT-encoding nucleic acids can be used in gene therapy to select for modified cells.

### CROSS-REFERENCE TO RELATED APPLICATIONS

[0001] The present application claims the benefit to U.S. Provisional Application No. 63/307,426 filed on Feb. 7, 2022, U.S. Provisional Application No. 63/307,427 filed on Feb. 7, 2022, and U.S. Provisional Application No. 63/307,429 filed on Feb. 7, 2022, the contents of each of which are hereby incorporated herein in their entireties.

### BACKGROUND

[0002] Many medical conditions are caused by genetic mutation and/or are treatable, at least in part, by gene therapy. Some conditions are particularly treatable by modification of hematopoietic stem cells (HSCs). Compositions and methods for gene therapy, including HSC gene therapy, are therefore needed.

### SUMMARY

[0003] Gene therapy typically modifies some, but not all, cells of a population of target cells. One approach to increasing the frequency of modified cells includes delivering to the modified cells a gene that provides a selective advantage under a selection condition such as the presence of a selection agent. The present disclosure provides, among other things, methods and compositions that include various modifications providing a selective advantage to modified cells, e.g., by in vivo, in vitro, or ex vivo modification of endogenous nucleic acids of target cells. In particular, the present disclosure includes methods and compositions relating to various modifications disclosed herein for in vivo, in vitro, and/or ex vivo modification of endogenous MGMT-encoding nucleic acids, thereby providing a selective advantage to modified cells. The present disclosure further includes that in vivo, in vitro, and or ex vivo modification of endogenous MGMT-encoding nucleic acids to include or encode a modification as provide herein can be combined with delivery of a gene therapy payload such as a therapeutic payload.

[0004] In at least one aspect, the present disclosure provides a modified O(6)-methylguanine-DNA-methyltransferase (MGMT) polypeptide, where the modified MGMT polypeptide is resistant to O⁶-benzylguanine (O⁶BG), where the modified MGMT polypeptide includes at least one mutation selected from L33F, L33K, L33P, L33R, L33W, L33Y, M134F, M134V, M134W, M134Y, R135G, R135K, R135L, R135T, N137D, N137F, N137P, P138K, P140E, P140F, P140H, G156I, G156P, G156V, Y158M, Y158W, S159F, S159I, S159L, S159P, S159T, S159W, S159Y, G160D, G160E, G160H, G160K, and G160P.

[0005] In at least one aspect, the present disclosure provides a nucleic acid encoding a modified O(6)-methylguanine-DNA-methyltransferase (MGMT) polypeptide, where the modified MGMT polypeptide is resistant to O⁶-benzylguanine (O⁶BG), where the modified MGMT polypeptide includes at least one mutation selected from L33F, L33K, L33P, L33R, L33W, L33Y, M134F, M134V, M134W, M134Y, R135G, R135K, R135L, R135T, N137D, N137F, N137P, P138K, P140E, P140F, P140H, G156I, G156P, G156V, Y158M, Y158W, S159F, S159I, S159L, S159P, S159T, S159W, S159Y, G160D, G160E, G160H, G160K, and G160P.

[0006] In at least one aspect, the present disclosure provides a method including contacting an endogenous O(6)-methylguanine-DNA-methyltransferase (MGMT)-encoding nucleic acid of one or more cells of a mammalian subject with an editing enzyme to produce a modified MGMT-encoding nucleic acid, where the contacting occurs in vivo, in vitro, or ex vivo and the modified MGMT-encoding nucleic acid encodes MGMT^{P140K}. In some embodiments, the contacting occurs in vivo.

[0007] In at least one aspect, the present disclosure provides a method including contacting an endogenous O(6)-methylguanine-DNA-methyltransferase (MGMT)-encoding nucleic acid of one or more cells of a mammalian subject with an editing enzyme to produce a modified MGMT-encoding nucleic acid, where the contacting occurs in vivo, in vitro, or ex vivo and the modified MGMT-encoding nucleic acid encodes an O⁶-benzylguanine (O⁶BG)-resistant MGMT polypeptide, where the O⁶G-resistant MGMT polypeptide is not MGMT^{P140K} and/or does not include a lysine (K) at position 140 corresponding to SEQ ID NO: 1. In various embodiments, the O⁶BG-resistant MGMT polypeptide includes one or more amino acid mutations selected from V139F, P140A, P140G, P140I, P140L, P140M, P140N, P140Q, P140R, P140S, P140T, L142M, C150Y, S152H, A154G, G156A, N157T, Y158F, Y158H, G160A, G160R, G160S, L162P, L162V, K165E, K165N, K165R, A170S, PVP(138-140)CMK, PVP(138-140)CIK, PVP(138-140)HLK, PVP(138-140)KIK, PVP(138-140)KIR, PVP(138-140)KLK, PVP(138-140)KMK, PVP(138-140)KVK, PVP(138-140)KWK, PVP(138-140)KYK, PVP(138-140)KYN, PVP(138-140)KYR, PVP(138-140)MIK, PVP(138-140)MLK, PVP(138-140)MMK, PVP(138-140)MVK, PVP(138-140)MWK, PVP(138-140)MYR, PVP(138-140)NIK, PVP(138-140)NLK, PVP(138-140)NLL, PVP(138-140)PLK, PVP(138-140)PYR, PVP(138-140)QLN, PVP(138-140)RFK, PVP(138-140)RTK, PVP(138-140)RYK, PVP(138-140)SFK, PVP(138-140)SMK, PVP(138-140)TIK, PVP(138-140)TLK, PVP(138-140)TLN, PVP(138-140)TNK, PVP(138-140)RCK, PVP(138-140)SYK, PVP(138-140)VMK, and PVP(138-140)YAK. In various embodiments, the O⁶BG-resistant MGMT polypeptide includes one or more amino acid mutations selected from L33F, L33K, L33P, L33R, L33W, L33Y, M134F, M134V, M134W, M134Y, R135G, R135K, R135L, R135T, N137D, N137F, N137P, P138K, P140E, P140F, P140H, G156I, G156P, G156V, Y158M, Y158W, S159F, S159I, S159L, S159P, S159T, S159W, S159Y, G160D, G160E, G160H, G160K, and G160P. In at least one aspect, the present disclosure provides a method including contacting an endogenous O(6)-methylguanine-DNA-methyltransferase (MGMT)-encoding nucleic acid of one or more cells of a mammalian subject with an editing enzyme to produce a modified MGMT-encoding nucleic acid, where the contacting occurs in vivo, in vitro, or ex vivo and the modified MGMT-encoding nucleic acid encodes an O⁶-benzylguanine (O⁶BG)-resistant MGMT polypeptide, where the O⁶BG-resistant MGMT polypeptide includes one or more amino acid mutations selected from V139F, P140A, P140G, P140I, P140L, P140M, P140N, P140Q, P140R, P140S, P140T, L142M, C150Y, S152H, A154G, G156A, N157T, Y158F, Y158H, G160A, G160R, G160S, L162P, L162V, K165E, K165N, K165R, A170S, PVP(138-140)CMK, PVP(138-140)CIK, PVP(138-140)HLK, PVP(138-140)KIK, PVP(138-140)KIR, PVP(138-140)KLK, PVP(138-140)KMK, PVP(138-140)KVK, PVP(138-140)KWK, PVP(138-140)KYK, PVP(138-140)KYN, PVP(138-140)KYR, PVP(138-140)MIK, PVP(138-140)MLK, PVP(138-140)MMK, PVP(138-140)MVK, PVP(138-140)MWK, PVP(138-140)MYR, PVP(138-140)NIK, PVP(138-140)NLK, PVP(138-140)NLL, PVP(138-140)PLK, PVP(138-140)PYR, PVP(138-140)QLN, PVP(138-140)RFK, PVP(138-140)RTK, PVP(138-140)RYK, PVP(138-140)SFK, PVP(138-140)SMK, PVP(138-140)TIK, PVP(138-140)TLK, PVP(138-140)TLN, PVP(138-140)TNK, PVP(138-140)RCK, PVP(138-140)SYK, PVP(138-140)VMK, and PVP(138-140)YAK. In at least one aspect, the present disclosure provides a method including contacting an endogenous O(6)-methylguanine-DNA-methyltransferase (MGMT)-encoding nucleic acid of one or more cells of a mammalian subject with an editing enzyme to produce a modified MGMT-encoding nucleic acid, where the contacting occurs in vivo, in vitro, or ex vivo and the modified MGMT-encoding nucleic acid encodes an O⁶-benzylguanine (O⁶BG)-resistant MGMT polypeptide, where the O⁶BG-resistant MGMT polypeptide includes one or more amino acid mutations selected from L33F, L33K, L33P, L33R, L33W, L33Y, M134F, M134V, M134W, M134Y, R135G, R135K, R135L, R135T, N137D, N137F. N137P, P138K, P140E, P140F, P140H, G156I, G156P, G156V, Y158M, Y158W, S159F, S159I, S159L, S159P, S159T, S159W, S159Y, G160D, G160E, G160H, G160K, and G160P. In various embodiments, each of the one or more amino acid mutations is encoded in the modified MGMT-encoding nucleic acid by a corresponding nucleic acid mutation selected from Table 1 and/or Table 2. In various embodiments, the contacting occurs in vivo.

[0008] In at least one aspect, the present disclosure provides use of an editing enzyme for modification of endogenous an endogenous O(6)-methylguanine-DNA-methyltransferase (MGMT)-encoding nucleic acid of one or more cells of a mammalian subject to produce a modified MGMT-encoding nucleic acid, where the use includes contacting the endogenous MGMT-encoding nucleic acid with the editing enzyme in vivo, in vitro, or ex vivo and the modified MGMT-encoding nucleic acid encodes MGMT^{P140K}. In some embodiments, the contacting occurs in vivo.

[0009] In at least one aspect, the present disclosure provides use of an editing enzyme for modification of endogenous an endogenous O(6)-methylguanine-DNA-methyltransferase (MGMT)-encoding nucleic acid of one or more cells of a mammalian subject to produce a modified MGMT-encoding nucleic acid, where the use includes contacting the endogenous MGMT-encoding nucleic acid with the editing enzyme in vivo, in vitro, or ex vivo and the modified MGMT-encoding nucleic acid encodes an O⁶-benzylguanine (O⁶BG)-resistant MGMT polypeptide, where the O⁶BG-resistant MGMT polypeptide is not MGMT^{P140K} and/or does not include a lysine (K) at position 140 corresponding to SEQ ID NO: 1. In various embodiments, the O⁶BG-resistant MGMT polypeptide includes one or more amino acid mutations selected from V139F, P140A, P140G, P140I, P140L, P140M, P140N, P140Q, P140R, P140S, P140T, L142M, C150Y, S152H, A154G, G156A, N157T, Y158F, Y158H, G160A, G160R, G160S, L162P, L162V, K165E, K165N, K165R, A170S, PVP(138-140)CMK, PVP(138-140)CIK, PVP(138-140)HLK, PVP(138-140)KIK, PVP(138-140)KIR, PVP(138-140)KLK, PVP(138-140)KMK, PVP(138-140)KVK, PVP(138-140)KWK, PVP(138-140)KYK, PVP(138-140)KYN, PVP(138-140)KYR, PVP(138-140)MIK, PVP(138-140)MLK, PVP(138-140)MMK, PVP(138-140)MVK, PVP(138-140)MWK, PVP(138-140)MYR, PVP(138-140)NIK, PVP(138-140)NLK, PVP(138-140)NLL, PVP(138-140)PLK, PVP(138-140)PYR, PVP(138-140)QLN, PVP(138-140)RFK, PVP(138-140)RTK, PVP(138-140)RYK, PVP(138-140)SFK, PVP(138-140)SMK, PVP(138-140)TIK, PVP(138-140)TLK, PVP(138-140)TLN, PVP(138-140)TNK, PVP(138-140)RCK, PVP(138-140)SYK, PVP(138-140)VMK, and PVP(138-140)YAK. In various embodiments, the O⁶BG-resistant MGMT polypeptide includes one or more amino acid mutations selected from L33F, L33K, L33P, L33R, L33W, L33Y, M134F, M134V, M134W, M134Y, R135G, R135K, R135L, R135T, N137D, N137F, N137P, P138K, P140E, P140F, P140H, G156I, G156P, G156V, Y158M, Y158W, S159F, S159I, S159L, S159P, S159T, S159W, S159Y, G160D, G160E, G160H, G160K, and G160P. In at least one aspect, the present disclosure provides use of an editing enzyme for modification of endogenous an endogenous O(6)-methylguanine-DNA-methyltransferase (MGMT)-encoding nucleic acid of one or more cells of a mammalian subject to produce a modified MGMT-encoding nucleic acid, where the use includes contacting the endogenous MGMT-encoding nucleic acid with the editing enzyme in vivo, in vitro, or ex vivo and the modified MGMT-encoding nucleic acid encodes an O⁶-benzylguanine (O⁶BG)-resistant MGMT polypeptide, where the O⁶BG-resistant MGMT polypeptide includes one or more amino acid mutations selected from V139F, P140A, P140G, P140I, P140L, P140M, P140N, P140Q, P140R, P140S, P140T, L142M, C150Y, S152H, A154G, G156A, N157T, Y158F, Y158H, G160A, G160R, G160S, L162P, L162V, K165E, K165N, K165R, A170S, PVP(138-140)CMK, PVP(138-140)CIK, PVP(138-140)HLK, PVP(138-140)KIK, PVP(138-140)KIR, PVP(138-140)KLK, PVP(138-140)KMK, PVP(138-140)KVK, PVP(138-140)KWK, PVP(138-140)KYK, PVP(138-140)KYN, PVP(138-140)KYR, PVP(138-140)MIK, PVP(138-140)MLK, PVP(138-140)MMK, PVP(138-140)MVK, PVP(138-140)MWK, PVP(138-140)MYR, PVP(138-140)NIK, PVP(138-140)NLK, PVP(138-140)NLL, PVP(138-140) PLK, PVP(138-140)PYR, PVP(138-140)QLN, PVP(138-140)RFK, PVP(138-140)RTK, PVP(138-140)RYK, PVP(138-140)SFK, PVP(138-140)SMK, PVP(138-140)TIK, PVP(138-140)TLK, PVP(138-140)TLN, PVP(138-140)TNK, PVP(138-140)RCK, PVP(138-140)SYK, PVP(138-140)VMK, and PVP(138-140)YAK. In at least one aspect, the present disclosure provides use of an editing enzyme for modification of endogenous an endogenous O(6)-methylguanine-DNA-methyltransferase (MGMT)-encoding nucleic acid of one or more cells of a mammalian subject to produce a modified MGMT-encoding nucleic acid, where the use includes contacting the endogenous MGMT-encoding nucleic acid with the editing enzyme in vivo, in vitro, or ex vivo and the modified MGMT-encoding nucleic acid encodes an O⁶-benzylguanine (O⁶BG)-resistant MGMT polypeptide, where the O⁶BG-resistant MGMT polypeptide includes one or more amino acid mutations selected from L33F, L33K, L33P, L33R, L33W, L33Y, M134F, M134V, M134W, M134Y, R135G, R135K, R135L, R135T, N137D, N137F, N137P, P138K, P140E, P140F, P140H, G156I, G156P, G156V, Y158M, Y158W, S159F, S159I, S159L, S159P, S159T, S159W, S159Y, G160D, G160E, G160H, G160K, and G160P. In various embodiments, each of the one or more amino acid mutations is encoded in the modified MGMT-encoding nucleic acid by a corresponding nucleic acid mutation selected from Table 1 and/or Table 2. In various embodiments, the contacting occurs in vivo.

[0010] In various embodiments, a method or use of the present disclosure includes administering to the mammalian subject a nucleic acid encoding the editing enzyme. In various embodiments, the nucleic acid encoding the editing enzyme further encodes a guide RNA that directs editing of the endogenous MGMT-encoding nucleic acid by the editing enzyme. In various embodiments, the nucleic acid encoding the editing enzyme is administered parenterally. In various embodiments, the nucleic acid encoding the editing enzyme is administered by injection. In various embodiments, the nucleic acid encoding the editing enzyme is administered intravenously.

[0011] In various embodiments, a method or use of the present disclosure includes mobilization of hematopoietic stem cells of the subject prior to administration of the nucleic acid. In various embodiments, a method or use of the present disclosure includes administering one or more immunosuppression agents to the subject, optionally where the administration of the one or more immunosuppression agents is prior to the administration of the nucleic acid. In various embodiments, a method or use of the present disclosure includes administering one or more MGMT inhibitors to the subject after the nucleic acid has been administered. In various embodiments, the one or more MGMT inhibitors includes O⁶BG or an analog or derivative thereof, and/or where the one or more MGMT inhibitors includes Lomeguatrib. In various embodiments, a method or use of the present disclosure includes administering one or more alkylating agents to the subject after the nucleic acid has been administered. In various embodiments, the one or more alkylating agents include 1,3-bis(2-chloroethyl)-1-nitrosourea (BCNU) or temozolomide.

[0012] In various embodiments, the modified MGMT-encoding nucleic acid confers a selective advantage to, and/or permits selection of, cells including the modified MGMT-encoding nucleic acid. In various embodiments, a method or use of the present disclosure includes selecting for cells including the modified MGMT-encoding nucleic acid.

[0013] In at least one aspect, the present disclosure provides a nucleic acid encoding an editing enzyme and optionally further encoding a guide RNA, where the editing enzyme, upon contact with an O(6)-methylguanine-DNA-methyltransferase (MGMT)-encoding nucleic acid, produces a modified MGMT-encoding nucleic acid that encodes MGMT^{P140K} In various embodiments, the nucleic acid encoding the editing enzyme encodes a guide RNA that directs editing of the endogenous MGMT-encoding nucleic acid by the editing enzyme.

[0014] In at least one aspect, the present disclosure provides a nucleic acid encoding an editing enzyme and optionally further encoding a guide RNA, where the editing enzyme, upon contact with an O(6)-methylguanine-DNA-methyltransferase (MGMT)-encoding nucleic acid, produces a modified MGMT-encoding nucleic acid that encodes an O⁶-benzylguanine (O⁶BG)-resistant MGMT polypeptide, where the O⁶BG-resistant MGMT polypeptide is not MGMT^{P140K} and/or does not include a lysine (K) at position 140 corresponding to SEQ ID NO: 1. In various embodiments, the O⁶BG-resistant MGMT polypeptide includes one or more amino acid mutations selected from V139F, P140A, P140G, P140I, P140L, P140M, P140N, P140Q, P140R, P140S, P140T, L142M, C150Y, S152H, A154G, G156A, N157T, Y158F, Y158H, G160A, G160R, G160S, L162P, L162V, K165E, K165N, K165R, A170S, PVP(138-140)CMK, PVP(138-140)CIK, PVP(138-140)HLK, PVP(138-140)KIK, PVP(138-140)KIR, PVP(138-140)KLK, PVP(138-140)KMK, PVP(138-140)KVK, PVP(138-140)KWK, PVP(138-140)KYK, PVP(138-140)KYN, PVP(138-140)KYR, PVP(138-140)MIK, PVP(138-140)MLK, PVP(138-140)MMK, PVP(138-140)MVK, PVP(138-140)MWK, PVP(138-140)MYR, PVP(138-140)NIK, PVP(138-140)NLK, PVP(138-140)NLL, PVP(138-140)PLK, PVP(138-140)PYR, PVP(138-140)QLN, PVP(138-140)RFK, PVP(138-140)RTK, PVP(138-140)RYK, PVP(138-140)SFK, PVP(138-140)SMK, PVP(138-140)TIK, PVP(138-140)TLK, PVP(138-140)TLN, PVP(138-140)TNK, PVP(138-140)RCK, PVP(138-140)SYK, PVP(138-140)VMK, and PVP(138-140)YAK. In various embodiments, the O⁶BG-resistant MGMT polypeptide includes one or more amino acid mutations selected from L33F, L33K, L33P, L33R, L33W, L33Y, M134F, M134V, M134W, M134Y, R135G, R135K, R135L, R135T, N137D, N137F, N137P, P138K, P140E, P140F, P140H, G156I, G156P, G156V, Y158M, Y158W, S159F, S159I, S159L, S159P, S159T, S159W, S159Y, G160D, G160E, G160H, G160K, and G160P. In at least one aspect, the present disclosure provides a nucleic acid encoding an editing enzyme and optionally further encoding a guide RNA, where the editing enzyme, upon contact with an O(6)-methylguanine-DNA-methyltransferase (MGMT)-encoding nucleic acid, produces a modified MGMT-encoding nucleic acid that encodes an O⁶-benzylguanine (O⁶BG)-resistant MGMT polypeptide, where the O⁶BG-resistant MGMT polypeptide includes one or more amino acid mutations selected from V139F, P140A, P140G, P140I, P140L, P140M, P140N, P140Q, P140R, P140S, P140T, L142M, C150Y, S152H, A154G, G156A, N157T, Y158F, Y158H, G160A, G160R, G160S, L162P, L162V, K165E, K165N, K165R, A170S, PVP(138-140)CMK, PVP(138-140)CIK, PVP(138-140)HLK, PVP(138-140)KIK, PVP(138-140)KIR, PVP(138-140)KLK, PVP(138-140)KMK, PVP(138-140)KVK, PVP(138-140)KWK, PVP(138-140)KYK, PVP(138-140)KYN, PVP(138-140)KYR, PVP(138-140)MIK, PVP(138-140)MLK, PVP(138-140)MMK, PVP(138-140)MVK, PVP(138-140)MWK, PVP(138-140)MYR, PVP(138-140)NIK, PVP(138-140)NLK, PVP(138-140) NLL, PVP(138-140)PLK, PVP(138-140)PYR, PVP(138-140)QLN, PVP(138-140)RFK, PVP(138-140)RTK, PVP(138-140)RYK, PVP(138-140)SFK, PVP(138-140)SMK, PVP(138-140)TIK, PVP(138-140)TLK, PVP(138-140)TLN, PVP(138-140)TNK, PVP(138-140)RCK, PVP(138-140)SYK, PVP(138-140)VMK, and PVP(138-140)YAK. In at least one aspect, the present disclosure provides a nucleic acid encoding an editing enzyme and optionally further encoding a guide RNA, where the editing enzyme, upon contact with an O(6)-methylguanine-DNA-methyltransferase (MGMT)-encoding nucleic acid, produces a modified MGMT-encoding nucleic acid that encodes an O⁶-benzylguanine (O⁶BG)-resistant MGMT polypeptide, where the O⁶G-resistant MGMT polypeptide includes one or more amino acid mutations selected from L33F, L33K, L33P, L33R, L33W, L33Y, M134F, M134V, M134W, M134Y, R135G, R135K, R135L, R135T, N137D, N137F, N137P, P138K, P140E, P140F, P140H, G156I, G156P, G156V, Y158M, Y158W, S159F, S159I, S159L, S159P, S159T, S159W, S159Y, G160D, G160E, G160H, G160K, and G160P. In various embodiments, each of the one or more amino acid mutations is encoded in the modified MGMT-encoding nucleic acid by a corresponding nucleic acid mutation selected from Table 1 and/or Table 2. In various embodiments, the nucleic acid encoding the editing enzyme encodes a guide RNA that directs editing of the endogenous MGMT-encoding nucleic acid by the editing enzyme.

[0015] In at least one aspect, the present disclosure provides a pharmaceutical composition including the nucleic acid encoding an editing enzyme of the present disclosure. In various embodiments, the pharmaceutical composition is formulated for administration to a mammalian subject, optionally where the mammalian subject is a human subject. In various embodiments, the pharmaceutical composition is formulated for parenteral administration. In various embodiments, the pharmaceutical composition is formulated for injection. In various embodiments, the pharmaceutical composition is formulated for intravenous injection.

[0016] In at least one aspect, the present disclosure provides a kit that includes a nucleic acid encoding an editing enzyme of the present disclosure and/or the pharmaceutical composition of the present disclosure. In various embodiments, the kit includes one or more MGMT inhibitors. In various embodiments, the one or more MGMT inhibitors includes O⁶BG or an analog or derivative thereof, and/or where the one or more MGMT inhibitors includes Lomeguatrib. In various embodiments, the kit includes one or more alkylating agents. In various embodiments, the one or more alkylating agents include 1,3-bis(2-chloroethyl)-1-nitrosourea (BCNU) or temozolomide. In various embodiments, the kit includes one or more mobilization agents. In various embodiments, the kit includes one or more immunosuppression agents. In various embodiments, the kit includes instructions for selection for cells including modified MGMT-encoding nucleic acids.

[0017] In various embodiments, a method, use, nucleic acid, pharmaceutical composition, or kit of the present disclosure includes an editing enzyme that is a base editing enzyme that deaminates a nucleobase in the endogenous MGMT-encoding nucleic acid. In various embodiments, the base editing enzyme includes a DNA binding domain and a deaminase domain. In various embodiments, the DNA binding domain and deaminase domain are fused. In various embodiments, the DNA binding domain is a zinc finger domain. In various embodiments, the DNA binding domain is a TALEN domain. In various embodiments, the DNA binding domain is an RNA guided DNA binding domain. In various embodiments, the RNA guided DNA binding domain is a modified Cas9 variant or a modified Cas12a variant. In various embodiments, the RNA guided DNA binding domain is a catalytically impaired nuclease domain. In various embodiments, the RNA guided DNA binding domain is a nickase variant. In various embodiments, the deaminase domain is a cytidine deaminase domain. In various embodiments, the deaminase domain is an adenosine deaminase domain.

[0018] In various embodiments, a method, use, nucleic acid, pharmaceutical composition, or kit of the present disclosure includes an editing enzyme that is a prime editing enzyme that includes a DNA binding domain and a reverse transcriptase domain.

[0019] In various embodiments, the DNA binding domain is an RNA guided DNA binding domain. In various embodiments, the RNA guided DNA binding domain and reverse transcriptase domain are fused. In various embodiments, the RNA guided DNA binding domain is a modified Cas9 variant or a modified Cas12a variant. In various embodiments, the RNA guided DNA binding domain is a catalytically impaired nuclease domain. In various embodiments, the RNA guided DNA binding domain is a nickase variant. In various embodiments, the reverse transcriptase domain is an MLV reverse transcriptase domain.

[0020] In various embodiments, a method, use, nucleic acid, pharmaceutical composition, or kit of the present disclosure includes an editing enzyme that is an RNA editing enzyme that deaminates a nucleobase in mRNA transcripts produced from the endogenous MGMT gene to produce a modified MGMT mRNA transcript.

[0021] In various embodiments, a method, use, nucleic acid, pharmaceutical composition, or kit of the present disclosure includes a nucleic acid encoding an editing enzyme where the nucleic acid is encapsidated in a viral particle. In various embodiments, the viral particle is a recombinant adenovirus. In various embodiments, the recombinant adenovirus is a recombinant Ad35 virus. In various embodiments, the recombinant adenovirus is a recombinant Ad5 virus. In various embodiments, the recombinant adenovirus is an Ad3, Ad7, Ad11, Ad14, Ad16, Ad21, Ad34, Ad37, or Ad50 virus. In various embodiments, the recombinant adenovirus is a chimeric adenovirus. In various embodiments, the chimeric adenovirus is an Ad5/35 virus (e.g., an Ad5/35++ virus).

[0022] In various embodiments of a method, use, nucleic acid, pharmaceutical composition, or kit of the present disclosure a nucleic acid encoding the editing enzyme is encapsulated in a lipid nanoparticle. In various embodiments of a method, use, nucleic acid, pharmaceutical composition, or kit of the present disclosure a nucleic acid encoding an editing enzyme is encapsulated in a liposome.

[0023] In various embodiments, a method, use, nucleic acid, pharmaceutical composition, or kit of the present disclosure includes a nucleic acid encoding an editing enzyme where the nucleic acid further includes a therapeutic payload. In various embodiments, the therapeutic payload is a non-integrating payload. In various embodiments, the therapeutic payload is an integrating payload, optionally where the integrating payload does not encode the editing enzyme. In various embodiments, the therapeutic payload comprises a nucleic acid encoding a globin protein, where the globin protein comprises a y-globin, a β-globin, and/or an a-globin. In various embodiments, the therapeutic payload comprises a nucleic acid encoding a chimeric antigen receptor (CAR), engineered T-cell receptor (TCR), checkpoint inhibitor, and/or therapeutic antibody.

[0024] In various embodiments of a method, use, nucleic acid, pharmaceutical composition, or kit of the present disclosure, the endogenous MGMT-encoding nucleic acid is an MGMT gene in the genomes of the one or more cells.

[0025] In various embodiments of a method, use, nucleic acid, pharmaceutical composition, or kit of the present disclosure, the endogenous MGMT-encoding nucleic acid is an MGMT mRNA transcript expressed from an MGMT gene of a genome of the one or more cells.

[0026] In various embodiments of a method, use, nucleic acid, pharmaceutical composition, or kit of the present disclosure, the cells are hematopoietic cells.

[0027] In various embodiments of a method, use, nucleic acid, pharmaceutical composition, or kit of the present disclosure, the cells are hematopoietic stem cells.

[0028] In at least one aspect, the present disclosure provides a method including contacting an endogenous O(6)-methylguanine-DNA-methyltransferase (MGMT)-encoding nucleic acid of one or more cells of a mammalian subject with an editing enzyme to produce a modified MGMT-encoding nucleic acid, where the contacting occurs in vivo, in vitro, or ex vivo and the modified MGMT-encoding nucleic acid encodes MGMT^{P140K}. In some embodiments, the contacting occurs in vivo.

[0029] In at least one aspect, the present disclosure provides use of an editing enzyme for modification of endogenous an endogenous O(6)-methylguanine-DNA-methyltransferase (MGMT)-encoding nucleic acid of one or more cells of a mammalian subject to produce a modified MGMT-encoding nucleic acid, where the use includes contacting the endogenous MGMT-encoding nucleic acid with the editing enzyme in vivo, in vitro, or ex vivo and the modified MGMT-encoding nucleic acid encodes MGMT^{P140K}. In some embodiments, the contacting occurs in vivo.

[0030] In various embodiments, a method or use of the present disclosure includes administering to the mammalian subject a nucleic acid encoding the editing enzyme. In various embodiments, the nucleic acid encoding the editing enzyme further encodes a guide RNA that directs editing of the endogenous MGMT-encoding nucleic acid by the editing enzyme. In various embodiments, the nucleic acid encoding the editing enzyme is administered parenterally. In various embodiments, the nucleic acid encoding the editing enzyme is administered by injection. In various embodiments, the nucleic acid encoding the editing enzyme is administered intravenously.

[0031] In various embodiments, a method or use of the present disclosure includes mobilization of hematopoietic stem cells (HSCs) of the subject prior to administration of the nucleic acid. In various embodiments, a method or use of the present disclosure includes one or more immunosuppression agents to the subject, optionally where the administration of the one or more immunosuppression agents is prior to the administration of the nucleic acid. In various embodiments, a method or use of the present disclosure includes administering one or more MGMT inhibitors to the subject after the nucleic acid has been administered. In various embodiments, the one or more MGMT inhibitors includes O⁶BG or an analog or derivative thereof, and/or where the one or more MGMT inhibitors includes Lomeguatrib. In various embodiments, a method or use of the present disclosure includes administering one or more alkylating agents to the subject after the nucleic acid has been administered. In various embodiments, the one or more alkylating agents include 1,3-bis(2-chloroethyl)-1-nitrosourea (BCNU) or temozolomide.

[0032] In various embodiments, the modified MGMT-encoding nucleic acid confers a selective advantage to, and/or permits selection of, cells including the modified MGMT-encoding nucleic acid. In various embodiments, a method or use of the present disclosure includes selecting for cells including the modified MGMT-encoding nucleic acid.

[0033] In at least one aspect, the present disclosure provides a nucleic acid encoding an editing enzyme and optionally further encoding a guide RNA, where the editing enzyme, upon contact with an O(6)-methylguanine-DNA-methyltransferase (MGMT)-encoding nucleic acid, produces a modified MGMT-encoding nucleic acid that encodes MGMT^{P140K} In various embodiments, the nucleic acid encoding the editing enzyme encodes a guide RNA that directs editing of the endogenous MGMT-encoding nucleic acid by the editing enzyme.

[0034] In at least one aspect, the present disclosure provides a pharmaceutical composition including a nucleic acid encoding an editing enzyme of the present disclosure. In various embodiments, the pharmaceutical composition is formulated for administration to a mammalian subject, optionally where the mammalian subject is a human subject. In various embodiments, the pharmaceutical composition is formulated for parenteral administration. In various embodiments, the pharmaceutical composition is formulated for injection. In various embodiments, the pharmaceutical composition is formulated for intravenous injection.

[0035] In at least one aspect, the present disclosure provides a kit that includes a nucleic acid encoding an editing enzyme as disclosed herein and/or a pharmaceutical composition of the present disclosure. In various embodiments, the kit includes one or more MGMT inhibitors. In various embodiments, the one or more MGMT inhibitors includes O⁶BG or an analog or derivative thereof, and/or where the one or more MGMT inhibitors includes Lomeguatrib. In various embodiments, the kit includes one or more alkylating agents. In various embodiments, the one or more alkylating agents include 1,3-bis(2-chloroethyl)-1-nitrosourea (BCNU) or temozolomide. In various embodiments, the kit includes one or more mobilization agents. In various embodiments, the kit includes one or more immunosuppression agents. In various embodiments, the kit includes instructions for selection for cells including modified MGMT-encoding nucleic acids.

[0036] In various embodiments, a method, use, nucleic acid, pharmaceutical composition, or kit of the present disclosure includes an editing enzyme that is a base editing enzyme that deaminates a nucleobase in the endogenous MGMT-encoding nucleic acid. In various embodiments, the base editing enzyme includes a DNA binding domain and a deaminase domain. In various embodiments, the DNA binding domain and deaminase domain are fused. In various embodiments, the DNA binding domain is a zinc finger domain. In various embodiments, the DNA binding domain is a TALEN domain. In various embodiments, the DNA binding domain is an RNA guided DNA binding domain. In various embodiments, the RNA guided DNA binding domain is a modified Cas9 variant or a modified Cas12a variant. In various embodiments, the RNA guided DNA binding domain is a catalytically impaired nuclease domain. In various embodiments, RNA guided DNA binding domain is a nickase variant. In various embodiments, the deaminase domain is a cytidine deaminase domain. In various embodiments, the deaminase domain is an adenosine deaminase domain.

[0037] In various embodiments, a method, use, nucleic acid, pharmaceutical composition, or kit of the present disclosure includes an editing enzyme that is a prime editing enzyme that includes a DNA binding domain and a reverse transcriptase domain.

[0038] In various embodiments, the DNA binding domain is an RNA guided DNA binding domain. In various embodiments, the RNA guided DNA binding domain and reverse transcriptase domain are fused. In various embodiments, the RNA guided DNA binding domain is a modified Cas9 variant or a modified Cas12a variant. In various embodiments, the RNA guided DNA binding domain is a catalytically impaired nuclease domain. In various embodiments, the RNA guided DNA binding domain is a nickase variant. In various embodiments, the reverse transcriptase domain is an MLV reverse transcriptase domain.

[0039] In various embodiments, a method, use, nucleic acid, pharmaceutical composition, or kit of the present disclosure includes an editing enzyme that is an RNA editing enzyme that deaminates a nucleobase in mRNA transcripts produced from the endogenous MGMT gene to produce a modified MGMT mRNA transcript.

[0040] In various embodiments, a method, use, nucleic acid, pharmaceutical composition, or kit of the present disclosure includes a nucleic acid encoding an editing enzyme where the nucleic acid is encapsidated in a viral particle. In various embodiments, the viral particle is a recombinant adenovirus. In various embodiments, the recombinant adenovirus is a recombinant Ad35 virus. In various embodiments, the recombinant adenovirus is a recombinant Ad5 virus. In various embodiments, the recombinant adenovirus is an Ad3, Ad7, Ad11, Ad14, Ad16, Ad21, Ad34, Ad37, or Ad50 virus. In various embodiments, the recombinant adenovirus is a chimeric adenovirus. In various embodiments, the chimeric adenovirus is an Ad5/35 virus (e.g., an Ad5/35++ virus).

[0041] In various embodiments of a method, use, nucleic acid, pharmaceutical composition, or kit of the present disclosure a nucleic acid encoding an editing enzyme is encapsulated in a lipid nanoparticle. In various embodiments of a method, use, nucleic acid, pharmaceutical composition, or kit of the present disclosure a nucleic acid encoding an editing enzyme is encapsulated in a liposome.

[0042] In various embodiments, a method, use, nucleic acid, pharmaceutical composition, or kit of the present disclosure includes a nucleic acid encoding an editing enzyme where the nucleic acid further includes a therapeutic payload. In various embodiments, the therapeutic payload is a non-integrating payload. In various embodiments, the therapeutic payload is an integrating payload, optionally where the integrating payload does not encode the editing enzyme. In various embodiments, the therapeutic payload comprises a nucleic acid encoding a globin protein, where the globin protein comprises a y-globin, a B-globin, and/or an a-globin. In various embodiments, the therapeutic payload comprises a nucleic acid encoding a chimeric antigen receptor (CAR), engineered T-cell receptor (TCR), checkpoint inhibitor, and/or therapeutic antibody.

[0043] In various embodiments of a method, use, nucleic acid, pharmaceutical composition, or kit of the present disclosure, the endogenous MGMT-encoding nucleic acid is an MGMT gene in the genomes of the one or more cells.

[0044] In various embodiments of a method, use, nucleic acid, pharmaceutical composition, or kit of the present disclosure, the endogenous MGMT-encoding nucleic acid is an MGMT mRNA transcript expressed from an MGMT gene of a genome of the one or more cells.

[0045] In various embodiments of a method, use, nucleic acid, pharmaceutical composition, or kit of the present disclosure, the cells are hematopoietic cells.

[0046] In various embodiments of a method, use, nucleic acid, pharmaceutical composition, or kit of the present disclosure, the cells are hematopoietic stem cells.

### BRIEF DESCRIPTION OF THE DRAWINGS

[0047] FIGS. 1A-1D. FIG. 1A is a schematic showing fetal hemoglobin (HPFH) mutations introduced with ABE within the HBG promoter to disrupt binding of repressor proteins (ZBTB7A, BCL11A) or to introduce site for activators (KLF1, TAL1, GATA1). FIG. 1B is a graph that shows editing efficiency. FIG. 1C is a graph that shows corresponding HbF reactivation measured in erythroid-differentiated human CD34+ cells edited by ABE7.19 protein electroporation targeting the sites shown in FIG. 1A. FIG. 1D is a graph that shows editing efficiency in CD34+ HSCs edited using increasing amounts of CBE protein targeting the HPFH-113 site.

### DEFINITIONS

[0048] A, An, The: As used herein, “a”, “an”, and “the” refer to one or to more than one (i.e., to at least one) of the grammatical object of the article. By way of example, “an element” discloses embodiments of exactly one element and embodiments including more than one element.

[0049] About: As used herein, term “about”, when used in reference to a value, refers to a value that is similar, in context to the referenced value. In general, those skilled in the art, familiar with the context, will appreciate the relevant degree of variance encompassed by “about” in that context. For example, in some embodiments, the term “about” may encompass a range of values that within 25%, 20%, 19%, 18%, 17%, 16%, 15%, 14%, 13%, 12%, 11%, 10%, 9%, 8%, 7%, 6%, 5%, 4%, 3%, 2%, 1%, or less of the referenced value.

[0050] Administration: As used herein, the term “administration” typically refers to administration of a composition to a subject or system to achieve delivery of an agent that is, or is included in, the composition.

[0051] Agent: As used herein, the term “agent” may refer to any chemical entity, including without limitation any of one or more of an atom, molecule, compound, amino acid, polypeptide, nucleotide, nucleic acid, protein, protein complex, liquid, solution, saccharide, polysaccharide, lipid, or combination or complex thereof.

[0052] Analog: As used herein, the term “analog” refers to a substance that shares one or more particular structural features, elements, components, or moieties with a reference substance. Typically, an “analog” shows significant structural similarity with the reference substance, for example sharing a core or consensus structure, but also differs in certain discrete ways. In some embodiments, an analog is a substance that can be generated from the reference substance, e.g., by chemical manipulation of the reference substance. In some embodiments, an analog is a substance that can be generated through performance of a synthetic process substantially similar to (e.g., sharing a plurality of steps with) one that generates the reference substance. In some embodiments, an analog is or can be generated through performance of a synthetic process different from that used to generate the reference substance.

[0053] Associated with: Two events or entities are “associated” with one another, as that term is used herein, if the presence, level and/or form of one is correlated with that of the other. For example, a particular entity (e.g., polypeptide, genetic signature, metabolite, microbe, etc.) is considered to be associated with a particular disease, disorder, or condition, if its presence, level and/or form correlates with incidence of and/or susceptibility to the disease, disorder, or condition (e.g., across a relevant population). In some embodiments, two or more entities are physically “associated” with one another if they interact, directly or indirectly, so that they are and/or remain in physical proximity with one another. In some embodiments, two or more entities that are physically associated with one another are covalently linked to one another (e.g., directly or via a linker, e.g., in a fusion polypeptide); in some embodiments, two or more entities that are physically associated with one another are not covalently linked to one another but are non-covalently associated, for example by means of hydrogen bonds, van der Waals interaction, hydrophobic interactions, magnetism, or a combination thereof.

[0054] Between or From: As used herein, the term “between” refers to content that falls between indicated upper and lower, or first and second, boundaries, inclusive of the boundaries. Similarly, the term “from”, when used in the context of a range of values, indicates that the range includes content that falls between indicated upper and lower, or first and second, boundaries, inclusive of the boundaries.

[0055] Binding: As used herein, the term “binding” refers to a non-covalent association between or among two or more agents. “Direct” binding involves physical contact between agents: indirect binding involves physical interaction by way of physical contact with one or more intermediate agents. Binding between two or more agents can occur and/or be assessed in any of a variety of contexts, including where interacting agents are studied in isolation or in the context of more complex systems (e.g., while covalently or otherwise associated with a carrier agents and/or in a biological system or cell).

[0056] Control expression or activity: As used herein, a first element (e.g., a protein, such as a transcription factor, or a nucleic acid sequence, such as promoter) “controls” or “drives” expression or activity of a second element (e.g., a protein or a nucleic acid encoding an agent such as a protein) if the expression or activity of the second element is wholly or partially dependent upon status (e.g., presence, absence, conformation, chemical modification, interaction, or other activity) of the first under at least one set of conditions. Control of expression or activity can be substantial control or activity, e.g., in that a change in status of the first element can, under at least one set of conditions, result in a change in expression or activity of the second element of at least 10% (e.g., at least 20%, 30%, 40%, 50%, 60%, 70%, 80%, 90%, 100%, 2-fold, 3-fold, 4-fold, 5-fold, 10-fold, 20-fold, 30-fold, 40-fold, 50-fold, 100-fold) as compared to a reference control.

[0057] Corresponding to: As used herein, the term “corresponding to” may be used to designate the position/identity of a structural element in a compound or composition through comparison with an appropriate reference compound or composition. For example, in some embodiments, a monomeric residue in a polymer (e.g., an amino acid residue in a polypeptide or a nucleic acid residue in a polynucleotide) may be identified as “corresponding to” a residue in an appropriate reference polymer. For example, those of skill in the art appreciate that residues in a provided polypeptide or polynucleotide sequence are often designated (e.g., numbered or labeled) according to the scheme of a related reference sequence (even if, e.g., such designation does not reflect literal numbering of the provided sequence). By way of illustration, if a reference sequence includes a particular amino acid motif at positions 100-110, and a second related sequence includes the same motif at positions 110-120, the motif positions of the second related sequence can be said to “correspond to” positions 100-110 of the reference sequence. Those of skill in the art appreciate that corresponding positions can be readily identified, e.g., by alignment of sequences, and that such alignment is commonly accomplished by any of a variety of known tools, strategies, and/or algorithms, including without limitation software programs such as, for example, BLAST, CS-BLAST, CUDASW++, DIAMOND, FASTA, GGSEARCH/GLSEARCH, Genoogle, HMMER, HHpred/HHsearch, IDF, Infernal, KLAST, USEARCH, parasail, PSI-BLAST, PSI-Search, ScalaBLAST, Sequilab, SAM, SSEARCH, SWAPHI, SWAPHI-LS, SWIMM, or SWIPE.

[0058] Domain: The term “domain” as used herein refers to a section or portion of an entity. In some embodiments, a “domain” is associated with a particular structural and/or functional feature of the entity so that, when the domain is physically separated from the rest of its parent entity, it substantially or entirely retains the particular structural and/or functional feature. Alternatively or additionally, a domain may be or include a portion of an entity that, when separated from that (parent) entity and linked with a different (recipient) entity, substantially retains and/or imparts on the recipient entity one or more structural and/or functional features that characterized it in the parent entity. In some embodiments, a domain is a section or portion of a molecule (e.g., a small molecule, carbohydrate, lipid, nucleic acid, or polypeptide). In some embodiments, a domain is a section of a polypeptide; in some such embodiments, a domain is characterized by a particular structural element (e.g., a particular amino acid sequence or sequence motif, a-helix character, B-sheet character, coiled-coil character, random coil character, etc.), and/or by a particular functional feature (e.g., binding activity, enzymatic activity, folding activity, signaling activity, etc.). In some embodiments, a domain is or includes a characteristic portion or characteristic sequence element. In the present disclosure, reference to a polypeptide such as an enzyme can refer to an identified enzyme or a domain thereof (e.g., a domain having an identified activity), or to a variant of either of these.

[0059] Dosing regimen: As used herein, the term “dosing regimen” can refer to a set of one or more same or different unit doses administered to a subject, typically including a plurality of unit doses administration of each of which is separated from administration of the others by a period of time. In various embodiments, one or more or all unit doses of a dosing regimen may be the same or can vary (e.g., increase over time, decrease over time, or be adjusted in accordance with the subject and/or with a medical practitioner's determination). In various embodiments, one or more or all of the periods of time between each dose may be the same or can vary (e.g., increase over time, decrease over time, or be adjusted in accordance with the subject and/or with a medical practitioner's determination). In some embodiments, a given therapeutic agent has a recommended dosing regimen, which can involve one or more doses. Typically, at least one recommended dosing regimen of a marketed drug is known to those of skill in the art. In some embodiments, a dosing regimen is correlated with a desired or beneficial outcome when administered across a relevant population (i.e., is a therapeutic dosing regimen).

[0060] Downstream and Upstream: As used herein, the term” downstream” means that a first DNA region is closer, relative to a second DNA region, to the C-terminus of a nucleic acid that includes the first DNA region and the second DNA region. As used herein, the term “upstream” means a first DNA region is closer, relative to a second DNA region, to the N-terminus of a nucleic acid that includes the first DNA region and the second DNA region.

[0061] Effective amount: An “effective amount” is the amount of a formulation necessary to result in a desired physiological change in a subject. Effective amounts are often administered for research purposes.

[0062] Endogenous: As used herein, an agent is “endogenous” if it is naturally present in a relevant context (e.g., in a cell or organism) and/or is not present in the context as the result of engineering. For example, a nucleic acid sequence can be referred to as “endogenous” to a cell if it is present in and/or expressed from a genomic coding sequence of the cell, e.g., a genomic sequence that has not been engineered, a genomic sequence present in the cell at the time of completion of cytokinesis, and/or a genomic sequence that is derived from a germline genome of a multicellular organism in which the cell is present or from which the cell was derived.

[0063] Engineered: As used herein, the term “engineered” refers to the aspect of having been manipulated by the hand of man. For example, a polynucleotide is considered to be “engineered” when two or more sequences, that are not linked together in that order in nature, are manipulated by the hand of man to be directly linked to one another in the engineered polynucleotide. Those of skill in the art will appreciate that an “engineered” nucleic acid or amino acid sequence can be a recombinant nucleic acid or amino acid sequence, and can be referred to as “recombinant” or “genetically engineered.” In some embodiments, an engineered polynucleotide includes a coding sequence and/or a regulatory sequence that is found in nature operably linked with a first sequence but is not found in nature operably linked with a second sequence, which is in the engineered polynucleotide operably linked in with the second sequence by the hand of man. In some embodiments, a cell or organism is considered to be “engineered” or “genetically engineered” if it has been manipulated so that its genetic information is altered (e.g., new genetic material not previously present has been introduced, for example by transformation, mating, somatic hybridization, transfection, transduction, or other mechanism, or previously present genetic material is altered or removed, for example by substitution, deletion, or mating). As is common practice and is understood by those of skill in the art, progeny or copies, perfect or imperfect, of an engineered polynucleotide or cell are typically still referred to as “engineered” even though the direct manipulation was of a prior entity.

[0064] Excipient: As used herein, “excipient” refers to a non-therapeutic agent that may be included in a pharmaceutical composition, for example to provide or contribute to a desired consistency or stabilizing effect. In some embodiments, suitable pharmaceutical excipients may include, for example, starch, glucose, lactose, sucrose, gelatin, malt, rice, flour, chalk, silica gel, sodium stearate, glycerol monostearate, talc, sodium chloride, dried skim milk, glycerol, propylene, glycol, water, ethanol, or the like.

[0065] Expression: As used herein, “expression” refers individually and/or cumulatively to one or more biological process that result in production from a nucleic acid sequence of an encoded agent, such as a protein. Expression specifically includes either or both of transcription and translation.

[0066] Flank: As used herein, a first element (e.g., a nucleic acid sequence or amino acid sequence) present in a contiguous sequence with a second element and a third element is “flanked” by the second element and third element if it is positioned in the contiguous sequence between the second element and the third element. Accordingly, in such arrangement, the second element and third element can be referred to as “flanking” the first element. Flanking elements can be immediately adjacent to a flanked element or separated from the flanked element by one or more relevant units. In various examples in which the contiguous sequence is a nucleic acid or amino acid sequence, and the relevant units are bases or amino acid residues, respectively, the number of units in the contiguous sequence that are between a flanked element and, independently, first and/or second flanking elements can be, e.g., 50 units or less, e.g., no more than 50, 45, 40, 35, 30, 25, 20, 15, 10, 5, 4, 3, 2, 1, or 0 units.

[0067] Fragment: As used herein, “fragment” refers a structure that includes and/or consists of a discrete portion of a reference agent (sometimes referred to as the “parent” agent). In some embodiments, a fragment lacks one or more moieties found in the reference agent. In some embodiments, a fragment includes or consists of one or more moieties found in the reference agent. In some embodiments, the reference agent is a polymer such as a polynucleotide or polypeptide. In some embodiments, a fragment of a polymer includes or consists of at least 3, 4, 5, 6, 7, 8, 9, 10, 11, 12, 13, 14, 15, 16, 17, 18, 19, 20, 25, 30, 35, 40, 45, 50, 55, 60, 65, 70, 75, 80, 85, 90, 95, 100, 110, 120, 130, 140, 150, 160, 170, 180, 190, 200, 210, 220, 230, 240, 250, 275, 300, 325, 350, 375, 400, 425, 450, 475, 500 or more monomeric units (e.g., residues) of the reference polymer. In some embodiments, a fragment of a polymer includes or consists of at least 5%, 10%, 15%, 20%, 25%, 30%, 25%, 40%, 45%, 50%, 55%, 60%, 65%, 70%, 75%, 80%, 85%, 90%, 95%, 96%, 97%, 98%, 99% or more of the monomeric units (e.g., residues) found in the reference polymer. A fragment of a reference polymer is not necessarily identical to a corresponding portion of the reference polymer. For example, a fragment of a reference polymer can be a polymer having a sequence of residues having at least 5%, 10%, 15%, 20%, 25%, 30%, 25%, 40%, 45%, 50%, 55%, 60%, 65%, 70%, 75%, 80%, 85%, 90%, 95%, 96%, 97%, 98%, 99% or more identity to the reference polymer. A fragment may, or may not, be generated by physical fragmentation of a reference agent. In some instances, a fragment is generated by physical fragmentation of a reference agent. In some instances, a fragment is not generated by physical fragmentation of a reference agent and can be instead, for example, produced by de novo synthesis or other means. In various instances, a fragment can alternatively be referred to as a portion.

[0068] Fusion polypeptide: As used herein, the term “fusion polypeptide” generally refers to a polypeptide including at least two segments. Typically, a polypeptide containing at least two such segments is considered to be a fusion polypeptide if the two segments are moieties that (1) are not included in nature in the same peptide, and/or (2) have not previously been linked to one another in a single polypeptide, and/or (3) have been linked to one another through action of the hand of man. A fusion polypeptide can include amino acids in addition to amino acids of two segments of the fusion polypeptide, or in addition to amino acids of the at least two segments of the polypeptide. Moieties present in a fusion polypeptide can be directly covalently associated or covalently associated via a linker. Moieties present in a fusion polypeptide can be referred to as “fused”. Fusion polypeptides can also be referred to as fusion proteins.

[0069] Gene, Transgene: As used herein, the term “gene” refers to a DNA sequence that is or includes coding sequence (i.e., a DNA sequence that encodes an expression product, such as an RNA product and/or a polypeptide product), optionally together with some or all of regulatory sequences that control expression of the coding sequence. In some embodiments, a gene includes non-coding sequence such as, without limitation, introns. In some embodiments, a gene may include both coding (e.g., exonic) and non-coding (e.g., intronic) sequences. In some embodiments, a gene includes a regulatory sequence that is a promoter. In some embodiments, a gene includes one or both of a (i) DNA nucleotides extending a predetermined number of nucleotides upstream of the coding sequence in a reference context, such as a source genome, and (ii) DNA nucleotides extending a predetermined number of nucleotides downstream of the coding sequence in a reference context, such as a source genome. In various embodiments, the predetermined number of nucleotides can be 500 bp, 1 kb, 2 kb, 3 kb, 4 kb, 5 kb, 10 kb, 20 kb, 30 kb, 40 kb, 50 kb, 75 kb, or 100 kb. As used herein, a “transgene” refers to a gene that is not endogenous or native to a reference context in which the gene is present or into which the gene may be placed by engineering.

[0070] Gene product or expression product: As used herein, the term “gene product” or “expression product” generally refers to an RNA transcribed from the gene (pre-and/or post-processing) or a polypeptide (pre- and/or post-modification) encoded by an RNA transcribed from the gene.

[0071] Heterologous: As used herein, an agent is “heterologous” if it is not naturally present in a relevant context and/or is only present in the context as the result of engineering. For example, a first nucleic acid sequence is “heterologous” to a second nucleic acid sequence if the first nucleic acid sequence is not operatively linked with the second nucleic acid sequence in nature and/or in a reference context. For instance, a polypeptide is “heterologous” to a regulatory sequence if it is encoded by nucleic acid sequence that is not operatively linked with the regulatory sequence in nature and/or in a reference context.

[0072] Host cell, target cell: As used herein, “host cell” refers to a cell into which exogenous DNA (recombinant or otherwise), such as a transgene, has been introduced. Those of skill in the art appreciate that a “host cell” can be the cell into which the exogenous DNA was initially introduced and/or progeny or copies, perfect or imperfect, thereof. In some embodiments, a host cell includes one or more viral genes or transgenes. In some embodiments, an intended or potential host cell can be referred to as a target cell.

[0073] In various embodiments, a host cell or target cell is identified by the presence, absence, or expression level of various surface markers.

[0074] A statement that a cell or population of cells is “positive” for or expressing a particular marker refers to the detectable presence on or in the cell of the particular marker. When referring to a surface marker, the term can refer to the presence of surface expression as detected by flow cytometry, for example, by staining with an antibody that specifically binds to the marker and detecting said antibody, wherein the staining is detectable by flow cytometry at a level substantially above the staining detected carrying out the same procedure with an isotype-matched control under otherwise identical conditions and/or at a level substantially similar to that for cell known to be positive for the marker, and/or at a level substantially higher than that for a cell known to be negative for the marker.

[0075] A statement that a cell or population of cells is “negative” for a particular marker or lacks expression of a marker refers to the absence of substantial detectable presence on or in the cell of a particular marker. When referring to a surface marker, the term can refer to the absence of surface expression as detected by flow cytometry, for example, by staining with an antibody that specifically binds to the marker and detecting said antibody, wherein the staining is not detected by flow cytometry at a level substantially above the staining detected carrying out the same procedure with an isotype-matched control under otherwise identical conditions, and/or at a level substantially lower than that for cell known to be positive for the marker, and/or at a level substantially similar as compared to that for a cell known to be negative for the marker.

[0076] Identity: As used herein, the term “identity” refers to the overall relatedness between polymeric molecules, e.g., between nucleic acid molecules (e.g., DNA molecules and/or RNA molecules) and/or between polypeptide molecules. Methods for the calculation of a percent identity as between two provided sequences are known in the art. The term “% sequence identity” refers to a relationship between two or more sequences, as determined by comparing the sequences. In the art, “identity” also means the degree of sequence relatedness between protein and nucleic acid sequences as determined by the match between strings of such sequences. “Identity” (often referred to as “similarity”) can be readily calculated by known methods, including those described in: Computational Molecular Biology (Lesk, A. M., ed.) Oxford University Press, NY (1988); Biocomputing: Informatics and Genome Projects (Smith, D. W., ed.) Academic Press, NY (1994); Computer Analysis of Sequence Data, Part I (Griffin, A. M., and Griffin, H. G., eds.) Humana Press, NJ (1994); Sequence Analysis in Molecular Biology (Von Heijne, G., ed.) Academic Press (1987); and Sequence Analysis Primer (Gribskov, M. and Devereux, J., eds.) Oxford University Press, NY (1992). Preferred methods to determine identity are designed to give the best match between the sequences tested. Methods to determine identity and similarity are codified in publicly available computer programs. For instance, calculation of the percent identity of two nucleic acid or polypeptide sequences, for example, can be performed by aligning the two sequences (or the complement of one or both sequences) for optimal comparison purposes (e.g., gaps can be introduced in one or both of a first and a second sequences for optimal alignment and non-identical sequences can be disregarded for comparison purposes). The nucleotides or amino acids at corresponding positions are then compared. When a position in the first sequence is occupied by the same residue (e.g., nucleotide or amino acid) as the corresponding position in the second sequence, then the molecules are identical at that position. The percent identity between the two sequences is a function of the number of identical positions shared by the sequences, optionally accounting for the number of gaps, and the length of each gap, which may need to be introduced for optimal alignment of the two sequences. The comparison of sequences and determination of percent identity between two sequences can be accomplished using a computational algorithm, such as BLAST (basic local alignment search tool). Sequence alignments and percent identity calculations may be performed using the Megalign program of the LASERGENE bioinformatics computing suite (DNASTAR, Inc., Madison, Wisconsin). Multiple alignment of the sequences can also be performed using the Clustal method of alignment (Higgins and Sharp CABIOS, 5, 151-153 (1989) with default parameters (GAP PENALTY=10, GAP LENGTH PENALTY=10). Relevant programs also include the GCG suite of programs (Wisconsin Package Version 9.0, Genetics Computer Group (GCG), Madison, Wisconsin); BLASTP, BLASTN, BLASTX (Altschul et al., J. Mol. Biol. 215:403-410 (1990); DNASTAR (DNASTAR, Inc., Madison, Wisconsin); and the FASTA program incorporating the Smith-Waterman algorithm (Pearson, Comput. Methods Genome Res., [Proc. Int. Symp.] (1994), Meeting Date 1992, 111-20. Editor(s): Suhai, Sandor. Publisher: Plenum, New York, N.Y. Within the context of this disclosure it will be understood that where sequence analysis software is used for analysis, the results of the analysis are based on the “default values” of the program referenced. “Default values” will mean any set of values or parameters, which originally load with the software when first initialized.

[0077] “Improve,” “increase,” “inhibit,” or “reduce”: As used herein, the terms “improve”, “increase”, “inhibit”, and “reduce”, and grammatical equivalents thereof, indicate qualitative or quantitative difference from a reference.

[0078] Isolated: As used herein, “isolated” refers to a substance and/or entity that has been (1) separated from at least some of the components with which it was associated when initially produced (whether in nature and/or in an experimental setting), and/or (2) designed, produced, prepared, and/or manufactured by the hand of man. Isolated substances and/or entities may be separated from 10%, 20%, 30%, 40%, 50%, 60%, 70%, 80%, 90%, 91%, 92%, 93%, 94%, 95%, 96%, 97%, 98%, 99%, or more than 99% of the other components with which they were initially associated. In some embodiments, isolated agents are 80%, 85%, 90%, 91%, 92%, 93%, 94%, 95%, 96%, 97%, 98%, 99%, or more than 99% pure. As used herein, a substance is “pure” if it is substantially free of other components. In some embodiments, as will be understood by those skilled in the art, a substance may still be considered “isolated” or even “pure”, after having been combined with certain other components such as, for example, one or more carriers or excipients (e.g., buffer, solvent, water, etc.); in such embodiments, percent isolation or purity of the substance is calculated without including such carriers or excipients. To give but one example, in some embodiments, a biological polymer such as a polypeptide or polynucleotide that occurs in nature is considered to be “isolated” when, a) by virtue of its origin or source of derivation is not associated with some or all of the components that accompany it in its native state in nature; b) it is substantially free of other polypeptides or nucleic acids of the same species from the species that produces it in nature; c) is expressed by or is otherwise in association with components from a cell or other expression system that is not of the species that produces it in nature. Thus, for instance, in some embodiments, a polypeptide that is chemically synthesized or is synthesized in a cellular system different from that which produces it in nature is considered to be an “isolated” polypeptide. Alternatively or additionally, in some embodiments, a polypeptide that has been subjected to one or more purification techniques may be considered to be an “isolated” polypeptide to the extent that it has been separated from other components a) with which it is associated in nature; and/or b) with which it was associated when initially produced.

[0079] Nucleotide: As used herein, the term “nucleotide” refers to a structural component, or building block, of polynucleotides, e.g., of DNA and/or RNA polymers. A nucleotide includes of a base (e.g., adenine, thymine, uracil, guanine, or cytosine) and a molecule of sugar and at least one phosphate group. As used herein, a nucleotide can be a methylated nucleotide or an un-methylated nucleotide. Those of skill in the art will appreciate that nucleic acid terminology, such as, as examples, “locus” or “nucleotide” can refer to both a locus or nucleotide of a single nucleic acid molecule and/or to the cumulative population of loci or nucleotides within a plurality of nucleic acids (e.g., a plurality of nucleic acids in a sample and/or representative of a subject) that are representative of the locus or nucleotide (e.g., having the same identical nucleic acid sequence and/or nucleic acid sequence context, or having a substantially identical nucleic acid sequence and/or nucleic acid context). Those of skill in the art will appreciate that terms relating to nucleotides, nucleobases, and nucleosides are related and in some instances are used interchangeably to refer to components of nucleic acids as appropriate in a provided context. For the avoidance of doubt, the term nucleic acid as used herein can refer to one or both of a DNA molecule (e.g., a single-stranded or double-stranded DNA molecule, such as genomic DNA) and an RNA molecule (e.g., a single-stranded or double-stranded RNA molecule) such as an mRNA transcript.

[0080] Operably linked: As used herein, “operably linked” or “operatively linked” refers to the association of at least a first element and a second element such that the component elements are in a relationship permitting them to function in their intended manner. For example, a nucleic acid regulatory sequence is “operably linked” to a nucleic acid coding sequence if the regulatory sequence and coding sequence are associated in a manner that permits control of expression of the coding sequence by the regulatory sequence. In some embodiments, an “operably linked” regulatory sequence is directly or indirectly covalently associated with a coding sequence (e.g., in a single nucleic acid). In some embodiments, a regulatory sequence controls expression of a coding sequence in trans and inclusion of the regulatory sequence in the same nucleic acid as the coding sequence is not a requirement of operable linkage.

[0081] Pharmaceutically acceptable: As used herein, the term “pharmaceutically acceptable,” as applied to one or more, or all, component(s) for formulation of a composition as disclosed herein, means that each component must be compatible with the other ingredients of the composition and not deleterious to the recipient thereof.

[0082] Pharmaceutically acceptable carrier: As used herein, the term “pharmaceutically acceptable carrier” refers to a pharmaceutically-acceptable material, composition, or vehicle, such as a liquid or solid filler, diluent, excipient, or solvent encapsulating material, that facilitates formulation of an agent (e.g., a pharmaceutical agent), modifies bioavailability of an agent, or facilitates transport of an agent from one organ or portion of a subject to another. Some examples of materials which can serve as pharmaceutically-acceptable carriers include: sugars, such as lactose, glucose and sucrose; starches, such as corn starch and potato starch; cellulose, and its derivatives, such as sodium carboxymethyl cellulose, ethyl cellulose and cellulose acetate; powdered tragacanth; malt; gelatin; talc; excipients, such as cocoa butter and suppository waxes; oils, such as peanut oil, cottonseed oil, safflower oil, sesame oil, olive oil, corn oil and soybean oil; glycols, such as propylene glycol; polyols, such as glycerin, sorbitol, mannitol and polyethylene glycol; esters, such as ethyl oleate and ethyl laurate; agar; buffering agents, such as magnesium hydroxide and aluminum hydroxide; alginic acid; pyrogen-free water; isotonic saline; Ringer's solution; ethyl alcohol; pH buffered solutions; polyesters, polycarbonates and/or polyanhydrides; and other non-toxic compatible substances employed in pharmaceutical formulations.

[0083] Pharmaceutical composition: As used herein, the term “pharmaceutical composition” refers to a composition in which an active agent is formulated together with one or more pharmaceutically acceptable carriers.

[0084] Polypeptide: As used herein, “polypeptide” refers to any polymeric chain of amino acids. In some embodiments, a polypeptide has an amino acid sequence that occurs in nature. In some embodiments, a polypeptide has an amino acid sequence that does not occur in nature. In some embodiments, a polypeptide has an amino acid sequence that is engineered in that it is designed and/or produced through action of the hand of man. In some embodiments, a polypeptide may be or include of natural amino acids, non-natural amino acids, or both. In some embodiments, a polypeptide may be or include only natural amino acids or only non-natural amino acids. In some embodiments, a polypeptide can include D-amino acids, L-amino acids, or both. In some embodiments, a polypeptide may include only L-amino acids. In some embodiments, a polypeptide may include one or more pendant groups or other modifications, e.g., one or more amino acid side chains, e.g., at the polypeptide's N-terminus, at the polypeptide's C-terminus, at non-terminal amino acids, or at any combination thereof. In some embodiments, such pendant groups or modifications may be selected from acetylation, amidation, lipidation, methylation, phosphorylation, glycosylation, glycation, sulfation, mannosylation, nitrosylation, acylation, palmitoylation, prenylation, pegylation, etc., including combinations thereof. In some embodiments, a polypeptide may be cyclic, and/or may include a cyclic portion.

[0085] In some embodiments, the term “polypeptide” may be appended to a name of a reference polypeptide, activity, or structure to indicate a class of polypeptides that share a relevant activity or structure. For such classes, the present specification provides and/or those skilled in the art will be aware of exemplary polypeptides within the class whose amino acid sequences and/or functions are known. In some embodiments, a member of a polypeptide class or family shows significant sequence homology or identity with, shares a common sequence motif (e.g., a characteristic sequence element) with, and/or shares a common activity (in some embodiments at a comparable level or within a designated range) with a reference polypeptide of the class. For example, in some embodiments, a member polypeptide shows an overall degree of sequence homology or identity with a reference polypeptide that is at least about 30-40%, and is often greater than about 50%, 60%, 70%, 80%, 90%, 91%, 92%, 93%, 94%, 95%, 96%, 97%, 98%, 99% or more and/or includes at least one region (e.g., a conserved region that can in some embodiments be or include a characteristic sequence element) that shows very high sequence identity, often greater than 90% or even 95%, 96%, 97%, 98%, or 99%. Such a conserved region usually encompasses at least 3-4 and in some instances up to 20 or more amino acids; in some embodiments, a conserved region encompasses at least one stretch of at least 2, 3, 4, 5, 6, 7, 8, 9, 10, 11, 12, 13, 14, 15 or more contiguous amino acids. In some embodiments, a relevant polypeptide can be or include a fragment of a parent polypeptide. In some embodiments, a useful polypeptide may be or include a plurality of fragments, each of which is found in the same parent polypeptide in a different spatial arrangement relative to one another than is found in the polypeptide of interest (e.g., fragments that are directly linked in the parent may be spatially separated in the polypeptide of interest or vice versa, and/or fragments may be present in a different order in the polypeptide of interest than in the parent), so that the polypeptide of interest is a derivative of its parent polypeptide.

[0086] For the avoidance of doubt, where a polypeptide (or a nucleic acid sequence encoding a polypeptide) is referred to by a particular name, which particular name is in some instances associated with one or more particular reference sequences, those of skill in the art will appreciate that the particular name can include and be used to refer to both the particular reference sequences and to variants thereof (e.g., variants having at least 80%, 8%, 90%, 91%, 92%, 93%, 94%, 95%, 96%, 97%, 98%, 99%, 99.5%, or 99.9% identity to one or more of the reference sequences).

[0087] Promoter: As used herein, a “promoter” or “promoter sequence” can be a DNA regulatory region that directly or indirectly (e.g., through promoter-bound proteins or substances) participates in initiation and/or processivity of transcription of a coding sequence. A promoter may, under suitable conditions, initiate transcription of a coding sequence upon binding of one or more transcription factors and/or regulatory moieties with the promoter. A promoter that participates in initiation of transcription of a coding sequence can be “operably linked” to the coding sequence. In certain instances, a promoter can be or include a DNA regulatory region that extends from a transcription initiation site (at its 3′ terminus) to an upstream (5′ direction) position such that the sequence so designated includes one or both of a minimum number of bases or elements necessary to initiate a transcription event. A promoter may be, include, or be operably associated with or operably linked to, expression control sequences such as enhancer and repressor sequences. In some embodiments, a promoter may be inducible. In some embodiments, a promoter may be a constitutive promoter. In some embodiments, a conditional (e.g., inducible) promoter may be unidirectional or bi-directional. A promoter may be or include a sequence identical to a sequence known to occur in the genome of particular species. In some embodiments, a promoter can be or include a hybrid promoter, in which a sequence containing a transcriptional regulatory region can be obtained from one source and a sequence containing a transcription initiation region can be obtained from a second source. Systems for linking control elements to coding sequence within a transgene are well known in the art (general molecular biological and recombinant DNA techniques are described in Sambrook, Fritsch, and Maniatis, Molecular Cloning: A Laboratory Manual, Second Edition, Cold Spring Harbor Laboratory Press, Cold Spring Harbor, NY, 1989).

[0088] Reference: As used herein, “reference” refers to a standard or control relative to which a comparison is performed. For example, in some embodiments, an agent, sample, sequence, subject, animal, or individual, or population thereof, or a measure or characteristic representative thereof, is compared with a reference, an agent, sample, sequence, subject, animal, or individual, or population thereof, or a measure or characteristic representative thereof. In some embodiments, a reference is a measured value. In some embodiments, a reference is an established standard or expected value. In some embodiments, a reference is a historical reference. A reference can be quantitative of qualitative. Typically, as would be understood by those of skill in the art, a reference and the value to which it is compared represents measure under comparable conditions. Those of skill in the art will appreciate when sufficient similarities are present to justify reliance on and/or comparison. In some embodiments, an appropriate reference may be an agent, sample, sequence, subject, animal, or individual, or population thereof, under conditions those of skill in the art will recognize as comparable, e.g., for the purpose of assessing one or more particular variables (e.g., presence or absence of an agent or condition), or a measure or characteristic representative thereof.

[0089] Regulatory sequence: As used herein in the context of expression of a nucleic acid coding sequence, a regulatory sequence is a nucleic acid sequence that controls expression of a coding sequence. In some embodiments, a regulatory sequence can control or impact one or more aspects of gene expression (e.g., cell-type-specific expression, inducible expression, etc.).

[0090] Subject: As used herein, the term “subject” refers to an organism, typically a mammal (e.g., a human, rat, or mouse). In some embodiments, a subject is suffering from a disease, disorder or condition. In some embodiments, a subject is susceptible to a disease, disorder, or condition. In some embodiments, a subject displays one or more symptoms or characteristics of a disease, disorder or condition. In some embodiments, a subject is not suffering from a disease, disorder or condition. In some embodiments, a subject does not display any symptom or characteristic of a disease, disorder, or condition. In some embodiments, a subject has one or more features characteristic of susceptibility to or risk of a disease, disorder, or condition. In some embodiments, a subject is a subject that has been tested for a disease, disorder, or condition, and/or to whom therapy has been administered. In some instances, a human subject can be interchangeably referred to as a “patient” or “individual.”

[0091] Therapeutic agent: As used herein, the term “therapeutic agent” refers to any agent that elicits a desired pharmacological effect when administered to a subject. In some embodiments, an agent is considered to be a therapeutic agent if it demonstrates a statistically significant effect across an appropriate population. In some embodiments, the appropriate population can be a population of model organisms or a human population. In some embodiments, an appropriate population can be defined by various criteria, such as a certain age group, gender, genetic background, preexisting clinical conditions, etc. In some embodiments, a therapeutic agent is a substance that can be used for treatment of a disease, disorder, or condition. In some embodiments, a therapeutic agent is an agent that has been or is required to be approved by a government agency before it can be marketed for administration to humans. In some embodiments, a therapeutic agent is an agent for which a medical prescription is required for administration to humans.

[0092] Therapeutically effective amount: As used herein, “therapeutically effective amount” refers to an amount that produces the desired effect for which it is administered. In some embodiments, the term refers to an amount that is sufficient, when administered to a population suffering from or susceptible to a disease, disorder, and/or condition in accordance with a therapeutic dosing regimen, to treat the disease, disorder, and/or condition. In some embodiments, a therapeutically effective amount is one that reduces the incidence and/or severity of, and/or delays onset of, one or more symptoms of the disease, disorder, and/or condition. Those of ordinary skill in the art will appreciate that the term “therapeutically effective amount” does not in fact require successful treatment be achieved in a particular individual. Rather, a therapeutically effective amount may be that amount that provides a particular desired pharmacological response in a significant number of subjects when administered to patients in need of such treatment. In some embodiments, reference to a therapeutically effective amount may be a reference to an amount as measured in one or more specific tissues (e.g., a tissue affected by the disease, disorder or condition) or fluids (e.g., blood, saliva, serum, sweat, tears, urine, etc.). Those of ordinary skill in the art will appreciate that, in some embodiments, a therapeutically effective amount of a particular agent or therapy may be formulated and/or administered in a single dose. In some embodiments, a therapeutically effective agent may be formulated and/or administered in a plurality of doses, for example, as part of a dosing regimen.

[0093] Treatment: As used herein, the term “treatment” (also “treat” or “treating”) refers to administration of a therapy that partially or completely alleviates, ameliorates, relieves, inhibits, delays onset of, reduces severity of, and/or reduces incidence of one or more symptoms, features, and/or causes of a particular disease, disorder, or condition, or is administered for the purpose of achieving any such result. In some embodiments, such treatment can be of a subject who does not exhibit signs of the relevant disease, disorder, or condition and/or of a subject who exhibits only early signs of the disease, disorder, or condition. Alternatively or additionally, such treatment can be of a subject who exhibits one or more established signs of the relevant disease, disorder and/or condition. In some embodiments, treatment can be of a subject who has been diagnosed as suffering from the relevant disease, disorder, and/or condition. In some embodiments, treatment can be of a subject known to have one or more susceptibility factors that are statistically correlated with increased risk of development of the relevant disease, disorder, or condition. A “prophylactic treatment” includes a treatment administered to a subject who does not display signs or symptoms of a condition to be treated or displays only early signs or symptoms of the condition to be treated such that treatment is administered for the purpose of diminishing, preventing, or decreasing the risk of developing the condition. Thus, a prophylactic treatment functions as a preventative treatment against a condition. A “therapeutic treatment” includes a treatment administered to a subject who displays symptoms or signs of a condition and is administered to the subject for the purpose of reducing the severity or progression of the condition.

[0094] Unit dose: As used herein, the term “unit dose” refers to an amount administered as a single dose and/or in a physically discrete unit of a pharmaceutical composition. In many embodiments, a unit dose contains a predetermined quantity of an active agent, for instance a predetermined viral titer (the number of viruses, virions, or viral particles in a given volume). In some embodiments, a unit dose contains an entire single dose of the agent. In some embodiments, more than one unit dose is administered to achieve a total single dose. In some embodiments, administration of multiple unit doses is required, or expected to be required, in order to achieve an intended effect. A unit dose can be, for example, a volume of liquid (e.g., an acceptable carrier) containing a predetermined quantity of one or more therapeutic moieties, a predetermined amount of one or more therapeutic moieties in solid form, a sustained release formulation or drug delivery device containing a predetermined amount of one or more therapeutic moieties, etc. It will be appreciated that a unit dose can be present in a formulation that includes any of a variety of components in addition to the therapeutic moiety(s). For example, acceptable carriers (e.g., pharmaceutically acceptable carriers), diluents, stabilizers, buffers, preservatives, etc., can be included. It will be appreciated by those skilled in the art, in many embodiments, a total appropriate daily dosage of a particular therapeutic agent can include a portion, or a plurality, of unit doses, and can be decided, for example, by a medical practitioner within the scope of sound medical judgment. In some embodiments, the specific effective dose level for any particular subject or organism can depend upon a variety of factors including the disorder being treated and the severity of the disorder; activity of specific active compound employed; specific composition employed; age, body weight, general health, sex, and diet of the subject; time of administration, and rate of excretion of the specific active compound employed; duration of the treatment; drugs and/or additional therapies used in combination or coincidental with specific compound(s) employed, and like factors well known in the medical arts.

[0095] Variant: As used herein, the term “variant” refers to an entity that shows significant structural identity with a reference entity but differs structurally from the reference entity in the presence, absence, or level of one or more chemical moieties as compared with the reference entity. In some embodiments, a variant also differs functionally from its reference entity. In various embodiments, a variant can be referred to as a “modified” form of a reference entity. In general, whether a particular entity is properly considered to be a “variant” of a reference entity is based on its degree of structural identity with the reference entity. A variant can be a molecule comparable, but not identical to, a reference. For example, a variant nucleic acid can differ from a reference nucleic acid at one or more differences in nucleotide sequence. In some embodiments, a variant nucleic acid shows an overall sequence identity with a reference nucleic acid that is at least 85%, 86%, 87%, 88%, 89%, 90%, 91%, 92%, 93%, 94%, 95%, 96%, 97%, or 99%. In many embodiments, a nucleic acid of interest is considered to be a “variant” of a reference nucleic acid if the nucleic acid of interest has a sequence that is identical to that of the reference but for a small number of sequence alterations at particular positions. In some embodiments, a variant has 10, 9, 8, 7, 6, 5, 4, 3, 2, or 1 substituted residue(s) as compared with a reference. In some embodiments, a variant has not more than 5, 4, 3, 2, or 1 residue additions, substitutions, or deletions as compared with the reference. In various embodiments, the number of additions, substitutions, or deletions is fewer than about 25, about 20, about 19, about 18, about 17, about 16, about 15, about 14, about 13, about 10, about 9, about 8, about 7, about 6, and commonly are fewer than about 5, about 4, about 3, or about 2 residues.

### DETAILED DESCRIPTION

[0096] The present disclosure includes, among other things, the identification of MGMT polypeptide sequences that are resistant to MGMT inhibitors, and further includes the recognition that in vivo, in vitro, and or ex vivo modification of endogenous O(6)-methylguanine-DNA-methyltransferase (MGMT) nucleic acids is useful in gene therapy. MGMT functions, at least in part, as a DNA repair enzyme that protects cells from alkylating agents. However, the protective functions of wild type MGMT are antagonized by MGMT inhibitors (e.g., O⁶-benzylguanine (O⁶BG), Lomeguatrib [6-(4-bromo-2-thienyl) methoxy] purin-2-amine], and others provided herein), rendering cells vulnerable to elimination by alkylating agents. The present disclosure includes in vivo, in vitro, and or ex vivo modification of MGMT-encoding nucleic acids to encode MGMT that is resistant to MGMT inhibitors (“inhibitor-resistant MGMT” or “inhibitor-resistant MGMT polypeptide”). In various embodiments, cells that encode and/or express inhibitor-resistant MGMT (“MGMT-modified cells” or “modified cells”) are less likely to be eliminated by a selection regimen that includes one or more MGMT inhibitors and optionally one or more alkylating agents. In various embodiments, elimination of cells refers to causing the death, cessation of growth, cessation of proliferation, and/or cessation of one or more biological functions of a cell, e.g., as understood by those of skill in the art to result from contact of a cell with a particular agent or regimen such as a selection regimen including one or more MGMT inhibitors and optionally one or more alkylating agents. Accordingly, administration of a selection regimen including one or more MGMT inhibitors and optionally one or more alkylating agents can positively select modified cells (e.g., MGMT-modified cells). This approach can be used in gene therapy, e.g., to increase the prevalence of in vivo, in vitro, and or ex vivo modified cells in a gene therapy subject. In various embodiments, in vivo, in vitro, and or ex vivo modification of MGMT is correlated with a further modification, e.g., a therapeutic modification, such that selection of modified cells increases the prevalence of cells including a therapeutic modification. In various embodiments, cells that are modified and/or targeted for modification are therapeutic cells. As disclosed herein, therapeutic cells can include any cells that express MGMT and/or are therapeutic at least in that they cause, elicit, or contribute to a desired pharmacological and/or physiological effect. In various embodiments, therapeutic cells are HSCs of a subject.

[0097] The present disclosure includes the recognition that various advantages are associated with in vivo, in vitro, and or ex vivo modification of endogenous MGMT-encoding nucleic acids. For example, expression of inhibitor-resistant MGMT from in vivo, in vitro, and or ex vivo modified endogenous MGMT-encoding nucleic acids can be tuned to endogenous expression levels (e.g., in that the level of expression of inhibitor-resistant MGMT polypeptides in modified cells is at most about the level of expression of endogenous MGMT in reference cells). Without wishing to be bound by any particular scientific theory, this is at least in part because expression of inhibitor-resistant MGMT from in vivo, in vitro, and or ex vivo modified endogenous MGMT-encoding nucleic acids is controlled by endogenous regulatory sequences. By contrast, transduction of cells to express a transgenic MGMT selectable marker can result in the insertion of multiple copies of the transgene, and/or can include a heterologous regulatory sequence (e.g., a heterologous promoter that causes expression of the selectable marker at a higher level than endogenous MGMT in target and/or reference cells), and this excessive expression of MGMT, including inhibitor-resistant MGMT variants, can be deleterious and has been observed to result in a growth defect. Without wishing to be bound by any particular scientific theory, deleterious effects of inhibitor-resistant MGMT overexpression may result from increased affinity for DNA as compared to reference MGMT and/or non-specific binding of chromatin. Moreover, unlike systems in which a heterologous transgene encoding inhibitor-resistant MGMT is inserted into a host cell genome, in vivo, in vitro, and or ex vivo modification of endogenous MGMT-encoding nucleic acids does not require potentially harmful insertion of an MGMT transgene. Modification of endogenous MGMT-encoding nucleic acids to generate a selectable marker, and particularly application of such an approach in vivo to generate a selectable marker in cells of a subject, runs contrary to decades of standard laboratory practices establishing heterologous transgenes as the default for introduction of a neo-functional selectable marker (i.e., a selectable marker that provides to cells a functional polypeptide that confers upon cells a biological or detectable activity or characteristic that enables selection, such as inhibitor resistance).

[0098] In particular embodiments, cells modified to encode an inhibitor-resistant MGMT are also genetically modified for an additional therapeutic purpose. In various embodiments, genetic modification for an additional therapeutic purpose can include delivery of a nucleic acid encoding a transgene and/or editing of an endogenous target nucleic acid, either of both of which can provide a therapeutic nucleic acid to a target cell. The genetic modification for the additional therapeutic purpose can provide a therapeutic nucleic acid that encodes a protein, e.g., to treat a disease, disorder, or condition. In certain embodiments, genetic modification for the additional therapeutic purpose can provide a therapeutic nucleic acid that encodes a chimeric antigen receptor (CAR), engineered T-cell receptor (TCR), checkpoint inhibitor, or therapeutic antibody. In certain embodiments, genetic modification for the additional therapeutic purpose can provide (e.g. deliver an editing system that causes) a modification of an endogenous sequence that increases expression of an endogenous globin gene.

[0099] The present disclosure further includes the recognition that methods and compositions disclosed herein allow for selection of modified cells in vivo, in vitro, and or ex vivo using pharmaceutically acceptable and/or low dosages of MGMT inhibitor, and/or pharmaceutically acceptable and/or low dosages of alkylating agent. Methods and compositions disclosed herein can increase the number of modified cells and/or prevalence or ratio of modified cells as compared to non-modified cells relative to a reference, e.g., within a particular subject, tissue, and/or cell population (e.g., a population of cells of a particular cell type, such as HSCs). In various embodiments, increasing the number of modified cells and/or prevalence or ratio of modified cells as compared to non-modified cells relative to a reference can improve efficacy of gene therapy (e.g., improve the treatment of a disease, disorder, or condition) as compared to a reference. In various embodiments, a reference is a subject, cell, or system, or population receiving the same or similar therapy except in that the reference is not administered a selection regimen. In various embodiments, a reference is the same subject, cell, or system prior to administration of a selection regimen. The present disclosure includes the recognition that, using methods and compositions provided herein, a gene therapy that initially (e.g., within 1 day, 2 days, 3 days, 4 days, 5 days, 6 days, 1 week, 2 weeks, 4 weeks, 8 weeks, or 16 weeks of administration and/or prior to administration of a selection regimen) modifies (e.g., delivers a therapeutic payload to, expresses a therapeutic payload in, and/or integrates a therapeutic payload into genomes of) a small number of cells (e.g., a number or percentage of cells insufficient to treat, substantially treat, clinically improve, substantially clinically improve, cure, and/or substantially cure a disease, disorder, or condition) can result in therapeutic efficacy and/or modification of a clinically significant number of cells (e.g., at least 1%, 2%, 3%, 4%, 5%, 10%, 15%, 20%, 25%, 30%, 40%, 50%, 60%, 70%, 80%, 90%, 91%, 92%, 93%, 94%, 95%, 96%, 97%, 98%, 99%, or 100% of target cells and/or cells of a particular subject, tissue, and/or cell population (e.g., a population of cells of a particular cell type, such as HSCs)). In various embodiments, modified cells are self-renewing, multilineage, and/or long-term repopulating cells such as HSCs. In various embodiments, modified cells express a therapeutic payload (e.g., heterologous gene encoding a polypeptide of interest) at a therapeutically effective level.

[0100] The present disclosure includes the recognition that selective protection of cells from selection regimens of the present disclosure can be accomplished by editing of MGMT-encoding nucleic acids, including without limitation endogenous MGMT genes encoded by cell genomes and/or endogenously expressed messenger ribonucleic acid (mRNA) molecules that encode MGMT. In various embodiments, a cell includes two endogenous copies of an MGMT gene and one or both MGMT genes are edited. In various embodiments, a cell includes one or a plurality of MGMT-encoding mRNA molecules expressed from a genomic MGMT gene and one or more of the MGMT-encoding mRNA molecules are edited. The present disclosure includes the recognition that editing of mRNA is more transient and/or reversible as compared to editing of genomic DNA. Transient modification can minimize any disruption of endogenous processes and/or fitness (e.g., where expression of an MGMT variant is associated with a fitness or competitive cost, e.g., in the absence of a selecting agent, as compared to reference cells).

### MGMT

[0101] MGMT is a DNA repair enzyme that can repair damaged guanine nucleotides by transferring the methyl at the 06 site of guanine to its cysteine residues, which can counteract the genotoxicity of alkylating agents. A reference MGMT polypeptide can have a sequence according to SEQ ID NO: 1 (below; see also GenBank Accession No. NP_002403.3). In various embodiments, an MGMT polypeptide of the present disclosure can have at least 80% sequence identity with SEQ ID NO: 1 (e.g., 80%, 85%, 90%, 91%, 92%, 93%, 94%, 95%, 96%, 97%, 98%, 99%, or 100% sequence identity with SEQ ID NO: 1). MGMT according to SEQ ID NO: 1 can be referred to as “canonical” or “wild type” MGMT. In various embodiments, numbering of amino acids of an MGMT polypeptide (e.g., wild type MGMT or variant of MGMT that is an inhibitor-resistant MGMT) can be based on numbering that corresponds to SEQ ID NO: 1. A portion of SEQ ID NO: 1 spanning from amino acid 139 to amino acid 207 (SEQ ID NO: 2) is enriched for amino acids that interact with MGMT inhibitors. In various embodiments, an MGMT polypeptide includes a fragment corresponding to SEQ ID NO: 2, where the fragment corresponding to SEQ ID NO: 2 has at least 80% sequence identity with SEQ ID NO: 2 (e.g., 80%, 85%, 90%, 91%, 92%, 93%, 94%, 95%, 96%, 97%, 98%, 99%, or 100% sequence identity with SEQ ID NO: 2), optionally wherein the remainder of the MGMT-encoding sequence has at least 80% sequence identity with SEQ ID NO: 1 (e.g., 80%, 85%, 90%, 91%, 92%, 93%, 94%, 95%, 96%, 97%, 98%, 99%, or 100% sequence identity with SEQ ID NO: 1).

(Wild Type MGMT)
SEQ ID NO: 1
MDKDCEMKRTTLDSPLGKLELSGCEQGLHEIKLLGKGTSAADAVE
VPAPAAVLGGPEPLMQCTAWLNAYFHQPEAIEEFPVPALHHPVFQ
QESFTRQVLWKLLKVVKFGEVISYQQLAALAGNPKAARAVGGAMR
GNPVPILIPCHRVVCSSGAVGNYSGGLAVKEWLLAHEGHRLGKPG
LGGSSGLAGAWLKGAGATSGSPPAGRN
(MGMT Fragment Enriched for Inhibitor Interaction)
SEQ ID NO: 2
VPILIPCHRVVCSSGAVGNYSGGLAVKEWLLAHEGHRLGKPGLGG
SSGLAGAWLKGAGATSGSPPAGRN

[0102] As those of skill in the art will appreciate, genes of the human genome that encode polypeptides can include one or more exons and one or more introns. Accordingly, genomic nucleotide sequences that encode and/or express polypeptides can include a larger number of nucleotides than would be minimally required to encode the sequence of the polypeptide. In various embodiments, wild type MGMT can be encoded by a nucleic acid sequence according to GenBank Accession No. NG_052673 (e.g., version NG_052673.1 of Accession No. NG_052673). As indicated in the GenBank Accession, exons include positions 74070-74194, 245712-245860, 297019-297158, and 304605-304814.

[0103] The combined MGMT coding sequences of NG_052673 can be presented as a single contiguous sequence encoding MGMT, as shown in SEQ ID NO: 3. In various embodiments, an MGMT coding sequence has at least 80% sequence identity with SEQ ID NO: 3 (e.g., 80%, 85%, 90%, 91%, 92%, 93%, 94%, 95%, 96%, 97%, 98%, 99%, or 100% sequence identity with SEQ ID NO: 3). The portion of SEQ ID NO: 3 that encodes SEQ ID NO: 2, and therefore corresponds to a portion of MGMT that is enriched for amino acids that interact with MGMT inhibitors, is provided in SEQ ID NO: 4. In various embodiments, an MGMT coding sequence includes a fragment that corresponds to SEQ ID NO: 4, where the fragment corresponding to SEQ ID NO: 4 has at least 80% sequence identity with SEQ ID NO: 4 (e.g., 80%, 85%, 90%, 91%, 92%, 93%, 94%, 95%, 96%, 97%, 98%, 99%, or 100% sequence identity with SEQ ID NO: 4), optionally wherein the remainder of the MGMT-encoding sequence has at least 80% sequence identity with SEQ ID NO: 3 (e.g., 80%, 85%, 90%, 91%, 92%, 93%, 94%, 95%, 96%, 97%, 98%, 99%, or 100% sequence identity with SEQ ID NO: 3). The genomic context of SEQ ID NO: 4, as found in NG_052673, is shown as SEQ ID NO: 5, the selected boundaries of which, as defined by the first and last included nucleotides, are not significant.

(wild type MGMT coding sequence)
SEQ ID NO: 3
atggacaaggattgtgaaatgaaacgcaccacactggacagccct
ttggggaagctggagctgtctggttgtgagcagggtctgcacgaa
ataaagctcctgggcaaggggacgtctgcagctgatgccgtggag
gtcccagcccccgctgcggttctcggaggtccggagcccctgatg
cagtgcacagcctggctgaatgcctatttccaccagcccgaggct
atcgaagagttccccgtgccggctcttcaccatcccgttttccag
caagagtcgttcaccagacaggtgttatggaagctgctgaaggtt
gtgaaattcggagaagtgatttcttaccagcaattagcagccctg
gcaggcaaccccaaagccgcgcgagcagtgggaggagcaatgaga
ggcaatcctgtccccatcctcatcccgtgccacagagtggtctgc
agcagcggagccgtgggcaactactccggaggactggccgtgaag
gaatggcttctggcccatgaaggccaccggttggggaagccaggc
ttgggagggagctcaggtctggcaggggcctggctcaagggagcg
ggagctacctcgggctccccgcctgctggccgaaactga
(Portion of SEQ ID NO: 3 that Encodes
SEQ ID NO: 2)
SEQ ID NO: 4
gtccccatcctcatcccgtgccacagagtggtctgcagcagcgga
gccgtgggcaactactccggaggactggccgtgaaggaatggctt
ctggcccatgaaggccaccggttggggaagccaggcttgggaggg
agctcaggtctggcaggggcctggctcaagggagcgggagctacc
tcgggctccccgcctgctggccgaaactga
(Positions 304081-305220 of NG 052673)
SEQ ID NO: 5
agtaaagcttcatttgcaaaagcaggtggtgggctgcgtgcgccc
acagccacagttggccggccatgggctggagaggcccgtgcaggt
acggtcttctctgatgcgtcctgtgatgcctgcgtggtacctggg
gagtgtttgagagcgtcacataccaccagaactcggaaacgtagt
tttcagttttgtaagcgaacgttgtatattactcaccggatgaaa
ttaagttttctcctcccaaatcgtgggcctaaagcaattctctga
ggatgccccacgtcacctcaggacactcgtccctcccccaacccg
tgctgagacccccagggactcaagggcctcaggggaggggaagtc
catgctgagacatagctgacacccacccatgccaacagcctgccc
ctggcacaggcccctgcttggtgggcacaggactcctgtcagtca
gggccttggccttgaccccaaagacctcgttgtccagatccctga
ctgacagtggctgcccccctgtcttccaggtccccatcctcatcc
cgtgccacagagtggtctgcagcagcggagccgtgggcaactact
ccggaggactggccgtgaaggaatggcttctggcccatgaaggcc
accggttggggaagccaggcttgggagggagctcaggtctggcag
gggcctggctcaagggagcgggagctacctcgggctccccgcctg
ctggccgaaactgagtatgtgcagtaggatggatgtttgagcgac
acacacgtgtaacactgcatcggatgcggggcgtggaggcaccgc
tgtattaaaggaagtggcagtgtcctgggaacaagcgtgtctgcc
ctttctgtttccatattttacagcaggatgagttcagacgcccgc
ggtcctgcacacatttgtttccttctctaacgctgcccttgctct
atttttcatgtccattaaaacaggccaagtgagtgtggaaggcct
ggctcatgttgggccacagcccaggatggggcagtctggcaccct
caggccacagacggctgccatagccgctgtccagggccagctaag
gcccatcccaggccgtccacactagaaagctggccctgccccatc
cccaccatgcctccc

[0104] Those of skill in the art will be familiar with the processes by which polypeptides encoded by genomic DNA are produced. Genomic sequences are transcribed to produce messenger ribonucleic acid molecules (mRNA) in which the coding sequence of a polypeptide is found as a single contiguous sequence. The process of transcription includes replacement of thymine nucleotides with uracil nucleotides.

[0105] The present disclosure includes an MGMT mRNA sequence according to SEQ ID NO: 6. SEQ ID NO: 7 is the portion of SEQ ID NO: 6 that encodes SEQ ID NO: 2. In various embodiments, an MGMT mRNA sequence has at least 80% sequence identity with SEQ ID NO: 6 (e.g., 80%, 85%, 90%, 91%, 92%, 93%, 94%, 95%, 96%, 97%, 98%, 99%, or 100% sequence identity with SEQ ID NO: 6). The portion of SEQ ID NO: 6 that encodes SEQ ID NO: 2, and therefore corresponds to a portion of MGMT that is enriched for amino acids that interact with MGMT inhibitors, is provided in SEQ ID NO: 7. In various embodiments, an MGMT mRNA sequence includes a fragment that corresponds to SEQ ID NO: 7, where the fragment corresponding to SEQ ID NO: 7 has at least 80% sequence identity with SEQ ID NO: 7 (e.g., 80%, 85%, 90%, 91%, 92%, 93%, 94%, 95%, 96%, 97%, 98%, 99%, or 100% sequence identity with SEQ ID NO: 7), optionally wherein the remainder of the MGMT mRNA sequence has at least 80% sequence identity with SEQ ID NO: 6 (e.g., 80%, 85%, 90%, 91%, 92%, 93%, 94%, 95%, 96%, 97%, 98%, 99%, or 100% sequence identity with SEQ ID NO: 6).

(Wild Type MGMT mRNA)
SEQ ID NO: 6
auggacaaggauugugaaaugaaacgcaccacacuggacagcccu
uuggggaagcuggagcugucugguugugagcagggucugcacgaa
auaaagcuccugggcaaggggacgucugcagcugaugccguggag
gucccagcccccgcugcgguucucggagguccggagccccugaug
cagugcacagccuggcugaaugccuauuuccaccagcccgaggcu
aucgaagaguuccccgugccggcucuucaccaucccguuuuccag
caagagucguucaccagacagguguuauggaagcugcugaagguu
gugaaauucggagaagugauuucuuaccagcaauuagcagcccug
gcaggcaaccccaaagccgcgcgagcagugggaggagcaaugaga
ggcaauccuguccccauccucaucccgugccacagaguggucugc
agcagcggagccgugggcaacuacuccggaggacuggccgugaag
gaauggcuucuggcccaugaaggccaccgguuggggaagccaggc
uugggagggagcucaggucuggcaggggccuggcucaagggagcg
ggagcuaccucgggcuccccgccugcuggccgaaacuga
(Portion of SEQ ID NO: 6 that Encodes
SEQ ID NO: 2)
SEQ ID NO: 7
guccccauccucaucccgugccacagaguggucugcagcagcgga
gccgugggcaacuacuccggaggacuggccgugaaggaauggcuu
cuggcccaugaaggccaccgguuggggaagccaggcuugggaggg
agcucaggucuggcaggggccuggcucaagggagcgggagcuacc
ucgggcuccccgccugcuggccgaaacuga

[0106] Overexpression of MGMT and/or variants thereof (e.g., expression at levels greater than those caused by endogenous regulatory sequences) can be harmful to cells. For example, it has been observed that high levels of MGMT^{P140K} expression can result in a competitive disadvantage and/or proliferation defect (see, e.g., Milsom 2008 Cancer Research, 68 (15), 6171-6180). Overexpression of MGMT^{P140K} was associated with reduced proliferation, engraftment, and therapeutic benefit. By contrast, the present disclosure appreciates that endogenous levels of MGMT are sufficient for protection of cells against clinically and/or therapeutically relevant and/or useful doses of alkylating agents. Moreover, the present disclosure appreciates that an MGMT variant (e.g., an inhibitor-resistant MGMT) expressed at endogenous levels, and in particular expressed at levels controlled and/or capped by endogenous regulatory sequences and/or mechanisms, are sufficient for protection of cells against clinically and/or therapeutically relevant and/or useful doses of selection regimens and agents thereof as disclosed herein.

### Inhibitor-Resistant MGMT

[0107] The present disclosure includes variants of MGMT that are resistant to MGMT inhibitors. The present disclosure includes sequence variants (also referred to herein as mutations) as shown in Table 1 unexpectedly identified as useful for producing inhibitor-resistant MGMT polypeptides, which sequence variants include L33F, L33K, L33P, L33R, L33W, L33Y, M134F, M134V, M134W, M134Y, R135G, R135K, R135L, R135T, N137D, N137F, N137P, P138K, P140E, P140F, P140H, G156I, G156P, G156V, Y158M, Y158W, S159F, S159I, S159L, S159P, S159T, S159W, S159Y, G160D, G160E, G160H, G160K, and G160P.

[0108] In various embodiments, variants of MGMT disclosed herein are retain some or all ability to repair DNA and/or protect cells from alkylating agents. In various embodiments, retention of ability to repair DNA and/or protect cells from alkylating agents refers to activity in the absence of inhibitor that is at least 5% (e.g., 10%, 20%, 30%, 40%, 50%, 100%, or more) of the activity of wild-type MGMT in the absence of the MGMT inhibitor, where activity can be measured by any assay known in the art including an assay as set forth in the present Examples (see, e.g., Example 1). In various embodiments, activity can refer to, e.g., alkyltransferase activity.

[0109] In some embodiments, an MGMT polypeptide that retains some or all ability to repair DNA and/or protect cells from an alkylating agent includes at least one amino acid mutation selected from L33F, L33K, L33P, L33R, L33W, L33Y, M134V, R135G, R135K, R135T, P138K, P140F, P140H, P140I, G156P, G156V, Y158T, S159F, S159I, S159W, S159Y, G160D, G160E, G160H, and G160P. In various embodiments, activity can refer to, e.g., alkyltransferase activity. In some embodiments, an MGMT polypeptide that retains some or all ability to repair DNA and/or protect cells from an alkylating agent includes at least one amino acid mutation selected from L33F, L33K, L33P, L33R, L33W, L33Y, M134F, M134V, R135G, R135K, R135L, R135T, N137D, P138K, P140F, P140H, P140I, G156I, G156P, G156V, Y158M, Y158T, S159F, S159I, S159W, S159Y, G160D, G160E, G160H, and G160P. In various embodiments, activity can refer to, e.g., alkyltransferase activity. In some embodiments, an MGMT polypeptide that retains some or all ability to repair DNA and/or protect cells from an alkylating agent includes at least one amino acid mutation selected from P140Q, P140R, G156A, Y158F, Y158H, G160A, and A170S. In some embodiments, an MGMT polypeptide that retains some or all ability to repair DNA and/or protect cells from an alkylating agent includes the amino acid mutation P140K.

[0110] In various embodiments, inhibitor-resistant MGMT polypeptides of the present disclosure are characterized in that they are resistant to inhibition by one or more MGMT inhibitors but retain some or all ability to repair DNA and/or protect cells from alkylating agents. In various embodiments, resistance to an MGMT inhibitor refers to activity in the presence of the MGMT inhibitor that is at least 10% (e.g., 20%, 30%, 40%, 50%, 100%, or more) greater than the activity of wild-type MGMT in the presence of the MGMT inhibitor, where activity can be measured by any assay known in the art including an assay as set forth in the present Examples (see, e.g., Example 1). In various embodiments, such activity in the presence of an MGMT inhibitor is normalized using the activity of the MGMT polypeptide in the absence of an MGMT inhibitor. In various embodiments, retention of ability to repair DNA and/or protect cells from alkylating agents refers to activity in the absence of inhibitor that is at least 5% (e.g., 10%, 20%, 30%, 40%, 50%, 100%, or more) of the activity of wild-type MGMT in the absence of the MGMT inhibitor, where activity can be measured by any assay known in the art including an assay as set forth in the present Examples (see, e.g., Example 1). In various embodiments, activity can refer to, e.g., alkyltransferase activity.

[0111] In various embodiments, an inhibitor-resistant MGMT polypeptide includes at least one amino acid mutation selected from M134F, R135L, N137D, P140H, P140I, G156I, G156P, G156V, Y158M, S159I, G160H, and G160P. In various embodiments, an inhibitor-resistant MGMT polypeptide includes at least one amino acid mutation selected from M134F, R135L, N137D, P140H, G156I, G156P, G156V, and Y158M. In various embodiments, an inhibitor-resistant MGMT polypeptide includes at least one amino acid mutation selected from P140H, P140I, G156P, G156V, Y158M, S159I, G160H, and G160P. In various embodiments, an inhibitor-resistant MGMT polypeptide includes at least one amino acid mutation selected from P140H, G156P, and G156V. In various embodiments, an inhibitor-resistant MGMT polypeptide includes at least one amino acid mutation selected from G156A, Y158H, and P140R. In various embodiments, an inhibitor-resistant MGMT polypeptide includes at least one amino acid mutation selected from Y158H and P140R. In various embodiments, an inhibitor-resistant MGMT polypeptide includes the amino acid mutation P140K.

[0112] In various embodiments, MGMT polypeptides of the present disclosure are characterized in that they are more sensitive to inhibition by one or more MGMT inhibitors. In various embodiments, sensitivity to an MGMT inhibitor refers to activity in the presence of the MGMT inhibitor that is at least 10% (e.g., 20%, 30%, 40%, 50%, 100%, or more) less than the activity of wild-type MGMT in the presence of the MGMT inhibitor, where activity can be measured by any assay known in the art including an assay as set forth in the present Examples (see, e.g., Example 1). In various embodiments, such activity in the presence of an MGMT inhibitor is normalized using the activity of the MGMT polypeptide in the absence of an MGMT inhibitor. In various embodiments, activity can refer to, e.g., alkyltransferase activity.

[0113] In some embodiments, an MGMT polypeptide that is more sensitive to inhibition by one or more MGMT inhibitors includes at least one amino acid mutation selected from L33F, L33P, L33W, L33Y, R135G, R135K, S159F, S159Y, and G160E. In some embodiments, an MGMT polypeptide that is more sensitive to inhibition by one or more MGMT inhibitors includes at least one amino acid mutation selected from L33F, L33P, L33Y, R135G, R135K, S159F, and S159Y. In some embodiments, an MGMT polypeptide that is more sensitive to inhibition by one or more MGMT inhibitors includes at least one amino acid mutation selected from L33F, R135G, R135K, and S159Y. In some embodiments, an MGMT polypeptide that is more sensitive to inhibition by one or more MGMT inhibitors includes at least one amino acid mutation selected from Y158F, G160A, and A170S. In some embodiments, an MGMT polypeptide that is more sensitive to inhibition by one or more MGMT inhibitors includes the amino acid mutation A170S.

[0114] In various embodiments, an inhibitor-resistant MGMT polypeptide of the present disclosure is characterized in that it can confer a proliferative advantage to HSCs in which it is expressed, following exposure to one or both of an alkylating agent and an MGMT inhibitor such as an O⁶-benzylguanine based inhibitor. In various embodiments, such proliferative advantage refers to comparative or competitive proliferation that is at least 10% (e.g., 20%, 30%, 40%, 50%, 100%, or more) greater than that of wild-type MGMT under same, comparable, and/or competitive conditions. In various embodiments, an inhibitor-resistant MGMT polypeptides of the present disclosure is characterized in that it does not confer a substantial proliferative disadvantage to HSCs in which it is expressed, e.g., in the absence of an MGMT inhibitor such as an O⁶-benzylguanine based inhibitor, and optionally in the presence of or absence of an alkylating agent. In various embodiments, such absence of a substantial proliferative disadvantage refers to comparative or competitive proliferation that is more than 5-fold (e.g., no more than 1.1, 1.2, 1.3, 1.4, 1.5, 1.6, 1.7, 1.8, 1.9, 2, 2.5, 3, 4 or 5-fold) less than that of wild-type MGMT under same, comparable, and/or competitive conditions

[0115] In various embodiments, an inhibitor-resistant MGMT is an MGMT polypeptide that includes at least one amino acid sequence difference as compared to a reference wild type sequence (i.e., includes at least one amino acid mutation) listed in Table 1 and/or Table 2 (e.g., 1, 2, 3, 4, 5, 6, 7, 8, 9, 10 or more amino acid mutations listed in Table 1 and/or Table 2). Amino acid mutations are presented in the format of (wild type amino acid(s)) (wild type amino acid position(s)) (amino acid(s) at corresponding position of mutant). For the avoidance of doubt, the term mutations is understood by those of skill in the art to include a difference as compared to a reference, and does not necessarily refer to, or imply, a change having occurred within any particular sequence of interest. Except as otherwise provided herein, reference to amino acid positions of an MGMT polypeptide refer to positions corresponding to the sequence of SEQ ID NO: 1.

[0116] In various embodiments, an inhibitor-resistant MGMT is an MGMT polypeptide that includes at least one amino acid mutation selected from L33F, L33K, L33P, L33R, L33W, L33Y, M134F, M134V, M134W, M134Y, R135G, R135K, R135L, R135T, N137D, N137F, N137P, P138K, P140E, P140F, P140H, G156I, G156P, G156V, Y158M, Y158W, S159F, S159I, S159L, S159P, S159T, S159W, S159Y, G160D, G160E, G160H, G160K, and G160P.

[0117] In various embodiments, an inhibitor-resistant MGMT is an MGMT polypeptide that includes at least one amino acid mutation selected from L33F, L33K, L33P, L33R, L33W, L33Y, M134F, M134V, M134W, M134Y, R135G, R135K, R135L, R135T, N137D, N137F, N137P, P138K, G156I, G156P, G156V, Y158M, Y158W, S159F, S159I, S159L, S159P, S159T, S159W, S159Y, G160D, G160E, G160H, G160K, and G160P. In various embodiments, an inhibitor-resistant MGMT is an MGMT polypeptide that includes at least one amino acid mutation selected from L33F, L33K, L33P, L33R, L33W, L33Y, M134F, M134V, M134W, M134Y, R135G, R135K, R135L, R135T, N137D, N137F, N137P, P138K, G156I, G156P, G156V, Y158M, Y158W, G160D, G160E, G160H, G160K, and G160P. In various embodiments, an inhibitor-resistant MGMT is an MGMT polypeptide that includes at least one amino acid mutation selected from P140E, P140F, and P140H. In various embodiments, an inhibitor-resistant MGMT is an MGMT polypeptide that includes at least one amino acid mutation selected from S159F, S159I, S159L, S159P, S159T, S159W, and S159Y.

[0118] In various embodiments, an inhibitor-resistant MGMT is an MGMT polypeptide that includes at least one amino acid mutation selected from V139F, P140A, P140G, P140I, P140L, P140M, P140N, P140Q, P140R, P140S, P140T, L142M, C150Y, S152H, A154G, G156A, N157T, Y158F, Y158H, G160A, G160R, G160S, L162P, L162V, K165E, K165N, K165R, A170S, PVP(138-140)CMK, PVP(138-140)CIK, PVP(138-140)HLK, PVP(138-140)KIK, PVP(138-140)KIR, PVP(138-140)KLK, PVP(138-140)KMK, PVP(138-140)KVK, PVP(138-140)KWK, PVP(138-140)KYK, PVP(138-140)KYN, PVP(138-140)KYR, PVP(138-140)MIK, PVP(138-140)MLK, PVP(138-140)MMK, PVP(138-140)MVK, PVP(138-140)MWK, PVP(138-140)MYR, PVP(138-140)NIK, PVP(138-140)NLK, PVP(138-140)NLL, PVP(138-140) PLK, PVP(138-140)PYR, PVP(138-140)QLN, PVP(138-140)RFK, PVP(138-140)RTK, PVP(138-140)RYK, PVP(138-140)SFK, PVP(138-140)SMK, PVP(138-140)TIK, PVP(138-140)TLK, PVP(138-140)TLN, PVP(138-140)TNK, PVP(138-140)RCK, PVP(138-140)SYK, PVP(138-140)VMK, and PVP(138-140)YAK.

[0119] In various embodiments, an inhibitor-resistant MGMT is an MGMT polypeptide that includes the amino acid mutation P140K.

[0120] In various embodiments, an inhibitor-resistant MGMT does not include the amino acid mutation L33F, is not MGMT^{L33F}, and/or does not include the amino acid phenylalanine (F) at position 33. In various embodiments, an inhibitor-resistant MGMT does not include the amino acid mutation L33K, is not MGMT^{L33K}, and/or does not include the amino acid lysine (K) at position 33. In various embodiments, an inhibitor-resistant MGMT does not include the amino acid mutation L33P, is not MGMT^{L33P}, and/or does not include the amino acid proline (P) at position 33. In various embodiments, an inhibitor-resistant MGMT does not include the amino acid mutation L33R, is not MGMT^{L33R}, and/or does not include the amino acid arginine (R) at position 33. In various embodiments, an inhibitor-resistant MGMT does not include the amino acid mutation L33W, is not MGMT^{L33W}, and/or does not include the amino acid tryptophan (W) at position 33. In various embodiments, an inhibitor-resistant MGMT does not include the amino acid mutation L33Y, is not MGMT^{L33Y}, and/or does not include the amino acid tyrosine (Y) at position 33.

[0121] In various embodiments, an inhibitor-resistant MGMT does not include the amino acid mutation M134F, is not MGMT^{M134F}, and/or does not include the amino acid phenylalanine (F) at position 134. In various embodiments, an inhibitor-resistant MGMT does not include the amino acid mutation M134V, is not MGMT^{M134V}, and/or does not include the amino acid valine (V) at position 134. In various embodiments, an inhibitor-resistant MGMT does not include the amino acid mutation M134W, is not MGMT^{M134W}, and/or does not include the amino acid tryptophan (W) at position 134. In various embodiments, an inhibitor-resistant MGMT does not include the amino acid mutation M134Y, is not MGMT^{M134Y}, and/or does not include the amino acid tyrosine (Y) at position 134.

[0122] In various embodiments, an inhibitor-resistant MGMT does not include the amino acid mutation R135G, is not MGMT^{R135G}, and/or does not include the amino acid glycine (G) at position 135. In various embodiments, an inhibitor-resistant MGMT does not include the amino acid mutation R135K, is not MGMT^{R135K}, and/or does not include the amino acid lysine (K) at position 135. In various embodiments, an inhibitor-resistant MGMT does not include the amino acid mutation R135L, is not MGMT^{R135L}, and/or does not include the amino acid leucine (L) at position 135. In various embodiments, an inhibitor-resistant MGMT does not include the amino acid mutation R135T, is not MGMT^{R135T}, and/or does not include the amino acid threonine (T) at position 135.

[0123] In various embodiments, an inhibitor-resistant MGMT does not include the amino acid mutation N137D, is not MGMT^{N137D}, and/or does not include the amino acid aspartic acid (D) at position 137. In various embodiments, an inhibitor-resistant MGMT does not include the amino acid mutation N137F, is not MGMT^{N137F}, and/or does not include the amino acid phenylalanine (F) at position 137. In various embodiments, an inhibitor-resistant MGMT does not include the amino acid mutation N137P, is not MGMT^{N137P}, and/or does not include the amino acid proline (P) at position 137.

[0124] In various embodiments, an inhibitor-resistant MGMT does not include the amino acid mutation P138K, is not MGMT^{P138K}, and/or does not include the amino acid lysine (K) at position 138.

[0125] In various embodiments, an inhibitor-resistant MGMT does not include the amino acid mutation V139F, is not MGMT^{V139F}, and/or does not include the amino acid valine (V) at position 139.

[0126] In various embodiments, an inhibitor-resistant MGMT does not include the amino acid mutation P140E, is not MGMT^{P140E}, and/or does not include the amino acid glutamic acid (E) at position 140. In various embodiments, an inhibitor-resistant MGMT does not include the amino acid mutation P140F, is not MGMT^{P140F}, and/or does not include the amino acid phenylalanine (F) at position 140. In various embodiments, an inhibitor-resistant MGMT does not include the amino acid mutation P140H, is not MGMT^{P140H}, and/or does not include the amino acid histidine (H) at position 140.

[0127] In various embodiments, an inhibitor-resistant MGMT does not include the amino acid mutation P140A, is not MGMT^{P140A}, and/or does not include the amino acid alanine (A) at position 140. In various embodiments, an inhibitor-resistant MGMT does not include the amino acid mutation P140G, is not MGMT^{P140G}, and/or does not include the amino acid glycine (G) at position 140. In various embodiments, an inhibitor-resistant MGMT does not include the amino acid mutation P140I, is not MGMT^{P140I}, and/or does not include the amino acid isoleucine (I) at position 140. In various embodiments, an inhibitor-resistant MGMT does not include the amino acid mutation P140K, is not MGMT^{P140K}, and/or does not include the amino acid lysine (K) at position 140. In various embodiments, an inhibitor-resistant MGMT does not include the amino acid mutation P140L, is not MGMT^{P140L}, and/or does not include the amino acid leucine (L) at position 140. In various embodiments, an inhibitor-resistant MGMT does not include the amino acid mutation P140M, is not MGMT^{P140M}, and/or does not include the amino acid methionine (M) at position 140. In various embodiments, an inhibitor-resistant MGMT does not include the amino acid mutation P140N, is not MGMT^{P140N}, and/or does not include the amino acid asparagine (N) at position 140. In various embodiments, an inhibitor-resistant MGMT does not include the amino acid mutation P140Q, is not MGMT^{P140Q}, and/or does not include the amino acid glutamine (Q) at position 140. In various embodiments, an inhibitor-resistant MGMT does not include the amino acid mutation P140R, is not MGMT^{P140R}, and/or does not include the amino acid arginine (R) at position 140. In various embodiments, an inhibitor-resistant MGMT does not include the amino acid mutation P140S, is not MGMT^{P140S}, and/or does not include the amino acid serine(S) at position 140. In various embodiments, an inhibitor-resistant MGMT does not include the amino acid mutation P140T, is not MGMT^{P140T}, and/or does not include the amino acid threonine (T) at position 140.

[0128] In various embodiments, an inhibitor-resistant MGMT does not include the amino acid mutation L142M, is not MGMT^{L142M}, and/or does not include the amino acid methionine (M) at position 142.

[0129] In various embodiments, an inhibitor-resistant MGMT does not include the amino acid mutation C150Y, is not MGMT^{C150Y}, and/or does not include the amino acid tyrosine (Y) at position 150.

[0130] In various embodiments, an inhibitor-resistant MGMT does not include the amino acid mutation S152H, is not MGMT^{S152H}, and/or does not include the amino acid histidine (H) at position 152.

[0131] In various embodiments, an inhibitor-resistant MGMT does not include the amino acid mutation A154G, is not MGMT^{A154G}, and/or does not include the amino acid glycine (G) at position 154.

[0132] In various embodiments, an inhibitor-resistant MGMT does not include the amino acid mutation G156I, is not MGMT^{G156I}, and/or does not include the amino acid isoleucine (I) at position 156. In various embodiments, an inhibitor-resistant MGMT does not include the amino acid mutation G156P, is not MGMT^{G156P}, and/or does not include the amino acid proline (P) at position 156. In various embodiments, an inhibitor-resistant MGMT does not include the amino acid mutation G156V, is not MGMT^{G156V}, and/or does not include the amino acid valine (V) at position 156.

[0133] In various embodiments, an inhibitor-resistant MGMT does not include the amino acid mutation G156A, is not MGMT^{G156A}, and/or does not include the amino acid alanine (A) at position 156.

[0134] In various embodiments, an inhibitor-resistant MGMT does not include the amino acid mutation N157T, is not MGMT^{N157T}, and/or does not include the amino acid threonine (T) at position 157.

[0135] In various embodiments, an inhibitor-resistant MGMT does not include the amino acid mutation Y158M, is not MGMT^{Y158M}, and/or does not include the amino acid methionine (M) at position 158. In various embodiments, an inhibitor-resistant MGMT does not include the amino acid mutation Y158W, is not MGMT^{Y158W}, and/or does not include the amino acid tryptophan (W) at position 158.

[0136] In various embodiments, an inhibitor-resistant MGMT does not include the amino acid mutation Y158F, is not MGMT^{Y158F}, and/or does not include the amino acid phenylalanine (F) at position 158. In various embodiments, an inhibitor-resistant MGMT does not include the amino acid mutation Y158H, is not MGMT^{Y158H}, and/or does not include the amino acid histidine (H) at position 158.

[0137] In various embodiments, an inhibitor-resistant MGMT does not include the amino acid mutation S159F, is not MGMT^{S159F}, and/or does not include the amino acid phenylalanine (F) at position 159. In various embodiments, an inhibitor-resistant MGMT does not include the amino acid mutation S159I, is not MGMT^{S159I}, and/or does not include the amino acid isoleucine (I) at position 159. In various embodiments, an inhibitor-resistant MGMT does not include the amino acid mutation S159L, is not MGMT^{S159L}, and/or does not include the amino acid leucine (L) at position 159. In various embodiments, an inhibitor-resistant MGMT does not include the amino acid mutation S159P, is not MGMT^{S159P}, and/or does not include the amino acid proline (P) at position 159. In various embodiments, an inhibitor-resistant MGMT does not include the amino acid mutation S159T, is not MGMT^{S159T}, and/or does not include the amino acid threonine (T) at position 159. In various embodiments, an inhibitor-resistant MGMT does not include the amino acid mutation S159W, is not MGMT^{S159W}, and/or does not include the amino acid tryptophan (W) at position 159. In various embodiments, an inhibitor-resistant MGMT does not include the amino acid mutation S159Y, is not MGMT^{S159Y}, and/or does not include the amino acid tyrosine (Y) at position 159.

[0138] In various embodiments, an inhibitor-resistant MGMT does not include the amino acid mutation G160D, is not MGMT^{G160D}, and/or does not include the amino acid aspartic acid (D) at position 160. In various embodiments, an inhibitor-resistant MGMT does not include the amino acid mutation G160E, is not MGMT^{G160E}, and/or does not include the amino acid glutamic acid (E) at position 160. In various embodiments, an inhibitor-resistant MGMT does not include the amino acid mutation G160H, is not MGMT^{G160H}, and/or does not include the amino acid histidine (H) at position 160. In various embodiments, an inhibitor-resistant MGMT does not include the amino acid mutation G160K, is not MGMT^{G160K}, and/or does not include the amino acid lysine (K) at position 160. In various embodiments, an inhibitor-resistant MGMT does not include the amino acid mutation G160P, is not MGMT^{G160P}, and/or does not include the amino acid proline (P) at position 160.

[0139] In various embodiments, an inhibitor-resistant MGMT does not include the amino acid mutation G160A, is not MGMT^{G160A}, and/or does not include the amino acid alanine (A) at position 160. In various embodiments, an inhibitor-resistant MGMT does not include the amino acid mutation G160R, is not MGMT^{G160R}, and/or does not include the amino acid arginine (R) at position 160. In various embodiments, an inhibitor-resistant MGMT does not include the amino acid mutation G160S, is not MGMT^{G160S}, and/or does not include the amino acid serine(S) at position 160.

[0140] In various embodiments, an inhibitor-resistant MGMT does not include the amino acid mutation L162P, is not MGMT^{L162P}, and/or does not include the amino acid leucine (L) at position 162. In various embodiments, an inhibitor-resistant MGMT does not include the amino acid mutation L162V, is not MGMT^{L162V}, and/or does not include the amino acid valine (V) at position 162.

[0141] In various embodiments, an inhibitor-resistant MGMT does not include the amino acid mutation K165E, is not MGMT^{K165E}, and/or does not include the amino acid glutamic acid (E) at position 165. In various embodiments, an inhibitor-resistant MGMT does not include the amino acid mutation K165N, is not MGMT^{K165N}, and/or does not include the amino acid asparagine (N) at position 165. In various embodiments, an inhibitor-resistant MGMT does not include the amino acid mutation K165R, is not MGMT^{K165R}, and/or does not include the amino acid arginine (R) at position 165.

[0142] In various embodiments, an inhibitor-resistant MGMT does not include the amino acid mutation A170S, is not MGMT^{A170S}, and/or does not include the amino acid serine(S) at position 170.

[0143] In various embodiments, an inhibitor-resistant MGMT does not include the amino acid mutations PVP(138-140)CMK, in not MGMT^{PVP(138-140)CMK}, and/or does not include the amino acids cystine (C) at position 138, methionine (M) at position 139, and lysine (K) at position 140. In various embodiments, an inhibitor-resistant MGMT does not include the amino acid mutations PVP(138-140)CIK, in not MGMT^{PVP(138-140)CIK}, and/or does not include the amino acids cystine (C) at position 138, isoleucine (I) at position 139, and lysine (K) at position 140. In various embodiments, an inhibitor-resistant MGMT does not include the amino acid mutations PVP(138-140)HLK, in not MGMT^{PVP(138-140)HLK}, and/or does not include the amino acids histidine (H) at position 138, leucine (L) at position 139, and lysine (K) at position 140. In various embodiments, an inhibitor-resistant MGMT does not include the amino acid mutations PVP(138-140)KIK, in not MGMT^{PVP(138-140)KIK}, and/or does not include the amino acids lysine (K) at position 138, isoleucine (I) at position 139, and lysine (K) at position 140. In various embodiments, an inhibitor-resistant MGMT does not include the amino acid mutations PVP(138-140)KIR, in not MGMT^{PVP(138-140)KIR}, and/or does not include the amino acids lysine (K) at position 138, isoleucine (I) at position 139, and arginine (R) at position 140. In various embodiments, an inhibitor-resistant MGMT does not include the amino acid mutations PVP(138-140)KLK, in not MGMT^{PVP(138-140)KLK}, and/or does not include the amino acids lysine (K) at position 138, leucine (L) at position 139, and lysine (K) at position 140. In various embodiments, an inhibitor-resistant MGMT does not include the amino acid mutations PVP(138-140)KMK, in not MGMT^{PVP(138-140)KMK}, and/or does not include the amino acids lysine (K) at position 138, methionine (M) at position 139, and lysine (K) at position 140. In various embodiments, an inhibitor-resistant MGMT does not include the amino acid mutations PVP(138-140)KVK, in not MGMT^{PVP(138-140)KVK}, and/or does not include the amino acids lysine (K) at position 138, valine (V) at position 139, and lysine (K) at position 140. In various embodiments, an inhibitor-resistant MGMT does not include the amino acid mutations PVP(138-140)KWK, in not MGMT^{PVP(138-140)KWK}, and/or does not include the amino acids lysine (K) at position 138, tryptophan (W) at position 139, and lysine (K) at position 140. In various embodiments, an inhibitor-resistant MGMT does not include the amino acid mutations PVP(138-140)KYK, in not MGMT^{PVP(138-140)KYK}, and/or does not include the amino acids lysine (K) at position 138, tyrosine (Y) at position 139, and lysine (K) at position 140. In various embodiments, an inhibitor-resistant MGMT does not include the amino acid mutations PVP(138-140)KYN, in not MGMT^{PVP(138-140)KYN}, and/or does not include the amino acids lysine (K) at position 138, tyrosine (Y) at position 139, and asparagine (N) at position 140. In various embodiments, an inhibitor-resistant MGMT does not include the amino acid mutations PVP(138-140)KYR, in not MGMT^{PVP(138-140)KYR}, and/or does not include the amino acids lysine (K) at position 138, tyrosine (Y) at position 139, and arginine (R) at position 140. In various embodiments, an inhibitor-resistant MGMT does not include the amino acid mutations PVP(138-140)MIK, in not MGMT^{PVP(138-140)MIK}, and/or does not include the amino acids methionine (M) at position 138, isoleucine (I) at position 139, and lysine (K) at position 140. In various embodiments, an inhibitor-resistant MGMT does not include the amino acid mutations PVP(138-140)MLK, in not MGMT^{PVP(138-140)MLK}, and/or does not include the amino acids methionine (M) at position 138, leucine (L) at position 139, and lysine (K) at position 140. In various embodiments, an inhibitor-resistant MGMT does not include the amino acid mutations PVP(138-140)MMK, in not MGMT^{PVP(138-140)MMK}, and/or does not include the amino acids methionine (M) at position 138, methionine (M) at position 139, and lysine (K) at position 140. In various embodiments, an inhibitor-resistant MGMT does not include the amino acid mutations PVP(138-140)MVK, in not MGMT^{PVP(138-140)MVK}, and/or does not include the amino acids methionine (M) at position 138, valine (V) at position 139, and lysine (K) at position 140. In various embodiments, an inhibitor-resistant MGMT does not include the amino acid mutations PVP(138-140)MWK, in not MGMT^{PVP(138-140)MWK}, and/or does not include the amino acids methionine (M) at position 138, tryptophan (W) at position 139, and lysine (K) at position 140. In various embodiments, an inhibitor-resistant MGMT does not include the amino acid mutations PVP(138-140)MYR, in not MGMT^{PVP(138-140)MYR}, and/or does not include the amino acids methionine (M) at position 138, tyrosine (Y) at position 139, and arginine (R) at position 140. In various embodiments, an inhibitor-resistant MGMT does not include the amino acid mutations PVP(138-140)NIK, in not MGMT^{PVP(138-140)NIK}, and/or does not include the amino acids asparagine (N) at position 138, isoleucine (I) at position 139, and lysine (K) at position 140. In various embodiments, an inhibitor-resistant MGMT does not include the amino acid mutations PVP(138-140)NLK, in not MGMT^{PVP(138-140)NLK}, and/or does not include the amino acids asparagine (N) at position 138, leucine (L) at position 139, and lysine (K) at position 140. In various embodiments, an inhibitor-resistant MGMT does not include the amino acid mutations PVP(138-140)NLL, in not MGMT^{PVP(138-140)NLL}, and/or does not include the amino acids asparagine (N) at position 138, leucine (L) at position 139, and leucine (L) at position 140. In various embodiments, an inhibitor-resistant MGMT does not include the amino acid mutations PVP(138-140)PLK, in not MGMT^{PVP(138-140)PLK}, and/or does not include the amino acids proline (P) at position 138, leucine (L) at position 139, and lysine (K) at position 140. In various embodiments, an inhibitor-resistant MGMT does not include the amino acid mutations PVP(138-140)PYR, in not MGMT^{PVP(138-140)PYR}, and/or does not include the amino acids proline (P) at position 138, tyrosine (Y) at position 139, and arginine (R) at position 140. In various embodiments, an inhibitor-resistant MGMT does not include the amino acid mutations PVP(138-140)QLN, in not MGMT^{PVP(138-140)QLN}, and/or does not include the amino acids glutamine (Q) at position 138, leucine (L) at position 139, and asparagine (N) at position 140. In various embodiments, an inhibitor-resistant MGMT does not include the amino acid mutations PVP(138-140)RFK, in not MGMT^{PVP(138-140)RFK}, and/or does not include the amino acids arginine (R) at position 138, phenylalanine (F) at position 139, and lysine (K) at position 140. In various embodiments, an inhibitor-resistant MGMT does not include the amino acid mutations PVP(138-140)RTK, in not MGMT^{PVP(138-140)RTK}, and/or does not include the amino acids arginine (R) at position 138, threonine (T) at position 139, and lysine (K) at position 140. In various embodiments, an inhibitor-resistant MGMT does not include the amino acid mutations PVP(138-140)RYK, in not MGMT^{PVP(138-140)RYK}, and/or does not include the amino acids arginine (R) at position 138, tyrosine (Y) at position 139, and lysine (K) at position 140. In various embodiments, an inhibitor-resistant MGMT does not include the amino acid mutations PVP(138-140)SFK, in not MGMT^{PVP(138-140)SFK}, and/or does not include the amino acids serine(S) at position 138, phenylalanine (F) at position 139, and lysine (K) at position 140. In various embodiments, an inhibitor-resistant MGMT does not include the amino acid mutations PVP(138-140)SMK, in not MGMT^{PVP(138-140)SMK}, and/or does not include the amino acids serine(S) at position 138, methionine (M) at position 139, and lysine (K) at position 140. In various embodiments, an inhibitor-resistant MGMT does not include the amino acid mutations PVP(138-140)TIK, in not MGMT^{PVP(138-140)TIK}, and/or does not include the amino acids threonine (T) at position 138, isoleucine (I) at position 139, and lysine (K) at position 140. In various embodiments, an inhibitor-resistant MGMT does not include the amino acid mutations PVP(138-140)TLK, in not MGMT^{PVP(138-140)TLK}, and/or does not include the amino acids threonine (T) at position 138, leucine (L) at position 139, and lysine (K) at position 140. In various embodiments, an inhibitor-resistant MGMT does not include the amino acid mutations PVP(138-140)TLN, in not MGMT^{PVP(138-140)TLN}, and/or does not include the amino acids threonine (T) at position 138, leucine (L) at position 139, and asparagine (N) at position 140. In various embodiments, an inhibitor-resistant MGMT does not include the amino acid mutations PVP(138-140)TNK, in not MGMT^{PVP(138-140)TNK}, and/or does not include the amino acids threonine (T) at position 138, asparagine (N) at position 139, and lysine (K) at position 140. In various embodiments, an inhibitor-resistant MGMT does not include the amino acid mutations PVP(138-140)RCK, in not MGMT^{PVP(138-140)RCK}, and/or does not include the amino acids arginine (R) at position 138, cystine (C) at position 139, and lysine (K) at position 140. In various embodiments, an inhibitor-resistant MGMT does not include the amino acid mutations PVP(138-140)SYK, in not MGMT^{PVP(138-140)SYK}, and/or does not include the amino acids serine(S) at position 138, tyrosine (Y) at position 139, and lysine (K) at position 140. In various embodiments, an inhibitor-resistant MGMT does not include the amino acid mutations PVP(138-140)VMK, in not MGMT^{PVP(138-140)VMK}, and/or does not include the amino acids valine (V) at position 138, methionine (M) at position 139, and lysine (K) at position 140. In various embodiments, an inhibitor-resistant MGMT does not include the amino acid mutations PVP(138-140)YAK, in not MGMT^{PVP(138-140)YAK}, and/or does not include the amino acids tyrosine (Y) at position 138, alanine (A) at position 139, and lysine (K) at position 140.

[0144] The present disclosure includes DNA and mRNA coding sequences that encode an inhibitor-resistant MGMT (e.g., MGMT including at least one amino acid mutation set forth in Table 1 and/or Table 2). DNA encoding each amino acid mutation of an inhibitor-resistant MGMT polypeptide (and mRNA expressed therefrom), or mRNA encoding each amino acid mutation of an inhibitor-resistant MGMT polypeptide, can include a mutant DNA or mRNA codon that encodes the amino acid mutation. The present disclosure includes DNA and mRNA coding sequences that include at least one nucleic acid sequence difference as compared to a reference or wild type sequence (i.e., includes at least one nucleic acid sequence mutation) listed in Table 1 and/or Table 2 (e.g., 1, 2, 3, 4, 5, 6, 7, 8, 9, 10 or more nucleic acid sequence mutations listed in Table 1 and/or Table 2).

[0145] In various embodiments, a nucleic acid encoding an inhibitor-resistant MGMT does not encode a polypeptide that includes the amino acid mutation P140K, does not encode MGMT^{P140K}, and/or does not encode a polypeptide that includes the amino acid lysine (K) at position 140. In various embodiments, a nucleic acid encoding an inhibitor-resistant MGMT does not include a codon that corresponds to the amino acid K at position 140.

[0146] In various embodiments, a nucleic acid encoding an inhibitor-resistant MGMT encodes a polypeptide that includes at least one amino acid mutation selected from L33F, L33K, L33P, L33R, L33W, L33Y, M134F, M134V, M134W, M134Y, R135G, R135K, R135L, R135T, N137D, N137F. N137P, P138K, P140E, P140F, P140H, G156I, G156P, G156V, Y158M, Y158W, S159F, S159I, S159L, S159P, S159T, S159W, S159Y, G160D, G160E, G160H, G160K, and G160P.

[0147] In various embodiments, a nucleic acid encoding an inhibitor-resistant MGMT encodes a polypeptide that includes at least one amino acid mutation selected from L33F, L33K, L33P, L33R, L33W, L33Y, M134F, M134V, M134W, M134Y, R135G, R135K, R135L, R135T, N137D, N137F, N137P, P138K, G156I, G156P, G156V, Y158M, Y158W, S159F, S159I, S159L, S159P, S159T, S159W, S159Y, G160D, G160E, G160H, G160K, and G160P. In various embodiments, a nucleic acid encoding an inhibitor-resistant MGMT encodes a polypeptide that includes at least one amino acid mutation selected from P140E, P140F, and P140H.

[0148] In various embodiments, a nucleic acid encoding an inhibitor-resistant MGMT encodes a polypeptide that includes at least one amino acid mutation selected from V139F, P140A, P140G, P140I, P140L, P140M, P140N, P140Q, P140R, P140S, P140T, L142M, C150Y, S152H, A154G, G156A, N157T, Y158F, Y158H, G160A, G160R, G160S, L162P, L162V, K165E, K165N, K165R, A170S, PVP(138-140)CMK, PVP(138-140)CIK, PVP(138-140)HLK, PVP(138-140)KIK, PVP(138-140)KIR, PVP(138-140)KLK, PVP(138-140)KMK, PVP(138-140)KVK, PVP(138-140)KWK, PVP(138-140)KYK, PVP(138-140)KYN, PVP(138-140)KYR, PVP(138-140)MIK, PVP(138-140)MLK, PVP(138-140)MMK, PVP(138-140)MVK, PVP(138-140)MWK, PVP(138-140)MYR, PVP(138-140)NIK, PVP(138-140)NLK, PVP(138-140)NLL, PVP(138-140)PLK, PVP(138-140)PYR, PVP(138-140)QLN, PVP(138-140)RFK, PVP(138-140)RTK, PVP(138-140)RYK, PVP(138-140)SFK, PVP(138-140)SMK, PVP(138-140)TIK, PVP(138-140)TLK, PVP(138-140)TLN, PVP(138-140)TNK, PVP(138-140)RCK, PVP(138-140)SYK, PVP(138-140)VMK, and PVP(138-140)YAK.

[0149] In various embodiments, a nucleic acid encoding an inhibitor-resistant MGMT encodes a polypeptide that includes the amino acid mutation P140K.

[0150] In various embodiments, a nucleic acid encoding an inhibitor-resistant MGMT does not encode a polypeptide that includes the amino acid mutation L33F, does not encode MGMT^{L33F}, and/or does not encode a polypeptide that includes the amino acid phenylalanine (F) at position 33. In various embodiments, a nucleic acid encoding an inhibitor-resistant MGMT does not encode a polypeptide that includes the amino acid mutation L33K, does not encode MGMT^{L33K}, and/or does not encode a polypeptide that includes the amino acid lysine (K) at position 33. In various embodiments, a nucleic acid encoding an inhibitor-resistant MGMT does not encode a polypeptide that includes the amino acid mutation L33P, does not encode MGMT^{L33P}, and/or does not encode a polypeptide that includes the amino acid proline (P) at position 33. In various embodiments, a nucleic acid encoding an inhibitor-resistant MGMT does not encode a polypeptide that includes the amino acid mutation L33R, does not encode MGMT^{L33R}, and/or does not encode a polypeptide that includes the amino acid arginine (R) at position 33. In various embodiments, a nucleic acid encoding an inhibitor-resistant MGMT does not encode a polypeptide that includes the amino acid mutation L33W, does not encode MGMT^{L33W} 3W, and/or does not encode a polypeptide that includes the amino acid tryptophan (W) at position 33. In various embodiments, a nucleic acid encoding an inhibitor-resistant MGMT does not encode a polypeptide that includes the amino acid mutation L33Y, does not encode MGMT^{L33Y}, and/or does not encode a polypeptide that includes the amino acid tyrosine (Y) at position 33.

[0151] In various embodiments, an inhibitor-resistant MGMT does not encode a polypeptide that includes the amino acid mutation M134F, does not encode MGMT^{M134F}, and/or does not encode a polypeptide that includes the amino acid phenylalanine (F) at position 134. In various embodiments, a nucleic acid encoding an inhibitor-resistant MGMT does not encode a polypeptide that includes the amino acid mutation M134V, does not encode MGMT^{M134V}, and/or does not encode a polypeptide that includes the amino acid valine (V) at position 134. In various embodiments, a nucleic acid encoding an inhibitor-resistant MGMT does not encode a polypeptide that includes the amino acid mutation M134W, does not encode MGMT^{M134W}, and/or does not encode a polypeptide that includes the amino acid tryptophan (W) at position 134. In various embodiments, a nucleic acid encoding an inhibitor-resistant MGMT does not encode a polypeptide that includes the amino acid mutation M134Y, does not encode MGMT^{M134Y}, and/or does not encode a polypeptide that includes the amino acid tyrosine (Y) at position 134.

[0152] In various embodiments, an inhibitor-resistant MGMT does not encode a polypeptide that includes the amino acid mutation R135G, does not encode MGMT^{R135G}, and/or does not encode a polypeptide that includes the amino acid glycine (G) at position 135. In various embodiments, a nucleic acid encoding an inhibitor-resistant MGMT does not encode a polypeptide that includes the amino acid mutation R135K, does not encode MGMT^{R135K}, and/or does not encode a polypeptide that includes the amino acid lysine (K) at position 135. In various embodiments, a nucleic acid encoding an inhibitor-resistant MGMT does not encode a polypeptide that includes the amino acid mutation R135L, does not encode MGMT^{R135L}, and/or does not encode a polypeptide that includes the amino acid leucine (L) at position 135. In various embodiments, a nucleic acid encoding an inhibitor-resistant MGMT does not encode a polypeptide that includes the amino acid mutation R135T, does not encode MGMT^{R135T}, and/or does not encode a polypeptide that includes the amino acid threonine (T) at position 135.

[0153] In various embodiments, an inhibitor-resistant MGMT does not encode a polypeptide that includes the amino acid mutation N137D, does not encode MGMT^{N137D}, and/or does not encode a polypeptide that includes the amino acid aspartic acid (D) at position 137. In various embodiments, a nucleic acid encoding an inhibitor-resistant MGMT does not encode a polypeptide that includes the amino acid mutation N137F, does not encode MGMT^{N137F}, and/or does not encode a polypeptide that includes the amino acid phenylalanine (F) at position 137. In various embodiments, a nucleic acid encoding an inhibitor-resistant MGMT does not encode a polypeptide that includes the amino acid mutation N137P, does not encode MGMT^{N137P}, and/or does not encode a polypeptide that includes the amino acid proline (P) at position 137.

[0154] In various embodiments, an inhibitor-resistant MGMT does not encode a polypeptide that includes the amino acid mutation P138K, does not encode MGMT^{P138K}, and/or does not encode a polypeptide that includes the amino acid lysine (K) at position 138.

[0155] In various embodiments, an inhibitor-resistant MGMT does not encode a polypeptide that includes the amino acid mutation V139F, does not encode MGMT^{V139F}, and/or does not encode a polypeptide that includes the amino acid valine (V) at position 139.

[0156] In various embodiments, an inhibitor-resistant MGMT does not encode a polypeptide that includes the amino acid mutation P140E, does not encode MGMT^{P140E}, and/or does not encode a polypeptide that includes the amino acid glutamic acid (E) at position 140. In various embodiments, a nucleic acid encoding an inhibitor-resistant MGMT does not encode a polypeptide that includes the amino acid mutation P140F, does not encode MGMT^{P140F}, and/or does not encode a polypeptide that includes the amino acid phenylalanine (F) at position 140. In various embodiments, a nucleic acid encoding an inhibitor-resistant MGMT does not encode a polypeptide that includes the amino acid mutation P140H, does not encode MGMT^{P140H}, and/or does not encode a polypeptide that includes the amino acid histidine (H) at position 140.

[0157] In various embodiments, an inhibitor-resistant MGMT does not encode a polypeptide that includes the amino acid mutation P140A, does not encode MGMT^{P140A}, and/or does not encode a polypeptide that includes the amino acid alanine (A) at position 140. In various embodiments, a nucleic acid encoding an inhibitor-resistant MGMT does not encode a polypeptide that includes the amino acid mutation P140G, does not encode MGMT^{P140G}, and/or does not encode a polypeptide that includes the amino acid glycine (G) at position 140. In various embodiments, a nucleic acid encoding an inhibitor-resistant MGMT does not encode a polypeptide that includes the amino acid mutation P140I, does not encode MGMT^{P140I}, and/or does not encode a polypeptide that includes the amino acid isoleucine (I) at position 140. In various embodiments, a nucleic acid encoding an inhibitor-resistant MGMT does not encode a polypeptide that includes the amino acid mutation P140K, does not encode MGMT^{P140K}, and/or does not encode a polypeptide that includes the amino acid lysine (K) at position 140. In various embodiments, a nucleic acid encoding an inhibitor-resistant MGMT does not encode a polypeptide that includes the amino acid mutation P140L, does not encode MGMT^{P140L}, and/or does not encode a polypeptide that includes the amino acid leucine (L) at position 140. In various embodiments, a nucleic acid encoding an inhibitor-resistant MGMT does not encode a polypeptide that includes the amino acid mutation P140M, does not encode MGMT^{P140M}, and/or does not encode a polypeptide that includes the amino acid methionine (M) at position 140. In various embodiments, a nucleic acid encoding an inhibitor-resistant MGMT does not encode a polypeptide that includes the amino acid mutation P140N, does not encode MGMT^{P140N}, and/or does not encode a polypeptide that includes the amino acid asparagine (N) at position 140. In various embodiments, a nucleic acid encoding an inhibitor-resistant MGMT does not encode a polypeptide that includes the amino acid mutation P140Q, does not encode MGMT^{P140Q}, and/or does not encode a polypeptide that includes the amino acid glutamine (Q) at position 140. In various embodiments, a nucleic acid encoding an inhibitor-resistant MGMT does not encode a polypeptide that includes the amino acid mutation P140R, does not encode MGMT^{P140R}, and/or does not encode a polypeptide that includes the amino acid arginine (R) at position 140. In various embodiments, a nucleic acid encoding an inhibitor-resistant MGMT does not encode a polypeptide that includes the amino acid mutation P140S, does not encode MGMT^{P140S}, and/or does not encode a polypeptide that includes the amino acid serine(S) at position 140. In various embodiments, a nucleic acid encoding an inhibitor-resistant MGMT does not encode a polypeptide that includes the amino acid mutation P140T, does not encode MGMT^{P140T}, and/or does not encode a polypeptide that includes the amino acid threonine (T) at position 140.

[0158] In various embodiments, an inhibitor-resistant MGMT does not encode a polypeptide that includes the amino acid mutation L142M, does not encode MGMT^{L142M}, and/or does not encode a polypeptide that includes the amino acid methionine (M) at position 142.

[0159] In various embodiments, an inhibitor-resistant MGMT does not encode a polypeptide that includes the amino acid mutation C150Y, does not encode MGMT (150Y, and/or does not encode a polypeptide that includes the amino acid tyrosine (Y) at position 150.

[0160] In various embodiments, an inhibitor-resistant MGMT does not encode a polypeptide that includes the amino acid mutation S152H, does not encode MGMT^{S152H}, and/or does not encode a polypeptide that includes the amino acid histidine (H) at position 152.

[0161] In various embodiments, an inhibitor-resistant MGMT does not encode a polypeptide that includes the amino acid mutation A154G, does not encode MGMT^{A154G}, and/or does not encode a polypeptide that includes the amino acid glycine (G) at position 154.

[0162] In various embodiments, an inhibitor-resistant MGMT does not encode a polypeptide that includes the amino acid mutation G156I, does not encode MGMT^{G156I}, and/or does not encode a polypeptide that includes the amino acid isoleucine (I) at position 156. In various embodiments, a nucleic acid encoding an inhibitor-resistant MGMT does not encode a polypeptide that includes the amino acid mutation G156P, does not encode MGMT^{G156P}, and/or does not encode a polypeptide that includes the amino acid proline (P) at position 156. In various embodiments, a nucleic acid encoding an inhibitor-resistant MGMT does not encode a polypeptide that includes the amino acid mutation G156V, does not encode MGMT^{G156V}, and/or does not encode a polypeptide that includes the amino acid valine (V) at position 156.

[0163] In various embodiments, an inhibitor-resistant MGMT does not encode a polypeptide that includes the amino acid mutation G156A, does not encode MGMT^{G156A}, and/or does not encode a polypeptide that includes the amino acid alanine (A) at position 156.

[0164] In various embodiments, an inhibitor-resistant MGMT does not encode a polypeptide that includes the amino acid mutation N157T, does not encode MGMT^{N157T}, and/or does not encode a polypeptide that includes the amino acid threonine (T) at position 157.

[0165] In various embodiments, an inhibitor-resistant MGMT does not encode a polypeptide that includes the amino acid mutation Y158M, does not encode MGMT^{Y158M}, and/or does not encode a polypeptide that includes the amino acid methionine (M) at position 158. In various embodiments, a nucleic acid encoding an inhibitor-resistant MGMT does not encode a polypeptide that includes the amino acid mutation Y158W, does not encode MGMT^{Y158W}, and/or does not encode a polypeptide that includes the amino acid tryptophan (W) at position 158.

[0166] In various embodiments, an inhibitor-resistant MGMT does not encode a polypeptide that includes the amino acid mutation Y158F, does not encode MGMT^{Y158F}, and/or does not encode a polypeptide that includes the amino acid phenylalanine (F) at position 158. In various embodiments, a nucleic acid encoding an inhibitor-resistant MGMT does not encode a polypeptide that includes the amino acid mutation Y158H, does not encode MGMT^{Y158H}, and/or does not encode a polypeptide that includes the amino acid histidine (H) at position 158.

[0167] In various embodiments, an inhibitor-resistant MGMT does not encode a polypeptide that includes the amino acid mutation S159F, does not encode MGMT^{S159F}, and/or does not encode a polypeptide that includes the amino acid phenylalanine (F) at position 159. In various embodiments, a nucleic acid encoding an inhibitor-resistant MGMT does not encode a polypeptide that includes the amino acid mutation S159I, does not encode MGMT^{S159I}, and/or does not encode a polypeptide that includes the amino acid isoleucine (I) at position 159. In various embodiments, a nucleic acid encoding an inhibitor-resistant MGMT does not encode a polypeptide that includes the amino acid mutation S159L, does not encode MGMT^{S159L}, and/or does not encode a polypeptide that includes the amino acid leucine (L) at position 159. In various embodiments, a nucleic acid encoding an inhibitor-resistant MGMT does not encode a polypeptide that includes the amino acid mutation S159P, does not encode MGMT^{S159P}, and/or does not encode a polypeptide that includes the amino acid proline (P) at position 159. In various embodiments, a nucleic acid encoding an inhibitor-resistant MGMT does not encode a polypeptide that includes the amino acid mutation S159T, does not encode MGMT^{S159T}, and/or does not encode a polypeptide that includes the amino acid threonine (T) at position 159. In various embodiments, a nucleic acid encoding an inhibitor-resistant MGMT does not encode a polypeptide that includes the amino acid mutation S159W, does not encode MGMT^{S159W}, and/or does not encode a polypeptide that includes the amino acid tryptophan (W) at position 159. In various embodiments, a nucleic acid encoding an inhibitor-resistant MGMT does not encode a polypeptide that includes the amino acid mutation S159Y, does not encode MGMT^{S159Y}, and/or does not encode a polypeptide that includes the amino acid tyrosine (Y) at position 159.

[0168] In various embodiments, an inhibitor-resistant MGMT does not encode a polypeptide that includes the amino acid mutation G160D, does not encode MGMT^{G160D}, and/or does not encode a polypeptide that includes the amino acid aspartic acid (D) at position 160. In various embodiments, a nucleic acid encoding an inhibitor-resistant MGMT does not encode a polypeptide that includes the amino acid mutation G160E, does not encode MGMT^{G160E}, and/or does not encode a polypeptide that includes the amino acid glutamic acid (E) at position 160. In various embodiments, a nucleic acid encoding an inhibitor-resistant MGMT does not encode a polypeptide that includes the amino acid mutation G160H, does not encode MGMT^{G160H}, and/or does not encode a polypeptide that includes the amino acid histidine (H) at position 160. In various embodiments, a nucleic acid encoding an inhibitor-resistant MGMT does not encode a polypeptide that includes the amino acid mutation G160K, does not encode MGMT^{G160K}, and/or does not encode a polypeptide that includes the amino acid lysine (K) at position 160. In various embodiments, a nucleic acid encoding an inhibitor-resistant MGMT does not encode a polypeptide that includes the amino acid mutation G160P, does not encode MGMT^{G160P}, and/or does not encode a polypeptide that includes the amino acid proline (P) at position 160.

[0169] In various embodiments, an inhibitor-resistant MGMT does not encode a polypeptide that includes the amino acid mutation G160A, does not encode MGMT^{G160A}, and/or does not encode a polypeptide that includes the amino acid alanine (A) at position 160. In various embodiments, a nucleic acid encoding an inhibitor-resistant MGMT does not encode a polypeptide that includes the amino acid mutation G160R, does not encode MGMT^{G160R}, and/or does not encode a polypeptide that includes the amino acid arginine (R) at position 160. In various embodiments, a nucleic acid encoding an inhibitor-resistant MGMT does not encode a polypeptide that includes the amino acid mutation G160S, does not encode MGMT^{G160S}, and/or does not encode a polypeptide that includes the amino acid serine(S) at position 160.

[0170] In various embodiments, an inhibitor-resistant MGMT does not encode a polypeptide that includes the amino acid mutation L162P, does not encode MGMT^{L162P}, and/or does not encode a polypeptide that includes the amino acid leucine (L) at position 162. In various embodiments, a nucleic acid encoding an inhibitor-resistant MGMT does not encode a polypeptide that includes the amino acid mutation L162V, does not encode MGMT^{L162V}, and/or does not encode a polypeptide that includes the amino acid valine (V) at position 162.

[0171] In various embodiments, an inhibitor-resistant MGMT does not encode a polypeptide that includes the amino acid mutation K165E, does not encode MGMT^{K165E}, and/or does not encode a polypeptide that includes the amino acid glutamic acid (E) at position 165. In various embodiments, a nucleic acid encoding an inhibitor-resistant MGMT does not encode a polypeptide that includes the amino acid mutation K165N, does not encode MGMT^{K165N}, and/or does not encode a polypeptide that includes the amino acid asparagine (N) at position 165. In various embodiments, a nucleic acid encoding an inhibitor-resistant MGMT does not encode a polypeptide that includes the amino acid mutation K165R, does not encode MGMT^{K165R}, and/or does not encode a polypeptide that includes the amino acid arginine (R) at position 165.

[0172] In various embodiments, an inhibitor-resistant MGMT does not encode a polypeptide that includes the amino acid mutation A170S, does not encode MGMT^{A170S}, and/or does not encode a polypeptide that includes the amino acid serine(S) at position 170.

[0173] In various embodiments, an inhibitor-resistant MGMT does not encode a polypeptide that includes the amino acid mutations PVP(138-140)CMK, in not MGMT^{PVP(138-140)CMK}, and/or does not encode a polypeptide that includes the amino acids cystine (C) at position 138, methionine (M) at position 139, and lysine (K) at position 140. In various embodiments, a nucleic acid encoding an inhibitor-resistant MGMT does not encode a polypeptide that includes the amino acid mutations PVP(138-140)CIK, in not MGMT^{PVP(138-140)CIK}, and/or does not encode a polypeptide that includes the amino acids cystine (C) at position 138, isoleucine (I) at position 139, and lysine (K) at position 140. In various embodiments, a nucleic acid encoding an inhibitor-resistant MGMT does not encode a polypeptide that includes the amino acid mutations PVP(138-140)HLK, in not MGMT^{PVP(138-140)HLK}, and/or does not encode a polypeptide that includes the amino acids histidine (H) at position 138, leucine (L) at position 139, and lysine (K) at position 140. In various embodiments, a nucleic acid encoding an inhibitor-resistant MGMT does not encode a polypeptide that includes the amino acid mutations PVP(138-140)KIK, in not MGMT^{PVP(138-140)KIK}, and/or does not encode a polypeptide that includes the amino acids lysine (K) at position 138, isoleucine (I) at position 139, and lysine (K) at position 140. In various embodiments, a nucleic acid encoding an inhibitor-resistant MGMT does not encode a polypeptide that includes the amino acid mutations PVP(138-140)KIR, in not MGMT^{PVP(138-140)KIR}, and/or does not encode a polypeptide that includes the amino acids lysine (K) at position 138, isoleucine (I) at position 139, and arginine (R) at position 140. In various embodiments, a nucleic acid encoding an inhibitor-resistant MGMT does not encode a polypeptide that includes the amino acid mutations PVP(138-140)KLK, in not MGMT^{PVP(138-140)KLK}, and/or does not encode a polypeptide that includes the amino acids lysine (K) at position 138, leucine (L) at position 139, and lysine (K) at position 140. In various embodiments, a nucleic acid encoding an inhibitor-resistant MGMT does not encode a polypeptide that includes the amino acid mutations PVP(138-140)KMK, in not MGMT^{PVP(138-140)KMK}, and/or does not encode a polypeptide that includes the amino acids lysine (K) at position 138, methionine (M) at position 139, and lysine (K) at position 140. In various embodiments, a nucleic acid encoding an inhibitor-resistant MGMT does not encode a polypeptide that includes the amino acid mutations PVP(138-140)KVK, in not MGMT^{PVP(138-140)KVK}, and/or does not encode a polypeptide that includes the amino acids lysine (K) at position 138, valine (V) at position 139, and lysine (K) at position 140. In various embodiments, a nucleic acid encoding an inhibitor-resistant MGMT does not encode a polypeptide that includes the amino acid mutations PVP(138-140)KWK, in not MGMT^{PVP(138-140)KWK}, and/or does not encode a polypeptide that includes the amino acids lysine (K) at position 138, tryptophan (W) at position 139, and lysine (K) at position 140. In various embodiments, a nucleic acid encoding an inhibitor-resistant MGMT does not encode a polypeptide that includes the amino acid mutations PVP(138-140)KYK, in not MGMT^{PVP(138-140)KYK}, and/or does not encode a polypeptide that includes the amino acids lysine (K) at position 138, tyrosine (Y) at position 139, and lysine (K) at position 140. In various embodiments, a nucleic acid encoding an inhibitor-resistant MGMT does not encode a polypeptide that includes the amino acid mutations PVP(138-140)KYN, in not MGMT^{PVP(138-140)KYN}, and/or does not encode a polypeptide that includes the amino acids lysine (K) at position 138, tyrosine (Y) at position 139, and asparagine (N) at position 140. In various embodiments, a nucleic acid encoding an inhibitor-resistant MGMT does not encode a polypeptide that includes the amino acid mutations PVP(138-140)KYR, in not MGMT^{PVP(138-140)KYR}, and/or does not encode a polypeptide that includes the amino acids lysine (K) at position 138, tyrosine (Y) at position 139, and arginine (R) at position 140. In various embodiments, a nucleic acid encoding an inhibitor-resistant MGMT does not encode a polypeptide that includes the amino acid mutations PVP(138-140)MIK, in not MGMT^{PVP(138-140)MIK}, and/or does not encode a polypeptide that includes the amino acids methionine (M) at position 138, isoleucine (I) at position 139, and lysine (K) at position 140. In various embodiments, a nucleic acid encoding an inhibitor-resistant MGMT does not encode a polypeptide that includes the amino acid mutations PVP(138-140)MLK, in not MGMT^{PVP(138-140)MLK}, and/or does not encode a polypeptide that includes the amino acids methionine (M) at position 138, leucine (L) at position 139, and lysine (K) at position 140. In various embodiments, a nucleic acid encoding an inhibitor-resistant MGMT does not encode a polypeptide that includes the amino acid mutations PVP(138-140)MMK, in not MGMT^{PVP(138-140)MMK}, and/or does not encode a polypeptide that includes the amino acids methionine (M) at position 138, methionine (M) at position 139, and lysine (K) at position 140. In various embodiments, a nucleic acid encoding an inhibitor-resistant MGMT does not encode a polypeptide that includes the amino acid mutations PVP(138-140)MVK, in not MGMT^{PVP(138-140)MVK}, and/or does not encode a polypeptide that includes the amino acids methionine (M) at position 138, valine (V) at position 139, and lysine (K) at position 140. In various embodiments, a nucleic acid encoding an inhibitor-resistant MGMT does not encode a polypeptide that includes the amino acid mutations PVP(138-140)MWK, in not MGMT^{PVP(138-140)MWK}, and/or does not encode a polypeptide that includes the amino acids methionine (M) at position 138, tryptophan (W) at position 139, and lysine (K) at position 140. In various embodiments, a nucleic acid encoding an inhibitor-resistant MGMT does not encode a polypeptide that includes the amino acid mutations PVP(138-140)MYR, in not MGMT^{PVP(138-140)MYR}, and/or does not encode a polypeptide that includes the amino acids methionine (M) at position 138, tyrosine (Y) at position 139, and arginine (R) at position 140. In various embodiments, a nucleic acid encoding an inhibitor-resistant MGMT does not encode a polypeptide that includes the amino acid mutations PVP(138-140)NIK, in not MGMT^{PVP(138-140)NIK}, and/or does not encode a polypeptide that includes the amino acids asparagine (N) at position 138, isoleucine (I) at position 139, and lysine (K) at position 140. In various embodiments, a nucleic acid encoding an inhibitor-resistant MGMT does not encode a polypeptide that includes the amino acid mutations PVP(138-140)NLK, in not MGMT^{PVP(138-140)NLK}, and/or does not encode a polypeptide that includes the amino acids asparagine (N) at position 138, leucine (L) at position 139, and lysine (K) at position 140. In various embodiments, a nucleic acid encoding an inhibitor-resistant MGMT does not encode a polypeptide that includes the amino acid mutations PVP(138-140) NLL, in not MGMT^{PVP(138-140)NLL}, and/or does not encode a polypeptide that includes the amino acids asparagine (N) at position 138, leucine (L) at position 139, and leucine (L) at position 140. In various embodiments, a nucleic acid encoding an inhibitor-resistant MGMT does not encode a polypeptide that includes the amino acid mutations PVP(138-140)PLK, in not MGMT^{PVP(138-140)PLK}, and/or does not encode a polypeptide that includes the amino acids proline (P) at position 138, leucine (L) at position 139, and lysine (K) at position 140. In various embodiments, a nucleic acid encoding an inhibitor-resistant MGMT does not encode a polypeptide that includes the amino acid mutations PVP(138-140)PYR, in not MGMT^{PVP(138-140)PYR}, and/or does not encode a polypeptide that includes the amino acids proline (P) at position 138, tyrosine (Y) at position 139, and arginine (R) at position 140. In various embodiments, a nucleic acid encoding an inhibitor-resistant MGMT does not encode a polypeptide that includes the amino acid mutations PVP(138-140)QLN, in not MGMT^{PVP(138-140)QLN}, and/or does not encode a polypeptide that includes the amino acids glutamine (Q) at position 138, leucine (L) at position 139, and asparagine (N) at position 140. In various embodiments, a nucleic acid encoding an inhibitor-resistant MGMT does not encode a polypeptide that includes the amino acid mutations PVP(138-140)RFK, in not MGMT^{PVP(138-140)RFK}, and/or does not encode a polypeptide that includes the amino acids arginine (R) at position 138, phenylalanine (F) at position 139, and lysine (K) at position 140. In various embodiments, a nucleic acid encoding an inhibitor-resistant MGMT does not encode a polypeptide that includes the amino acid mutations PVP(138-140)RTK, in not MGMT^{PVP(138-140)RTK}, and/or does not encode a polypeptide that includes the amino acids arginine (R) at position 138, threonine (T) at position 139, and lysine (K) at position 140. In various embodiments, a nucleic acid encoding an inhibitor-resistant MGMT does not encode a polypeptide that includes the amino acid mutations PVP(138-140)RYK, in not MGMT^{PVP(138-140)RYK}, and/or does not encode a polypeptide that includes the amino acids arginine (R) at position 138, tyrosine (Y) at position 139, and lysine (K) at position 140. In various embodiments, a nucleic acid encoding an inhibitor-resistant MGMT does not encode a polypeptide that includes the amino acid mutations PVP(138-140)SFK, in not MGMT^{PVP(138-140)SFK}, and/or does not encode a polypeptide that includes the amino acids serine(S) at position 138, phenylalanine (F) at position 139, and lysine (K) at position 140. In various embodiments, a nucleic acid encoding an inhibitor-resistant MGMT does not encode a polypeptide that includes the amino acid mutations PVP(138-140)SMK, in not MGMT^{PVP(138-140)SMK}, and/or does not encode a polypeptide that includes the amino acids serine(S) at position 138, methionine (M) at position 139, and lysine (K) at position 140. In various embodiments, a nucleic acid encoding an inhibitor-resistant MGMT does not encode a polypeptide that includes the amino acid mutations PVP(138-140)TIK, in not MGMT^{PVP(138-140)TIK}, and/or does not encode a polypeptide that includes the amino acids threonine (T) at position 138, isoleucine (I) at position 139, and lysine (K) at position 140. In various embodiments, a nucleic acid encoding an inhibitor-resistant MGMT does not encode a polypeptide that includes the amino acid mutations PVP(138-140)TLK, in not MGMT^{PVP(138-140)TLK}, and/or does not encode a polypeptide that includes the amino acids threonine (T) at position 138, leucine (L) at position 139, and lysine (K) at position 140. In various embodiments, a nucleic acid encoding an inhibitor-resistant MGMT does not encode a polypeptide that includes the amino acid mutations PVP(138-140)TLN, in not MGMT^{PVP(138-140)TLN}, and/or does not encode a polypeptide that includes the amino acids threonine (T) at position 138, leucine (L) at position 139, and asparagine (N) at position 140. In various embodiments, a nucleic acid encoding an inhibitor-resistant MGMT does not encode a polypeptide that includes the amino acid mutations PVP(138-140)TNK, in not MGMT^{PVP(138-140)TNK}, and/or does not encode a polypeptide that includes the amino acids threonine (T) at position 138, asparagine (N) at position 139, and lysine (K) at position 140. In various embodiments, a nucleic acid encoding an inhibitor-resistant MGMT does not encode a polypeptide that includes the amino acid mutations PVP(138-140)RCK, in not MGMT^{PVP(138-140)RCK}, and/or does not encode a polypeptide that includes the amino acids arginine (R) at position 138, cysteine (C) at position 139, and lysine (K) at position 140. In various embodiments, a nucleic acid encoding an inhibitor-resistant MGMT does not encode a polypeptide that includes the amino acid mutations PVP(138-140)SYK, in not MGMT^{PVP(138-140)SYK}, and/or does not encode a polypeptide that includes the amino acids serine(S) at position 138, tyrosine (Y) at position 139, and lysine (K) at position 140. In various embodiments, a nucleic acid encoding an inhibitor-resistant MGMT does not encode a polypeptide that includes the amino acid mutations PVP(138-140)VMK, in not MGMT^{PVP(138-140)VMK}, and/or does not encode a polypeptide that includes the amino acids valine (V) at position 138, methionine (M) at position 139, and lysine (K) at position 140. In various embodiments, a nucleic acid encoding an inhibitor-resistant MGMT does not encode a polypeptide that includes the amino acid mutations PVP(138-140)YAK, in not MGMT^{PVP(138-140)YAK}, and/or does not encode a polypeptide that includes the amino acids tyrosine (Y) at position 138, alanine (A) at position 139, and lysine (K) at position 140.

[0174] Due to the redundancy of the genetic code, up to 6 codons can encode the same amino acid. Those of skill in the art will appreciate that any of the up to 6 codons that can encode a given mutant or non-mutant amino acid can be present at the corresponding codon position of a nucleic acid. Those of skill in the art will appreciate that amino acids are encoded by the codons of a coding sequence, such that a mutation of an MGMT coding sequence can include the presence of a codon that encodes an amino acid that differs from the amino acid encoded by a corresponding codon of a reference or wild type MGMT coding sequence.

TABLE 1
Inhibitor-Resistant MGMT Mutations

| Amino | WT | WT | | |
|---|---|---|---|---|
| Acid | Codon | Codon | Mutant Codon(s) | Mutant Codon(s) |
| Mutation | DNA | RNA | DNA | RNA |
| L33F | ctc | cuc | ttt, ttc (tty) | uuu, uuc (uuy) |
| L33K | ctc | cuc | aaa, aag (aar) | aaa, aag (aar) |
| L33P | ctc | cuc | cct, ccc, cca, ccg (ccn) | ccu, ccc, cca, ccg (ccn) |
| L33R | ctc | cuc | cgt, cgc, cga, cgg; aga, | cgu, cgc, cga, cgg; aga, |
| | | | agg (cgn, agr; or cgy, | agg (cgn, agr; or cgy, |
| | | | mgr) | mgr) |
| L33W | ctc | cuc | tgg | ugg |
| L33Y | ctc | cuc | tat, tac (tay) | uau, uac (uay) |
| M134F | atg | aug | ttt, ttc (tty) | uuu, uuc (uuy) |
| M134V | atg | aug | gtt, gtc, gta, gtg (gtn) | guu, guc, gua, gug (gun) |
| M134W | atg | aug | tgg | ugg |
| M134Y | atg | aug | tat, tac (tay) | uau, uac (uay) |
| R135G | aga | aga | ggt, ggc, gga, ggg (ggn) | ggu, ggc, gga, ggg (ggn) |
| R135K | aga | aga | aaa, aag (aar) | aaa, aag (aar) |
| R135L | aga | aga | ctt, ctc, cta, ctg; tta, ttg | cuu, cuc, cua, cug; uua, |
| | | | (ctn, ttr; or cty, ytr) | uug (cun, uur; or cuy, yur) |
| R135T | aga | aga | act, acc, aca, acg (acn) | acu, acc, aca, acg (acn) |
| N137D | aat | aau | gat, gac (gay) | gau, gac (gay) |
| N137F | aat | aau | ttt, ttc (tty) | uuu, uuc (uuy) |
| N137P | aat | aau | cct, ccc, cca, ccg (ccn) | ccu, ccc, cca, ccg (ccn) |
| P138K | cct | ccu | aaa, aag (aar) | aaa, aag (aar) |
| P140E | ccc | ccc | gaa, gag (gar) | gaa, gag (gar) |
| P140F | ccc | ccc | ttt, ttc (tty) | uuu, uuc (uuy) |
| P140H | ccc | ccc | cat, cac (cay) | cau, cac (cay) |
| G156I | ggc | ggc | att, atc, ata (ath) | auu, auc, aua (auh) |
| G156P | ggc | ggc | cct, ccc, cca, ccg (con) | ccu, ccc, cca, ccg (ccn) |
| G156V | ggc | ggc | gtt, gtc, gta, gtg (gtn) | guu, guc, gua, gug (gun) |
| Y158M | tac | uac | atg | aug |
| Y158W | tac | uac | tgg | ugg |
| S159F | tcc | ucc | ttt, ttc (tty) | uuu, uuc (uuy) |
| S159I | tcc | ucc | att, atc, ata (ath) | auu, auc, aua (auh) |
| S159L | tcc | ucc | ctt, ctc, cta, ctg; tta, ttg | cuu, cuc, cua, cug; uua, |
| | | | (ctn, ttr; or cty, ytr) | uug (cun, uur; or cuy, yur) |
| S159P | tcc | ucc | cct, ccc, cca, ccg (ccn) | ccu, ccc, cca, ccg (ccn) |
| S159T | tcc | ucc | act, acc, aca, acg (acn) | acu, acc, aca, acg (acn) |
| S159W | tcc | ucc | tgg | ugg |
| S159Y | tcc | ucc | tat, tac (tay) | uau, uac (uay) |
| G160D | gga | gga | gat, gac (gay) | gau, gac (gay) |
| G160E | gga | gga | gaa, gag (gar) | gaa, gag (gar) |
| G160H | gga | gga | cat, cac (cay) | cau, cac (cay) |
| G160K | gga | gga | aaa, aag (aar) | aaa, aag (aar) |
| G160P | gga | gga | cct, ccc, cca, ccg (ccn) | ccu, ccc, cca, ccg (ccn) |

TABLE 2
Additional Inhibitor-Resistant MGMT Mutations

| Amino | WT | WT | | |
|---|---|---|---|---|
| Acid | Codon | Codon | Mutant Codon(s) | Mutant Codon(s) |
| Mutation | DNA | RNA | DNA | RNA |
| V139F | gtc | guc | ttt, ttc (tty) | uuu, uuc (uuy) |
| P140A | ccc | ccc | gct, gcc, gca, gcg (gcn) | gcu, gcc, gca, gcg (gcn) |
| P140G | ccc | ccc | ggt, ggc, gga, ggg (ggn) | ggu, ggc, gga, ggg (ggn) |
| P140I | ccc | ccc | att, atc, ata (ath) | auu, auc, aua (auh) |
| P140K | ccc | ccc | aaa, aag (aar) | aaa, aag (aar) |
| P140L | ccc | ccc | ctt, ctc, cta, ctg; tta, ttg | cuu, cuc, cua, cug; uua, |
| | | | (ctn, ttr; or cty, ytr) | uug (cun, uur; or cuy, yur) |
| P140M | ccc | ccc | atg | aug |
| P140N | ccc | ccc | aat, aac (aay) | aau, aac (aay) |
| P140Q | ccc | ccc | caa, cag (car) | caa, cag (car) |
| P140R | ccc | ccc | cgt, cgc, cga, cgg; aga, | cgu, cgc, cga, cgg; aga, |
| | | | agg (cgn, agr; or cgy, | agg (cgn, agr; or cgy, |
| | | | mgr) | mgr) |
| P140S | ccc | ccc | tct, tcc, tca, tcg; agt, agc | ucu, ucc, uca, ucg; agu, |
| | | | (tcn, agy) | agc (ucn, agy) |
| P140T | ccc | ccc | act, acc, aca, acg (acn) | acu, acc, aca, acg (acn) |
| L142M | ctc | cuc | atg | aug |
| C150Y | tgc | ugc | tat, tac (tay) | uau, uac (uay) |
| S152H | agc | agc | cat, cac (cay) | cau, cac (cay) |
| A154G | gcc | gcc | ggt, ggc, gga, ggg (ggn) | ggu, ggc, gga, ggg (ggn) |
| G156A | ggc | ggc | gct, gcc, gca, gcg (gcn) | gcu, gcc, gca, gog (gcn) |
| N157T | aac | aac | act, acc, aca, acg (acn) | acu, acc, aca, acg (acn) |
| Y158F | tac | uac | ttt, ttc (tty) | uuu, uuc (uuy) |
| Y158H | tac | uac | cat, cac (cay) | cau, cac (cay) |
| G160A | gga | gga | gct, gcc, gca, gcg (gcn) | gcu, gcc, gca, gcg (gcn) |
| G160R | gga | gga | cgt, cgc, cga, cgg; aga, | cgu, cgc, cga, cgg; aga, |
| | | | agg (cgn, agr; or cgy, | agg (cgn, agr; or cgy, |
| | | | mgr) | mgr) |
| G160S | ga | gga | tct, tcc, tca, tcg; agt, agc | ucu, ucc, uca, ucg; agu, |
| | | | (tcn, agy) | agc (ucn, agy) |
| L162P | ctg | cug | cct, ccc, cca, ccg (ccn) | ccu, ccc, cca, ccg (ccn) |
| L162V | ctg | cug | gtt, gtc, gta, gtg (gtn) | guu, guc, gua, gug (gun) |
| K165E | aag | aag | gaa, gag (gar) | gaa, gag (gar) |
| K165N | aag | aag | aau, aac (aay) | aau, aac (aay) |
| K165R | aag | aag | cgt, cgc, cga, cgg; aga, | cgu, cgc, cga, cgg; aga, |
| | | | agg (cgn, agr; or cgy, | agg (cgn, agr; or cgy, |
| | | | mgr) | mgr) |
| A170S | gcc | gcc | tct, tcc, tca, tcg; agt, agc | ucu, ucc, uca, ucg; agu, |
| | | | (tcn, agy) | agc (ucn, agy) |
| PVP(138- | cct gtc | ccu guc | C: tgt, tgc (tgy) | C: ugu, ugc (ugy) |
| 140)CMK | ccc | ccc | M: atg | M: aug |
| | | | K: aaa, aag (aar) | K: aaa, aag (aar) |
| PVP(138- | cct gtc | ccu guc | C: tgt, tgc (tgy) | C: ugu, ugc (ugy) |
| 140)CIK | ccc | ccc | I: att, atc, ata (ath) | I: auu, auc, aua (auh) |
| | | | K: aaa, aag (aar) | K: aaa, aag (aar) |
| PVP(138- | cct gtc | ccu guc | H: cat, cac (cay) | H: cau, cac (cay) |
| 140)HLK | ccc | ccc | L: ctt, ctc, cta, ctg; tta, ttg | L: cuu, cuc, cua, cug; uua, |
| | | | (ctn, ttr; or cty, ytr) | uug (cun, uur; or cuy, yur) |
| | | | K: aaa, aag (aar) | K: aaa, aag (aar) |
| PVP(138- | cct gtc | ccu guc | K: aaa, aag (aar) | K: aaa, aag (aar) |
| 140)KIK | ccc | ccc | I: att, atc, ata (ath) | I: auu, auc, aua (auh) |
| | | | K: aaa, aag (aar) | K: aaa, aag (aar) |
| PVP(138- | cct gtc | ccu guc | K: aaa, aag (aar) | K: aaa, aag (aar) |
| 140)KIR | ccc | ccc | I: att, atc, ata (ath) | I: auu, auc, aua (auh) |
| | | | R: cgt, cgc, cga, cgg; aga, | R: cgu, cgc, cga, cgg; aga, |
| | | | agg (cgn, agr; or cgy, | agg (cgn, agr; or cgy, |
| | | | mgr) | mgr) |
| PVP(138- | cct gtc | ccu guc | K: aaa, aag (aar) | K: aaa, aag (aar) |
| 140)KLK | ccc | ccc | L: ctt, ctc, cta, ctg; tta, ttg | L: cuu, cuc, cua, cug; uua, |
| | | | (ctn, ttr; or cty, ytr) | uug (cun, uur; or cuy, yur) |
| | | | K: aaa, aag (aar) | K: aaa, aag (aar) |
| PVP(138- | cct gtc | ccu guc | K: aaa, aag (aar) | K: aaa, aag (aar) |
| 140)KMK | ccc | ccc | M: atg | M: aug |
| | | | K: aaa, aag (aar) | K: aaa, aag (aar) |
| PVP(138- | cct gtc | ccu guc | K: aaa, aag (aar) | K: aaa, aag (aar) |
| 140)KVK | ccc | ccc | V: gtt, gtc, gta, gtg (gtn) | V: guu, guc, gua, gug |
| | | | K: aaa, aag (aar) | (gun) |
| | | | | K: aaa, aag (aar) |
| PVP(138- | cct gtc | ccu guc | K: aaa, aag (aar) | K: aaa, aag (aar) |
| 140)KWK | ccc | ccc | W: tgg | W: ugg |
| | | | K: aaa, aag (aar) | K: aaa, aag (aar) |
| PVP(138- | cct gtc | ccu guc | K: aaa, aag (aar) | K: aaa, aag (aar) |
| 140)KYK | ccc | ccc | Y: tat, tac (tay) | Y: uau, uac (uay) |
| | | | K: aaa, aag (aar) | K: aaa, aag (aar) |
| PVP(138- | cct gtc | ccu guc | K: aaa, aag (aar) | K: aaa, aag (aar) |
| 140)KYN | ccc | ccc | Y: tat, tac (tay) | Y: uau, uac (uay) |
| | | | N: aat, aac (aay) | N: aau, aac (aay) |
| PVP(138- | cct gtc | ccu guc | K: aaa, aag (aar) | K: aaa, aag (aar) |
| 140)KYR | ccc | ccc | Y: tat, tac (tay) | Y: uau, uac (uay) |
| | | | R: cgt, cgc, cga, cgg; aga, | R: cgu, cgc, cga, cgg; aga, |
| | | | agg (cgn, agr; or cgy, | agg (cgn, agr; or cgy, |
| | | | mgr) | mgr) |
| PVP(138- | cct gtc | ccu guc | M: atg | M: aug |
| 140)MIK | ccc | ccc | I: att, atc, ata (ath) | I: auu, auc, aua (auh) |
| | | | K: aaa, aag (aar) | K: aaa, aag (aar) |
| PVP(138- | cct gtc | ccu guc | M: atg | M: aug |
| 140)MLK | ccc | ccc | L: ctt, ctc, cta, ctg; tta, ttg | L: cuu, cuc, cua, cug; uua, |
| | | | (ctn, ttr; or cty, ytr) | uug (cun, uur; or cuy, yur) |
| | | | K: aaa, aag (aar) | K: aaa, aag (aar) |
| PVP(138- | cct gtc | ccu guc | M: atg | M: aug |
| 140)MMK | ccc | ccc | M: atg | M: aug |
| | | | K: aaa, aag (aar) | K: aaa, aag (aar) |
| PVP(138- | cct gtc | ccu guc | M: atg | M: aug |
| 140)MVK | ccc | ccc | V: gtt, gtc, gta, gtg (gtn) | V: guu, guc, gua, gug |
| | | | K: aaa, aag (aar) | (gun) |
| | | | | K: aaa, aag (aar) |
| PVP(138- | cct gtc | ccu guc | M: atg | M: aug |
| 140)MWK | ccc | ccc | W: tgg | W: ugg |
| | | | K: aaa, aag (aar) | K: aaa, aag (aar) |
| PVP(138- | cct gtc | ccu guc | M: atg | M: aug |
| 140)MYR | ccc | ccc | Y: tat, tac (tay) | Y: uau, uac (uay) |
| | | | R: cgt, cgc, cga, cgg; aga, | R: cgu, cgc, cga, cgg; aga, |
| | | | agg (cgn, agr; or cgy, | agg (cgn, agr; or cgy, |
| | | | mgr) | mgr) |
| PVP(138- | cct gtc | ccu guc | N: aat, aac (aay) | N: aau, aac (aay) |
| 140)NIK | ccc | ccc | I: att, atc, ata (ath) | I: auu, auc, aua (auh) |
| | | | K: aaa, aag (aar) | K: aaa, aag (aar) |
| PVP(138- | cct gtc | ccu guc | N: aat, aac (aay) | N: aau, aac (aay) |
| 140)NLK | ccc | ccc | L: ctt, ctc, cta, ctg; tta, ttg | L: cuu, cuc, cua, cug; uua, |
| | | | (ctn, ttr; or cty, ytr) | uug (cun, uur; or cuy, yur) |
| | | | K: aaa, aag (aar) | K: aaa, aag (aar) |
| PVP(138- | cct gtc | ccu guc | N: aat, aac (aay) | N: aau, aac (aay) |
| 140)NLL | ccc | ccc | L: ctt, ctc, cta, ctg; tta, ttg | L: cuu, cuc, cua, cug; uua, |
| | | | (ctn, ttr; or cty, ytr) | uug (cun, uur; or cuy, yur) |
| | | | L: ctt, ctc, cta, ctg; tta, ttg | L: cuu, cuc, cua, cug; uua, |
| | | | (ctn, ttr; or cty, ytr) | uug (cun, uur; or cuy, yur) |
| PVP(138- | cct gtc | ccu guc | P: cct, ccc, cca, ccg (ccn) | P: ccu, ccc, cca, ccg (ccn) |
| 140)PLK | ccc | ccc | L: ctt, ctc, cta, ctg; tta, ttg | L: cuu, cuc, cua, cug; uua, |
| | | | (ctn, ttr; or cty, ytr) | uug (cun, uur; or cuy, yur) |
| | | | K: aaa, aag (aar) | K: aaa, aag (aar) |
| PVP(138- | cct gtc | ccu guc | P: cct, ccc, cca, ccg (ccn) | P: ccu, ccc, cca, ccg (ccn) |
| 140)PYR | ccc | ccc | Y: tat, tac (tay) | Y: uau, uac (uay) |
| | | | R: cgt, cgc, cga, cgg; aga, | R: cgu, cgc, cga, cgg; aga, |
| | | | agg (cgn, agr; or cgy, | agg (cgn, agr; or cgy, |
| | | | mgr) | mgr) |
| PVP(138- | cct gtc | ccu guc | Q: caa, cag (car) | Q: caa, cag (car) |
| 140)QLN | ccc | ccc | L: ctt, ctc, cta, ctg; tta, ttg | L: cuu, cuc, cua, cug; uua, |
| | | | (ctn, ttr; or cty, ytr) | uug (cun, uur; or cuy, yur) |
| | | | N: aat, aac (aay) | N: aau, aac (aay) |
| PVP(138- | cct gtc | ccu guc | R: cgt, cgc, cga, cgg; aga, | R: cgu, cgc, cga, cgg; aga, |
| 140)RFK | ccc | ccc | agg (cgn, agr; or cgy, | agg (cgn, agr; or cgy, |
| | | | mgr) | mgr) |
| | | | F: ttt, ttc (tty) | F: uuu, uuc (uuy) |
| | | | K: aaa, aag (aar) | K: aaa, aag (aar) |
| PVP(138- | cct gtc | ccu guc | R: cgt, cgc, cga, cgg; aga, | R: cgu, cgc, cga, cgg; aga, |
| 140)RTK | ccc | ccc | agg (cgn, agr; or cgy, | agg (cgn, agr; or cgy, |
| | | | mgr) | mgr) |
| | | | T: act, acc, aca, acg (acn) | T: acu, acc, aca, acg (acn) |
| | | | K: aaa, aag (aar) | K: aaa, aag (aar) |
| PVP(138- | cct gtc | ccu guc | R: cgt, cgc, cga, cgg; aga, | R: cgu, cgc, cga, cgg; aga, |
| 140)RYK | ccc | ccc | agg (cgn, agr; or cgy, | agg (cgn, agr; or cgy, |
| | | | mgr) | mgr) |
| | | | Y: tat, tac (tay) | Y: uau, uac (uay) |
| | | | K: aaa, aag (aar) | K: aaa, aag (aar) |
| PVP(138- | cct gtc | ccu guc | S: tct, tcc, tca, tcg; agt, | S: ucu, ucc, uca, ucg; agu, |
| 140)SFK | ccc | ccc | agc (tcn, agy) | agc (ucn, agy) |
| | | | F: ttt, ttc (tty) | F: uuu, uuc (uuy) |
| | | | K: aaa, aag (aar) | K: aaa, aag (aar) |
| PVP(138- | cct gtc | ccu guc | S: tct, tcc, tca, tcg; agt, | S: ucu, ucc, uca, ucg; agu, |
| 140)SMK | ccc | ccc | agc (tcn, agy) | agc (ucn, agy) |
| | | | M: atg | M: aug |
| | | | K: aaa, aag (aar) | K: aaa, aag (aar) |
| PVP(138- | cct gtc | ccu guc | T: act, acc, aca, acg (acn) | T: acu, acc, aca, acg (acn) |
| 140)TIK | ccc | ccc | I: att, atc, ata (ath) | I: auu, auc, aua (auh) |
| | | | K: aaa, aag (aar) | K: aaa, aag (aar) |
| PVP(138- | cct gtc | ccu guc | T: act, acc, aca, acg (acn) | T: acu, acc, aca, acg (acn) |
| 140)TLK | ccc | ccc | L: ctt, ctc, cta, ctg; tta, ttg | L: cuu, cuc, cua, cug; uua, |
| | | | (ctn, ttr; or cty, ytr) | uug (cun, uur; or cuy, yur) |
| | | | K: aaa, aag (aar) | K: aaa, aag (aar) |
| PVP(138- | cct gtc | ccu guc | T: act, acc, aca, acg (acn) | T: acu, acc, aca, acg (acn) |
| 140)TLN | ccc | ccc | L: ctt, ctc, cta, ctg; tta, ttg | L: cuu, cuc, cua, cug; uua, |
| | | | (ctn, ttr; or cty, ytr) | uug (cun, uur; or cuy, yur) |
| | | | N: aat, aac (aay) | N: aau, aac (aay) |
| PVP(138- | cct gtc | ccu guc | T: act, acc, aca, acg (acn) | T: acu, acc, aca, acg (acn) |
| 140)TNK | ccc | ccc | N: aat, aac (aay) | N: aau, aac (aay) |
| | | | K: aaa, aag (aar) | K: aaa, aag (aar) |
| PVP(138- | cct gtc | ccu guc | R: cgt, cgc, cga, cgg; aga, | R: cgu, cgc, cga, cgg; aga, |
| 140)RCK | ccc | ccc | agg (cgn, agr; or cgy, | agg (cgn, agr; or cgy, |
| | | | mgr) | mgr) |
| | | | C: tgt, tgc (tgy) | C: ugu, ugc (ugy) |
| | | | K: aaa, aag (aar) | K: aaa, aag (aar) |
| PVP(138- | cct gtc | ccu guc | S: tct, tcc, tca, tcg; agt, | S: ucu, ucc, uca, ucg; agu, |
| 140)SYK | ccc | ccc | agc (tcn, agy) | agc (ucn, agy) |
| | | | Y: tat, tac (tay) | Y: uau, uac (uay) |
| | | | K: aaa, aag (aar) | K: aaa, aag (aar) |
| PVP(138- | cct gtc | ccu guc | V: gtt, gtc, gta, gtg (gtn) | V: guu, guc, gua, gug |
| 140)VMK | ccc | ccc | M: atg | (gun) |
| | | | K: aaa, aag (aar) | M: aug |
| | | | | K: aaa, aag (aar) |
| PVP(138- | cct gtc | ccu guc | Y: tat, tac (tay) | Y: uau, uac (uay) |
| 140)YAK | ccc | ccc | A: gct, gcc, gca, gcg | A: gcu, gcc, gca, gcg |
| | | | (gcn) | (gcn) |
| | | | K: aaa, aag (aar) | K: aaa, aag (aar) |

[0175] In various embodiments, MGMT^{P140K} refers to an inhibitor-resistant MGMT polypeptide that differs from a reference MGMT polypeptide only in that it includes the amino acid K at position 140 corresponding to SEQ ID NO: 1. In particular embodiments, MGMT^{P140K} refers specifically to a polypeptide including and/or consisting essentially of and/or consisting of SEQ ID NO: 8.

SEQ ID NO: 8
MDKDCEMKRTTLDSPLGKLELSGCEQGLHEIKLLGKGTSAADAVE
VPAPAAVLGGPEPLMQCTAWLNAYFHQPEAIEEFPVPALHHPVFQ
QESFTRQVLWKLLKVVKFGEVISYQQLAALAGNPKAARAVGGAMR
GNPVKILIPCHRVVCSSGAVGNYSGGLAVKEWLLAHEGHRLGKPG
LGGSSGLAGAWLKGAGATSGSPPAGRN

[0176] The present disclosure includes inhibitor-resistant MGMT sequences other than inhibitor-resistant MGMT sequences that include the mutation P140K (e.g., MGMT^{P140K}) and nucleic acid sequences encoding the same. The present disclosure includes inhibitor-resistant MGMT sequences other than inhibitor-resistant MGMT sequences that include V139F, P140A, P140G, P140I, P140L, P140M, P140N, P140Q, P140R, P140S, P140T, L142M, C150Y, S152H, A154G, G156A, N157T, Y158F, Y158H, G160A, G160R, G160S, L162P, L162V, K165E, K165N, K165R, A170S, PVP(138-140)CMK, PVP(138-140)CIK, PVP(138-140)HLK, PVP(138-140)KIK, PVP(138-140)KIR, PVP(138-140)KLK, PVP(138-140)KMK, PVP(138-140)KVK, PVP(138-140)KWK, PVP(138-140)KYK, PVP(138-140)KYN, PVP(138-140)KYR, PVP(138-140)MIK, PVP(138-140)MLK, PVP(138-140)MMK, PVP(138-140)MVK, PVP(138-140)MWK, PVP(138-140)MYR, PVP(138-140)NIK, PVP(138-140)NLK, PVP(138-140)NLL, PVP(138-140)PLK, PVP(138-140)PYR, PVP(138-140)QLN, PVP(138-140)RFK, PVP(138-140)RTK, PVP(138-140)RYK, PVP(138-140)SFK, PVP(138-140)SMK, PVP(138-140)TIK, PVP(138-140)TLK, PVP(138-140)TLN, PVP(138-140)TNK, PVP(138-140)RCK, PVP(138-140)SYK, PVP(138-140)VMK, and/or PVP(138-140)YAK, and nucleic acid sequences encoding the same. The present disclosure includes inhibitor-resistant MGMT sequences other than inhibitor-resistant MGMT sequences that include L33F, L33K, L33P, L33R, L33W, L33Y, M134F, M134V, M134W, M134Y, R135G, R135K, R135L, R135T, N137D, N137F, N137P, P138K, P140E, P140F, P140H, G156I, G156P, G156V, Y158M, Y158W, S159F, S159I, S159L, S159P, S159T, S159W, S159Y, G160D, G160E, G160H, G160K, and G160P, and nucleic acid sequences encoding the same. The present disclosure includes inhibitor-resistant MGMT sequences other than inhibitor-resistant MGMT sequences that differ from a reference MGMT polypeptide sequence only by the mutation P140K, and nucleic acid sequences encoding the same. In various embodiments, an inhibitor-resistant MGMT does not include the amino acid mutation P140K.

### MGMT Inhibitors

[0177] The present disclosure includes inhibitor-resistant MGMT polypeptides. An inhibitor-resistant MGMT polypeptide can be resistant to any of one or more MGMT inhibitors.

[0178] In various embodiments, an MGMT inhibitor is or includes O⁶-meG or an analog or derivative thereof. In various embodiments, an MGMT inhibitor is or includes O⁶-benzylguanine (O⁶BG) or an analog or derivative thereof. O⁶BG donates an alkyl group to MGMT, inactivating it and initiating degradation. In various embodiments, an analog or derivative of O⁶-meG and/or O⁶BG can inhibit MGMT through alkyl group transfer. In various embodiments, an analog or derivative of O⁶-meG and/or O⁶BG can be or include O⁶-(3-bromobenzyl) guanine, O⁶-2-fluoropyridinylmethylguanine (O⁶FPG), O6-3-iodobenzylguanine (O⁶IBG), O⁶-(4-bromothenyl) guanine (O⁶BTG; PaTrin-2), O⁶-5-iodothenylguanine (O⁶ITG), 8-aza-O⁶-benzylguanine (8-aza-BG), O⁶-benzyl-8-bromoguanine (8-bromo-BG), 2-amino-4-benzyloxy-5-nitropyrimidine (4-desamino-5-nitro-BP), O⁶-[p-(hydroxymethyl)benzyl] guanine (HN-BG), O⁶-benzyl-8-methylguanine (8-methyl-BG), O⁶-benzyl-7, 8-dihydro-8-oxoguanine (8-oxo-BG), 2,4,5,-triamino-6-benzyloxyprimidine (5-amino-BP), O⁶-benzyl-9-[(3-oxo-5 α-androstan-17β-yloxycarbonyl)methyl] guanine (DHT-BG), O⁶-benzyl-9-(3-oxo-4-androsten-17β-yloxycarbonyl)methyl] guanine (AND-BG), and/or 8-amino-O⁶-benzylguanine (8-amino-BG).

[0179] In various embodiments, an MGMT inhibitor is or includes diethylamine NONOate, Lomeguatrib, 2,4-diamino-6-benzyloxy-5-nitrosopyrimidine (5-nitroso-BP), and/or 2,4-diamino-6-benzyloxy-5-nitropyrimidine (5-nitro-BP).

[0180] In various embodiments, an MGMT inhibitor is associated (e.g., conjugated) with a further agent, e.g., a targeting agent. In various embodiments, a targeting agent is a polypeptide such as an antibody or polypeptide ligand of a receptor. In various embodiments, a targeting agent is a small molecule such as a small molecule ligand of a receptor. Accordingly, reference to MGMT inhibitors provided herein includes without limitation agents that include an agent that inhibits MGMT (e.g., is independently capable of inhibitor MGMT) associated (e.g., conjugated) with an agent that does not inhibit MGMT (e.g., an agent that is not independently capable of inhibiting MGMT) and/or a targeting agent or otherwise functional agent.

### Alkylating Agents

[0181] Exposure to MGMT inhibitors can sensitize cells that express wild type MGMT to elimination by alkylating agents. Various alkylating agents are known in the art. Alkylating agents include, without limitation, a nitrosoureas (e.g., nimustine (ACNU), carmustine (bis-chloroethylnitrosourea (BCNU), lomustine (CCNU), streptozocin, or semustine (methyl CCNU)), a nitrogen mustard (e.g., mechlorethamine, cyclophosphamide, ifosfamide, melphalan, chlormethine, ramustine or uracil mustard, bendamustine, or chlorambucil), ethylenamine and methylenamine derivatives (e.g., altretamine, thiotepa), an aziridine or epoxide (e.g., thiotepa, mitomycin C, or diaziquone (AZQ)), and alkyl sulfonate (e.g., busulfan or hepsulfam), a triazine or hydrazine (e.g., mitozolomide, temozolomide, procarbazine, or dacarbazine), hexamethylmelamine, and chlorambucil.

[0182] As one example of an alkylating agent, BCNU promotes DNA alkylation at the 06 position of guanine, leading to DNA interstrand crosslinking and altered fidelity of DNA replication and transcription. This induced interstrand crosslinking involves formation of a chloroethyl adduct at the guanine residue that undergoes an intramolecular rearrangement to produce an unstable intermediate that reacts with the cross strand cytosine residue. The result is an N′-guanine, N3-cytosine-ethanol crosslink.

### Editing Enzymes and Systems for Modification of Nucleic Acids Encoding MGMT

[0183] The present disclosure includes editing of MGMT-encoding nucleic acids to produce a modified MGMT-encoding nucleic acid that encodes an inhibitor-resistant MGMT polypeptide. As provided herein, editing includes any modification of a nucleic acid that results in a difference in nucleic acid sequence. Editing agents refer to molecules that can be delivered to a cell or system to cause or contribute to editing. An editing system refers to two or more editing agents that are together sufficient to cause editing (e.g., a base editor and a guide RNA or a prime editor and a guide RNA) or to a single editing agent alone sufficient to cause editing. Editing systems of the present disclosure can include at least one editing agent that includes an editing enzyme. An editing agent can be a fusion polypeptide that includes an editing enzyme. The present disclosure includes a variety of editing agents and editing systems capable of editing MGMT-encoding nucleic acids. As those of skill in the art will appreciate, many or all editing agents described herein can be targeted to induce particular changes using approaches known to those of skill in the art.

### Base Editing Enzymes and Systems for Modification of Nucleic Acids Encoding MGMT

[0184] The present disclosure includes editing systems that utilize a deaminase (e.g., a base editing system) for editing of nucleic acid targets, including in various embodiments modification an MGMT-encoding nucleic acid to produce a nucleic acid encoding inhibitor-resistant MGMT. In various embodiments, an editing agent can include an editing enzyme that includes a deaminase. Deamination is the removal of an amine group from a molecule such as a nucleotide of a nucleic acid. Deamination of a nucleotide can cause changes in the sequence of a nucleic acid, and deaminases are useful in editing for at least that reason. Deamination of adenosine (A) yields inosine (I), which has the same base pairing preferences as a guanosine in DNA and is thus recognized by cell replication machinery as guanosine, resulting in an A-T to G-C transition. Deamination of cytosine (C) yields uridine (U), which is recognized by cell replication machinery as thymine, resulting in a C-G to T-A transition. Collectively, cytosine and adenosine deamination can be used to cause transitions from A to G, T to C, C to T, or G to A. Other deaminase activities are also known. For example, deamination of 5-methylcytosine yields thymine and deamination of guanosine yields xanthine, though xanthine, like guanosine, pairs with cytosine. Deaminases that deaminate cytosine can be referred to as cytosine deaminases. Deaminases that deaminate adenosine can be referred to as adenosine deaminases.

[0185] In particular embodiments, a base editing enzyme includes a cytidine deaminase domain or an adenine deaminase domain. Certain embodiments utilize a cytidine deaminase domain as the nucleobase deaminase enzyme. Particular embodiments utilize an adenine deaminase domain as the nucleobase deaminase enzyme.

[0186] Examples of cytosine deaminase enzymes (CBEs) include APOBEC1, APOBEC3A, APOBEC3G, evoAPOBEC, BE4-YE1, CDA1, and AID. APOBEC1 particularly accepts single-stranded (ss)DNA as a substrate but is incapable of acting on double-stranded (ds)DNA.

[0187] For adenosine base editors (ABEs), exemplary adenosine deaminases that can act on DNA for adenine base editing include a mutant TadA adenosine deaminases (TadA*) that accepts DNA as its substrate. E. coli TadA typically acts as a homodimer to deaminate adenosine in transfer RNA (tRNA). TadA* deaminase catalyzes the conversion of a target ‘A’ to ‘I’ (inosine), which is treated as ‘G’ by cellular polymerases. Subsequently, an original genomic A-T base pair can be converted to a G-C pair. As the cellular inosine excision repair is not as active as uracil excision, ABE does not require any additional inhibitor protein like UGI in CBE. In some embodiments, an ABE can include one or more, or all, of three components including a wild-type E. coli tRNA-specific adenosine deaminase (TadA) monomer, which can play a structural role during base editing, a TadA* mutant TadA monomer that catalyzes deoxyadenosine deamination, and/or a Cas nickase such as Cas9(D10A). In certain embodiments, there is a linker positioned between TadA and TadA*, and in certain embodiments there is a linker positioned between TadA* and the Cas nickase. In various embodiments, one or both linkers includes at least 6 amino acids, e.g., at least 5, 6, 7, 8, 9, 10, 15, 20, 25, 30, 35, 40, 45, or 50 amino acids (e.g., having a lower bound of 5, 6, 7, 8, 9, 10, or 15, amino acids and an upper bound of 20, 25, 30, 35, 40, 45, or 50 amino acids). In various embodiments, one or both linkers include 32 amino acids. In some embodiments, one or both linkers has a sequence according to (SGGS)₂-XTEN-(SGGS)₂ (i.e., SGGSSGGSSGSETPGTSESATPESSGGSSGGS) (SEQ ID NO: 9) or a sequence otherwise known to those of skill in the art.

[0188] In various embodiments, an editing system includes a deaminase associated with a DNA binding domain such as a catalytically impaired nuclease domain. In various embodiments, the DNA binding domain can localize the deaminase to a target nucleic acid in which one or more nucleotides are deaminated by the deaminase. Catalytically impaired nuclease domains are polypeptide domains that have amino acid sequences engineered from reference nuclease domain sequences but that have a reduced ability to cause double-strand breaks (DSBs) as compared to the reference (e.g., a wild type and/or fully functional nuclease) or have no ability to cause double-strand breaks. As referred to herein, a nickase refers to a catalytically impaired nuclease domain that, upon contact with a double-stranded nucleic acid substrate, cleaves one strand (e.g., a target strand) of the double-stranded nucleic acid but not both strands of the double-stranded nucleic acid. In various embodiments, a nickase, upon contact with a double-stranded nucleic acid substrate, cleaves one strand of the double-stranded nucleic acid but not both strands of the double-stranded nucleic acid in at least 70% of contacted double-stranded nucleic acid substrates (e.g., at least 70%, 75%, 80%, 85%, 90%, 91%, 92%, 93%, 94%, 95%, 96%, 97%, 98%, 99%, or 100% of double-stranded nucleic acid substrates).

[0189] Base editing systems are exemplary of editing systems that include deaminase enzymes. A base editing enzyme includes a deaminase enzyme fused to a DNA binding domain that is a catalytically impaired nuclease domain (e.g., a nickase, e.g., a nickase that nicks a single strand, e.g., a non-edited strand). DNA binding domains of base editing enzymes can be RNA guided DNA binding domains, in that an RNA guide can direct the DNA binding domain to a target nucleic acid sequence. Catalytically impaired nuclease domains of a base editing enzyme can bind nucleic acids and can localize the deaminase enzyme to a target nucleic acid.

[0190] Any nuclease of the CRISPR system can be engineered to produce a catalytically impaired nuclease domain (e.g., a nickase) and used within a base editing enzyme or system. Exemplary Cas nucleases include Cas1, Cas1B, Cas2, Cas3, Cas4, Cas5, Cas6, Cas7, Cas8, Cas9 (also known as Csn1 or Csx12), Cas10, CasX, CasY, C2c3, C2c2 and C2c1, Csy1, Csy2, Csy3, Cse1, Cse2, Csc1, Csc2, Csa5, Csn2, Csm2, Csm3, Csm4, Csm5, Csm6, Cmr1, Cmr3, Cmr4, Cmr5, Cmr6, Cpf1, Csb1, Csb2, Csb3, Csx17, Csx14, Csx10, Csx16, CsaX, Csx3, Csx1, Csx15, Csf1, Csf2, Csf3, Csf4, and variants thereof. Numerous forms and variants of Cas nucleases are known in the art (e.g., spCas9, dCas9, nCas9, Cas9-SpRY, and Cas12a) and can have distinct characteristics, including for example recognition of distinct PAMs and PAM positions.

[0191] In various embodiments, a catalytically impaired nuclease domain generates a single-stranded nick in the non-deaminated DNA strand, inducing cells to repair the non-deaminated strand using the deaminated strand as a template. To provide one example, nCas9 can create a nick in target DNA by cutting a single strand, reducing the likelihood of detrimental indel formation as compared to methods that require a double-strand break.

[0192] Particular embodiments utilize a nuclease-inactive Cas9 (dCas9) as the catalytically disabled nuclease. However, any nuclease of the CRISPR system (many of which are described above) can be disabled and used within a base editing system. In particular embodiments, a Cas9 domain with high fidelity is selected wherein the Cas9 domain displays decreased electrostatic interactions between the Cas9 domain and a sugar-phosphate backbone of a DNA, as compared to a wild-type Cas9 domain. In some embodiments, a Cas9 domain (e.g., a wild type Cas9 domain) includes one or more mutations that decrease the association between the Cas9 domain and a sugar-phosphate backbone of a DNA. Cas9 domains with high fidelity are known to those skilled in the art. For example, Cas9 domains with high fidelity have been described in Kleinstiver (2016 Nature 529:490-495) and Slaymaker (2015 Science 351:84-88).

[0193] Other DNA binding nucleases can also be used in a base editing enzyme. For example, base-editing systems can utilize zinc finger nucleases (ZFNs) (see, e.g., Urnov 2010 Nat Rev Genet. 11 (9): 636-46) and transcription activator like effector nucleases (TALENs) (see, e.g., Joung 2013 Nat Rev Mol Cell Biol. 14 (1): 49-55). For additional information regarding DNA-binding nucleases, see, e.g., US 2018/0312825.

[0194] In various embodiments, a base editing enzyme includes a DNA glycosylase inhibitor. A DNA glycosylase inhibitor can override natural DNA repair mechanisms that might otherwise repair the intended base editing. A DNA glycosylase inhibitor can be a uracil DNA glycosylase inhibitor protein (UGI). One exemplary UGI is described in Wang (1991 Gene 99:31-37). In particular embodiments, a base editing enzyme can include one or more DNA glycosylase inhibitor domains (e.g., UGI domains). In various embodiments, base editing enzymes that include more than one DNA glycosylase inhibitor domain (e.g., UGI domain) can generate fewer indels and/or deaminate target nucleic acids more efficiently than base editing enzymes that includes one DNA glycosylase inhibitor domain (e.g., UGI domain) and/or no DNA glycosylase inhibitor domains (e.g., UGI domains). For example, in particular embodiments, dCas9 or a Cas9 nickase can be fused to a cytidine deaminase domain and the dCas9 or Cas9 nickase can be fused to one or more UGI domains.

In particular embodiments, a deaminase domain is associated with the N-terminus of a catalytically disabled nuclease. In particular embodiments, a deaminase domain is associated with the N-terminus of a catalytically disabled nuclease. In certain embodiments, one or more glycosylase inhibitors (e.g., UGI domain) can be associated with the C-terminus of a catalytically disabled nuclease.

[0195] Components of base editors can be fused directly (e.g., by direct covalent bond) or via linkers. For example, the catalytically disabled nuclease can be fused via a linker to the deaminase enzyme and/or a glycosylase inhibitor. Multiple glycosylase inhibitors can also be fused via linkers. As will be understood by one of ordinary skill in the art, linkers can be used to link any peptides or portions thereof.

[0196] Exemplary linkers include polymeric linkers (e.g., polyethylene, polyethylene glycol, polyamide, polyester); amino acid linkers; carbon-nitrogen bond amide linkers; cyclic or acyclic, substituted or unsubstituted, branched or unbranched aliphatic or heteroaliphatic linkers; monomeric, dimeric, or polymeric aminoalkanoic acid linkers; aminoalkanoic acid (e.g., glycine, ethanoic acid, alanine, B-alanine, 3-aminopropanoic acid, 4-aminobutanoic acid, 5-pentanoic acid) linkers; monomeric, dimeric, or polymeric aminohexanoic acid (Ahx) linkers; carbocyclic moiety (e.g., cyclopentane, cyclohexane) linkers; aryl or heteroaryl moiety linkers; and phenyl ring linkers.

[0197] Linkers can also include functionalized moieties to facilitate attachment of a nucleophile (e.g., thiol, amino) from a peptide to the linker. Any electrophile may be used as part of the linker. Exemplary electrophiles include activated esters, activated amides, Michael acceptors, alkyl halides, aryl halides, acyl halides, and isothiocyanates.

[0198] In particular embodiments, linkers range from 4-100 amino acids in length. In particular embodiments, linkers are 4 amino acids, 9 amino acids, 14 amino acids, 16 amino acids, 32 amino acids, or 100 amino acids.

[0199] Various base editing enzymes are known in the art. Examples of base editing enzymes include BE1 (APOBEC1-16 amino acid (aa) linker-Sp dCas9 (D10A, H840A) (see, e.g., Komor 2016 Nature 533:420-424)), BE2 (APOBEC1-16aa linker-Sp dCas9 (D10A, H840A)-4aa linker-UGI (see, e.g., Komor 2016 Nature 533:420-424)), BE3 (APOBEC1-16aa linker-SpnCas9 (D10A)-4aa linker-UGI (see, e.g., Komor 2016 Nature 533:420-424)), HF-BE2 (rAPOBEC1-HF2 nCas9-UGI), HF-BE3 (APOBEC1-16aa linker-HF nCas9 (D10A)-4aa linker-UGI (see, e.g., Rees 2017 Nat. Commun. 8:15790)), BE4 (rAPOBEC1-Sp nCas9-UGI-UGI), BE4max (APOBEC1-32aa linker-Sp nCas9 (D10A)-9aa linker-UGI-9aa linker-UGI (see, e.g., Koblan 2018 Nat. Biotechnol 36 (9): 843-846 and/or Komor 2017 Sci. Adv. 3 (8): eaao4774)), BE4-GAM (Gam-16aa linker-APOBEC1-32aa linker-Sp nCas9 (D10A)-9aa linker-UGI-9aa linker-UGI (see, e.g., Komor 2017 Sci. Adv. 3 (8): eaao4774)), YE1-BE3 (APOBEC1 (W90Y, R126E)-16aa linker-Sp nCas9 (D10A)-4aa linker-UGI (see, e.g., Kim 2017 Nat. Biotechnol. 35:475-480)), EE-BE3 (APOBEC1 (R126E, R132E)-16aa linker-Sp nCas9 (D10A)-4aa linker-UGI (see, e.g., Kim 2017 Nat. Biotechnol. 35:475-480)), YE2-BE3 (APOBEC1 (W90Y, R132E)-16aa linker-Sp nCas9 (D10A)-4aa linker-UGI (see, e.g., Kim 2017 Nat. Biotechnol. 35:475-480)), YEE-BE3 (APOBEC1 (W90Y, R126E, R132E)-16aa linker-Sp nCas9 (D10A)-4aa linker-UGI (see, e.g., Kim 2017 Nat. Biotechnol. 35:475-480)), VQR-BE3 (APOBEC1-16aa linker-Sp VQR nCas9 (D10A)-4aa linker-UGI (see, e.g., Kim 2017 Nat. Biotechnol. 35:475-480)), EQR-BE3 (rAPOBEC1-EQR SpnCas9-UGI), VRER-BE3 (APOBEC1-16aa linker-Sp VRER nCas9 (D10A)-4aa linker-UGI (see, e.g., Kim 2017 Nat. Biotechnol. 35:475-480)), Sa-BE3 (APOBEC1-16aa linker-Sa nCas9 (D10A)-4aa linker-UGI (see, e.g., Kim 2017 Nat. Biotechnol. 35:475-480)), SA-BE4 (APOBEC1-32aa linker-Sa nCas9 (D10A)-9aa linker-UGI-9aa linker-UGI (see, e.g., Komor 2017 Sci. Adv. 3 (8): eaao4774)), SaBE4-Gam (Gam-16aa linker-APOBEC1-32aa linker-Sa nCas9 (D10A)-9aa linker-UGI-9aa linker-UGI (see, e.g., Komor 2017 Sci. Adv. 3 (8): eaao4774)), SaKKH-BE3 (APOBEC1-16aa linker-Sa KKH nCas9 (D10A)-4aa linker-UGI (see, e.g., Kim 2017 Nat. Biotechnol. 35:475-480)), FNLS-BE3 (rAPOBEC1-Sp nCas9-UGI), RA-BE3 (rAPOBEC1 (RA)-Sp nCas9-UGI), Cas12a-BE (APOBEC1-16aa linker-dCas12a-14aa linker-UGI (see, e.g., Li 2018 Nat. Biotechnol. 36:324-327)), Target-AID (Sp nCas9 (D10A)-100aa linker-CDA1-9aa linker-UGI (see, e.g., Nishida 2016 Science 353 (6305): aaf8729)), Target-AID-NG (Sp nCas9 (D10A)-NG-100aa linker-CDA1-9aa linker-UGI (see, e.g., Nishimasu 2018 Science 361 (6408): 1259-1262)), xBE3 (APOBEC1-16aa linker-xCas9 (D10A)-4aa linker-UGI (see, e.g., Hu 2018 Nature 556:57-63)), eA3A-BE3 (APOBEC3A (N37G)-16aa linker-Sp nCas9 (D10A)-4aa linker-UGI (see, e.g., Gehrke 2018 Nat. Biotechnol. 36 (10): 977-982)), A3A-BE3 (hAPOBEC3A-16aa linker-Sp nCas9 (D10A)-4aa linker-UGI (see, e.g., Wang 2018 Nat. Biotechnol. 36:946-949)), eA3A-HF1-BE3-2xUGI (APOBEC3A-HF1 Sp nCas9-UGI-UGI), eA3A-HypaBE3-2xUGI (APOBEC3A-Hypa Sp nCas9-UGI-UGI), hA3A-BE3 (hAPOBEC3A-Sp nCas9-UGI), hA3B-BE3 (hAPOBEC3B-Sp nCas9-UGI), hA3G-BE3 (hAPOBEC3G-Sp nCas9-UGI), hAID-BE3 (hAPOBEC3A-Sp nCas9-UGI), SaCas9-BE3 (rAPOBEC1-SanCas9-UGI), xCas9-BE3 (rAPOBEC1-xnCas9-UGI), ScCas9-BE3 (rAPOBEC1-ScnCas9-UGI), SniperCas9-BE3 (rAPOBEC1-SnipernCas9-UGI), iSpyMac-BE3 (rAPOBEC1-iSpyMacnCas9-UGI), CRISPR-X (Sp dCas9-MS2-hAID), TAM (Sp dCas9-hAID (P182X)), AncBE4-Max (rAPOBEC1-Sp nCas9-UGI-UGI), ABE7.8/9/10 (ecTadA-ecTadA*-Sp nCas9), xCas9-ABE7.10 (ecTadA-ecTadA*-nxCas9), VQR-ABE (ecTadA-ecTadA*-Sp VQR nCas9), Sa (KKH)-ABE ecTadA-ecTadA*-Sa KKH nCas9), ABEmax (ecTadA-ecTadA*-Sp nCas9), ABE7.10max (ecTadA-ecTadA*-SpnCas9), ABE8e) ecTadA-ecTadA*-SpnCas9), ABE8e-V106W, PE1 (dSpCas9-MMLV-RT), PE2 (dSpCas9-MMLV-RT), PE3 (nSpCas9-MMLV-RT), and BE-PLUS (10X GCN4-Sp nCas9 (D10A)/ScFv-rAPOBEC1-UGI (see, e.g., Jiang 2018 Cell Res. 28 (8): 855-861)). For additional examples of BE complexes, including adenine deaminase base editors, see, e.g., Rees 2018 Nat. Rev Genet. 19 (12): 770-788 and/or Kantor 2020 Int. J. Mol. Sci. 21 (17): 6240.

[0200] Various base editors are “dual base editors” that can edit both adenine and cytosine. Dual base editor enzymes can be fusion polypeptides that include a cytosine deaminase domain and an adenine deaminase domain. For instance, a dual base editor known as Target-ACEmax includes a codon-optimized fusion of the cytosine deaminase PmCDA1, the adenosine deaminase TadA, and a Cas9 nickase (Target-ACEmax) (see, e.g., Sakata 2020 Nature Biotechnology, 38 (7), 865-869). Other exemplary dual base editors include SPACE (synchronous programmable adenine and cytosine editor). The SPACE editing enzyme is a fusion polypeptide that includes both miniABEmax-V82G and Target-AID editing domains together with a Cas9 (SpCas9-D10A) nickase domain (see, e.g., Grünewald 2020 Nat. Biotechnol. 38:861-864). A dual base editor known as A&C-BEmax includes a fusion of both cytidine and adenosine deaminase domains with a Cas9 nickase domain (see, e.g., Zhang 2020 Nat. Biotechnol. 38:856-860).

[0201] A base editing system can include a guide RNA (gRNA) that includes at least a fragment that base pairs with a complementary target nucleic acid (e.g., at least 80% identity between the fragment and the complement of the target nucleic acid, e.g., 80%, 85%, 90%, 91%, 92%, 93%, 94%, 95%, 96%, 97%, 98%, 99%, or 100% identity), wherein the fragment can be 10 to 40 nucleotides in length (e.g., equal to or about 10, 15, 16, 17, 18, 19, 20, 21, 22, 23, 24, 25, 30, 35 or 40 nucleotides in length, e.g., 17-24 or 17-20 nucleotides in length), e.g., where the target sequence is upstream of an appropriate PAM site. In various embodiments, a fragment of a gRNA that is complementary to a target nucleic acid sequence is positioned at the 5′ end of a gRNA or is 5′ relative to one or more other fragments of the gRNA. In various embodiments, a gRNA includes a sequence that forms a stemloop structure and binds with and/or recruits the catalytically impaired nuclease domain of a base editing enzyme. A gRNA that includes both a fragment that base pairs with a complementary target nucleic acid sequence and a fragment that forms a stemloop structure and binds with and/or recruits the catalytically impaired nuclease domain of a base editing enzyme can be referred to as a single guide RNA (sgRNA). The fragments of sgRNA can be associated via a linker fragment.

[0202] A guide RNA (e.g., an sgRNA) is thought to randomly interrogate nucleic acids until it encounters a nucleic acid that is sufficiently complementary to the 5′ fragment. Upon binding of a gRNA to a DNA nucleic acid target present in double-stranded DNA, base pairing between the gRNA and target nucleic acid strand causes displacement of a small segment of single-stranded DNA. In various embodiments, the gRNA recruits the catalytically impaired nuclease domain. Nucleotides of the displaced single-stranded DNA can be modified by the deaminase enzyme. The resultant base pair can then be repaired by cellular mismatch repair machinery to a new base pair, or alternatively in some instances reverted by base excision repair mediated by uracil glycosylase. In various embodiments, a glycosylase inhibitor (e.g., UGI) reduces the occurrence of reversion.

[0203] The present disclosure includes base editing enzymes and systems engineered to increase the editing window of base editing. For example, the present disclosure includes circularly permuted base editors, described for example in Huang 2020 Nature Biotechnology, 37 (6), 626-631, which is incorporated herein with respect to base editing enzymes, base editing systems, and editing windows thereof. Circularly permuted base editing enzymes and systems can be characterized by an increased range of target bases that can be modified within the protospacer up to and including, for example, at least 5, 6, 7, 8, or 9 nucleotides. For example, certain base editing systems including Cas9 variants, including cytosine and four adenine base editing enzymes, can deaminated nucleotides in a window expanded from about 4-5 nucleotides to up about 8-9 nucleotides, optionally with reduced byproduct formation.

[0204] Base editing enzymes and systems can also target and/or modify RNA molecules. One advantage of using RNA editing systems is that there is no permanent change in the genome. RNA base editors achieve analogous changes using components that base modify RNA. For example, adenosine deaminase can modify transcribed mRNA, replacing adenosine with inosine at a target site. In mammals, the most prevalent post-transcription RNA editing case is catalyzed by the adenosine deaminase enzymes (ADARs). ADAR proteins are a highly conserved family of proteins that include a single deaminase domain (DD) and one or more double-stranded RNA (dsRNA)-binding domains ADARs (e.g., ADAR 1 or ADAR2) bind to dsRNA and catalyzes adenosine to inosine (A-to-I), which is read as guanosine by cellular translational machinery. ADAR1 and ADAR2 domains have been demonstrated to achieve RNA editing, e.g., in HSCs (see, e.g., Harter 2009 Nat. Immunol. 10 (1): 109-115). A number of catalytically inactive Cas proteins have also been used to target RNA molecules, including Cas9, Cas13a, Cas13b, and Cas13d.

[0205] REPAIR (RNA editing for programmable adenosine to inosine replacement) is an RNA base editing system that includes catalytically inactive Cas13 protein and the deaminase activity of ADAR2. Cas13 generally includes two HEPN (higher eukaryotes and prokaryotes nucleotide-binding) domains, which contribute to RNA-targeted nucleolytic activity. Mutations of HEPNs abolish RNA cleavage activity while maintaining RNA targeting activity, which has been used to create an RNA base editing enzyme (e.g., REPAIR) (see, e.g., Cox 2017 Science 358:1019-1027). dCas13-ADAR2pp includes catalytically inactive dCas13 variant with RNA deaminase ADAR2 (E488Q), and can execute RNA editing for programmable A-to-I (G) replacement. RNA Editing for Specific C-to-U Exchange (RESCUE) was later developed (see, e.g., Abudayyeh 2019 Science 365:382-386). gRNAs for mRNA editing can include, e.g., a fragment complementary to a target RNA and an ADAR-recruiting fragment, such that site-directed RNA editing is achieved by recruiting ADAR to a complementary target nucleic acid. RNA-guided RNA-targeting CRISPR nuclease C2C2 (later named as Cas13a) from Leptotrichia shahii was illustrated (Abudayyeh 2016 Science 353: aaf5573).

[0206] Other examples of RNA editing systems that include ADARs can include removing the endogenous RNA-targeting domains (dsRBMS) from human adenosine deaminase and replacing them with an antisense RNA oligonucleotide to produce a recombinant enzyme that can be directed to edit a selected RNA target. In particular embodiments, an ADAR2 deaminase domain is fused with an RNA-binding protein, and the sequence bound by the RNA-binding protein is associated with an antisense RNA guide oligonucleotide. In various embodiments, the RNA-binding protein is derived from λ-phage N protein-boxB RNA interaction, which normally regulates antitermination during transcription of λ-phage mRNAs. AN peptide mediates binding of the N protein, is only 22 amino acids long, and the boxB RNA hairpin that it recognizes is only 17 nucleotides long and they can bind with nanomolar affinity. Thus, in various embodiments, AN peptide can be fused to the deaminase domain of human ADAR2 (λN-DD). In various embodiments, a mutant ADAR2DD (E488Q) can be used as the deaminase domain. In various embodiments, an editing enzyme can include an ADAR deaminase domain and 2 or more AN domains (e.g., 2, 3, 4, 5, or 6 λN domains). Examples of such editing enzymes and systems are described, e.g., in Montiel-Gonzalez 2013 PNAS 110 (45): 18285-18290 and Montiel-Gonzalez 2016 Nuc. Acids. Res. 44 (2): e157, each of which is incorporated herein by reference with respect to editing systems.

[0207] Other examples of editing systems that include ADARs can include leveraging endogenous ADAR for programmable editing of RNA (LEAPER) editing system that employs short engineered ADAR-recruiting RNAs (arRNAs) to recruit native ADAR1 or ADAR2 deaminase enzymes to change a specific adenosine to inosine. For example, in certain particular embodiments, an ADAR protein or its catalytic domain can be fused with a AN peptide. In certain embodiments, an ADAR protein or its catalytic domain can be fused with a AN peptide and a SNAP-tag or a Cas protein (e.g., dCas13b). A gRNA can recruit the editing enzyme to the specific site. Further description of LEAPER editing systems can be found in Qu 2019 Nat. Biotech. 1059-1069, which is incorporated herein by reference with respect to LEAPER editing systems and

[0208] Base editing systems can cause point mutations without producing double-strand breaks. Base editing systems can cause point mutations without producing undesired insertions and deletions (indels). For example, a base editing system can cause indels in less than 10%, 9%, 8%, 7%, 6%, 5.5%, 5%, 4.5%, 4%, 3.5%, 3%, 2.5%, 2%, 1.5%, 1%, 0.5%, or 0.1% of edited cells or editing events.

[0209] Those of skill in the art will appreciate that a base editing gRNA (e.g., sgRNA) or other targeting elements to generate a selected nucleic acid sequence modification in a target nucleic acid can be readily designed and implemented, e.g., based on available sequence information.

[0210] In various embodiments, base editing system can be used for editing of MGMT-encoding nucleic acids to produce a modified MGMT-encoding nucleic acid that encodes an inhibitor-resistant MGMT polypeptide. In some embodiments, base editing systems can be used to produce a modified MGMT-encoding nucleic acid that encodes an inhibitor-resistant MGMT polypeptide that includes at least one amino acid mutation selected from L33F, L33P, M134V, R135G, R135K, R135T, N137D, P140F, G156P, S159F, S159P, S159W, G160E, G160K, and G160P. In some embodiments, base editing systems can be used to produce a modified MGMT-encoding nucleic acid that encodes an inhibitor-resistant MGMT polypeptide that includes at least one amino acid mutation selected from P140R, G156A, Y158H, and G160A. The present disclosure includes base editing systems that include a plurality of sgRNAs (e.g., two or more, e.g., two, three, four, or five) sgRNAs. In certain embodiments, two or more sgRNAs are used to target multiple sequences of a single nucleic acid to produce an inhibitor-resistant MGMT mutation (e.g., an inhibitor-resistant MGMT mutation of Table 1 or Table 2). For instance, in some embodiments, an inhibitor-resistant MGMT mutation includes two or more sequence modifications at positions that are separated by a plurality of nucleotides of genomic DNA (e.g., 10, 20, 30, 40, 50, 60, 70, 80, 90, 100, or more nucleotides of genomic DNA). In certain such instances, a first sgRNA can target a base editing enzyme to a first target sequence of a nucleic acid for a first modification and a second (or further subsequent) sgRNA can target the base editing enzyme to a second target sequence of the nucleic acid for the second (or further subsequent) modification(s), which modifications together produce the inhibitor-resistant MGMT mutation and/or produce a modified nucleic acid encoding an inhibitor-resistant MGMT polypeptide. Exemplary of certain such inhibitor-resistant MGMT mutations are inhibitor-resistant MGMT mutations that include modification of codons encoding each of amino acid 138, amino acid 139, and amino acid 140 of MGMT.

[0211] Base editing systems do not require double-stranded DNA breaks. Base editing systems do not require a donor fragment or template. Base editing systems provide precise control of the site at which the editing system modifies a target nucleic acid. Base editing systems can be multiplexed to achieve editing of multiple targets using a single editing enzyme, optionally including therapeutic targets.

### Prime Editing Enzymes and Systems for Modification of Nucleic Acids Encoding MGMT

[0212] The present disclosure includes editing systems that utilize a reverse transcriptase (e.g., a prime editing system) for editing of nucleic acid targets, including in various embodiments modification an MGMT-encoding nucleic acid to produce a nucleic acid encoding inhibitor-resistant MGMT. In various embodiments, an editing agent includes an editing enzyme that includes a reverse transcriptase domain. A reverse transcriptase is an enzyme that can synthesize a DNA molecule from an RNA template. A reverse transcriptase generally produces a DNA molecule that is complementary to the RNA template.

[0213] In particular embodiments, an editing enzyme includes an AMV reverse transcriptase, MLV reverse transcriptase, HIV-1 reverse transcriptase, or bacterial reverse transcriptase. Certain embodiments utilize an MLV reverse transcriptase domain. Reverse transcriptases of the present disclosure can have wild type amino acid sequences or engineered amino acid sequences.

[0214] Examples of reverse transcriptase enzymes include AMV reverse transcriptases (e.g., wild type AMV reverse transcriptase (RNase H plus activity), eAMV™ (engineered; RNase Hplus activity) or ThermoScript™ (engineered; reduce RNAase H activity)), MLV reverse transcriptases (e.g., wild type M-MLV reverse transcriptase, GoScript™, or MultiScribe™ (RNase H plus activity), AccuScript Hi-Fi (engineered, RNase H minus (3′-5′ exonuclease activity), Affinity Script (engineered; E69K/E302R/W313F/L435G/N454K; unspecified RNase H activity), ArrayScript™ (engineered; unspecified RNase H activity), BioScript™ (engineered; reduced RNase H activity), CycleScript™ (engineered), EnzScript™ (engineered; RNase H minus), EpiScript™ (engineered; RNase H minus), Expand™ reverse transcriptase (engineered; RNase H reduced), FIREScript (engineered; RNase H plus), GrandScript (engineered; RNase H plus), iScript™ (engineered; RNase H plus), Maxima™ RT (engineered; RNase H plus and minus), MonsterScript™ (engineered; RNase H minus), PrimeScript™ (engineered; RNase H minus), PrimeScript™ II (engineered; RNase H minus), PrimeScript™ III (engineered; RNase H minus), PrimeScript™ IV (engineered: RNase H minus), ProtoScript® (Engineered; RNase H plus), ProtoScript® II (engineered; RNase H reduced), qScript (engineered; RNase H plus), RevertAid™ (engineered; RNase H plus and minus), ReverTra Ace® (engineered; RNase H minus), RevertUp II™ (engineered; RNase H minus), Rocketscript™ (engineered; RNase H plus and minus), Script (engineered; RNase H minus), SMART® (engineered), SMARTScribe™ (engineered; unspecified RNase H activity), SuperScript™ II (engineered; 524G/D583N/E562Q; RNase H reduced), SuperScript™ III (engineered; 204R/V223H/T306K/F309N/D524G/D583N/E562Q; RNase H reduced), SuperScript™ IV (engineered; RNase H reduced), or Transcriptor reverse transcriptase (engineered; RNase H plus)), an HIV-1 reverse transcriptase (e.g., HIV-1 RT (wild type of group M subtype B; RNase H plus), Biotools high retrotranscriptase (engineered group O variant (K65R/V751); RNase H plus), or Sunscript® (engineered group O variants with changes K358R/A359G/S360A; RNase H plus and minus)), a bacterial group II intron reverse transcriptase (e.g., Marathon RT (wild type (Eubacterium rectale); lacks RNase H domain) or TGIRT®-III RT (wild type (Geobacillus stearothermophilus); lacks RNase H domain), a bacterial DNA polymerase (e.g., BcaBEST polymerase (engineered (Bacillus caldotenax DNA polymerase without 5′-3′ and 3′-5′ exonuclease activity); lacks RNase H domain), Bst 3.0 DNA polymerase (G. stearothermophilus DNA polymerase I, large fragment; lacks 5′-3′ and 3′-5′ exonuclease activity; lacks RNase H domain), RapiDxFire™ reverse transcriptase (lacks RNase H domain), Volcano2G DNA polymerase (engineered Thermus aquaticus DNA polymerase; lacks RNase H domain), or Volcano3G DNA polymerase (engineered T. aquaticus DNA polymerase; lacks RNase H domain)), SOLIScript (engineered; RNase H reduced), Omniscript® (heterodimeric RT; RNase H plus), and SensiScript® (heterodimeric RT; RNase H plus).

[0215] In various embodiments, a reverse transcriptase is a retrovirus reverse transcriptase. In various embodiments, a reverse transcriptase is a murine leukemia virus (MLV) reverse transcriptase (RT) (e.g., an engineered MLV RT). In various embodiments, a reverse transcriptase is a bacterial group II intron RT.

[0216] In various embodiments, an editing enzyme or system includes a reverse transcriptase associated with a DNA binding domain such as a catalytically impaired nuclease domain. In various embodiments, the DNA binding domain can localize the reverse transcriptase to a target nucleic acid in which one or more nucleotides are substituted, inserted, and/or deleted.

[0217] Prime editing enzymes and systems are exemplary of editing enzymes and systems that include reverse transcriptase. A prime editing enzyme includes a reverse transcriptase fused to a DNA binding domain that is a catalytically impaired nuclease domain (e.g., a nickase, e.g., a nickase that nicks a single strand, e.g., a non-edited strand). DNA binding domains of prime editing enzymes can be RNA guided DNA binding domains, in that an RNA guide can direct the DNA binding domain to a target nucleic acid sequence. Catalytically impaired nuclease domains of a prime editing enzyme can bind nucleic acids and can localize the reverse transcriptase enzyme to a target nucleic acid in which one or more nucleotides are substituted, inserted, and/or deleted by the prime editing system.

[0218] Any nuclease of the CRISPR system can be engineered to produce a catalytically impaired nuclease domain (e.g., a nickase) and used within a prime editing enzyme or system. Exemplary Cas nucleases include Cas1, Cas1B, Cas2, Cas3, Cas4, Cas5, Cas6, Cas7, Cas8, Cas9 (also known as Csn1 or Csx12), Cas10, Cas12, CasX, CasY, C2c3, C2c2 and C2c1, Csy1, Csy2, Csy3, Cse1, Cse2, Csc1, Csc2, Csa5, Csn2, Csm2, Csm3, Csm4, Csm5, Csm6, Cmr1, Cmr3, Cmr4, Cmr5, Cmr6, Cpf1, Csb1, Csb2, Csb3, Csx17, Csx14, Csx10, Csx16, CsaX, Csx3, Csx1, Csx15, Csf1, Csf2, Csf3, Csf4, and variants thereof. Numerous forms and variants of Cas nucleases are known in the art (e.g., spCas9, dCas9, nCas9, Cas9-SpRY, and Cas12a) and can have distinct characteristics, including for example recognition of distinct PAMs and PAM positions.

[0219] Other DNA binding nucleases can also be used in a prime editing enzyme. For example, prime editing systems can utilize zinc finger nucleases (ZFNs) (see, e.g., Urnov 2010 Nat Rev Genet. 11 (9): 636-46) and transcription activator like effector nucleases (TALENs) (see, e.g., Joung 2013 Nat Rev Mol Cell Biol. 14 (1): 49-55). For additional information regarding DNA-binding nucleases, see, e.g., US 2018/0312825.

[0220] In various embodiments, a prime editing system includes a prime editing gRNA (pegRNA) that specifies a target nucleic acid sequence and also specifies the sequence modification that the prime editing system introduces. The pegRNA includes a sequence complimentary to the target nucleic acid and recruits the prime editing enzyme to the target nucleic acid. A pegRNA includes, from 5′ to 3′: (a) a fragment that base pairs with a complementary target nucleic acid sequence (e.g., at least 80% identity between the fragment and the complement of the target nucleic acid, e.g., 80%, 85%, 90%, 91%, 92%, 93%, 94%, 95%, 96%, 97%, 98%, 99%, or 100% identity) (sometimes referred to as a “spacer”), wherein the fragment can be 10 to 40 nucleotides in length (e.g., equal to or about 10, 15, 16, 17, 18, 19, 20, 21, 22, 23, 24, 25, 30, 35 or 40 nucleotides in length, e.g., 17-24 or 17-20 nucleotides in length); (b) a sequence that forms a stemloop structure and binds with and/or recruits the catalytically impaired nuclease domain of a prime editing enzyme; (c) a fragment that includes a sequence that includes one or more modifications (e.g., one or more substitutions, insertions, and/or deletions) relative to the target nucleic acid sequence (sometimes referred to as a “template sequence”), and is complementary (excepting modifications) to the same target nucleic acid strand as (d); and (d) a fragment that includes a sequence complimentary to a target sequence (sometimes referred to as a “binding region” or “primer binding site” (PBS)), e.g., where the target sequence is upstream of an appropriate PAM site. In various embodiments, a PBS can be 5 to 20 nucleotides, e.g., 8 to 15 nucleotides in length. In various embodiments, a template sequence can be 10 to 20 nucleotides in length, or longer. Because pegRNAs include components characteristic of sgRNAs, they are sometimes described as extended sgRNAs. Any two fragments of a pegRNA can be, independently, associated directly or via a linker fragment.

[0221] A catalytically impaired nuclease domain of a prime editing enzyme can nick a target nucleic acid that includes an appropriate PAM to expose a 3′ flap and a 5′ flap. After nicking of the target nucleic acid, the released 3′ flap can hybridize to the PBS of the pegRNA, priming reverse transcription of the template fragment of the pegRNA that includes a modification of the target sequence, directly introducing the modification into the target nucleic acid to the 3′ flap. The product of reverse transcription, an edited 3′ flap that is “redundant” with the 5′ flap sequence produced by the nick (which includes the original, unedited sequence of the target nucleic acid), can then compete with the original and redundant 5′ flap sequence for reincorporation into the DNA duplex. Although the perfectly complimentary 5′ would likely be thermodynamically favored for hybridization to the non-edited strand, the 5′ flap is preferentially degraded by cellular endonucleases that are ubiquitous during lagging-strand DNA synthesis. After 5′ flap excision and ligation of the edited strand, permanent installation of the edit occurs through DNA repair of the non-edited that relies on the editing strand as a template. DNA repair of the non-edited strand can be promoted by contact with a secondary sgRNA that directs nicking of the non-edited strand. This additional nick stimulates re-synthesis of the non-edited strand using the edited strand as a template, resulting in a fully edited duplex. Prime editing systems can introduce any of one or more of the 12 types of point mutations (all possible nucleotide transitions and transversions), as well as insertions and/or deletions.

[0222] In various embodiments, a prime editing system is engineered to disrupt a PAM site of a target nucleic acid. Disruption of a PAM site of a target nucleic acid can reduce the probability of repeated editing of the particular target nucleic acid. In various embodiments, disruption of a PAM site in edited target nucleic acids can increase the efficiency of prime editing and/or gene therapy that includes prime editing.

[0223] Exemplary prime editing systems include PE1, PE2, and PE3. Each of these prime editing enzymes include a mutant Streptococcus pyogenes Cas9 nickase domain (H840A mutant) and a Moloney murine leukemia virus (M-MLV) reverse transcriptase (e.g., engineered to include D200N/T306K/W313F/T330P/L603W). PE1 includes a pegRNA and a prime editing enzyme that includes a Cas9 H840A nickase and wild type MLV RT. The Cas9 nickase acts only on the strand to be edited by the RT. PE2 includes pegRNA and a prime editing enzyme that includes a Cas9 H840A nickase and engineered MLV RT (D200N/T306K/W313F/T330P/L603W) demonstrated to improve editing efficiency. PE3 includes the same prime editing enzyme as PE2 (as well as a pegRNA) but further includes an sgRNA that targets the non-edited strand for nicking 14-116 nucleotides away from the site of the pegRNA-induced nick (PE3), where cellular mismatch repair pathways can fix the information introduced in the edited strand. Compared with PE2, the PE3b strategy demonstrate increased editing efficiency and lower levels of indel formation. A variant of the PE3 system called PE3b uses a nicking sgRNA that targets only the edited sequence, resulting in decreased levels of indel products by preventing nicking of the non-edited DNA strand until the other strand has been converted to the edited sequence.

[0224] Those of skill in the art will appreciate that a pegRNA or other targeting elements to generate a selected nucleic acid sequence modification in a target nucleic acid can be readily designed and implemented, e.g., based on available sequence information. Various tools for designing pegRNAs are available. For example, pegFinder is a web-based tool for pegRNA design (see, e.g., Chow 2020 Nat. Biomed. Eng. doi: 10.1038/s41551-020-00622-8). Another example of a web-based tool for pegRNA design is PrimeDesign (see, e.g., Hsu 2020 bioRxiv doi: 10.1101/2020.05.04.077750).

[0225] In various embodiments, prime editing systems can be used for editing of MGMT-encoding nucleic acids to produce a modified MGMT-encoding nucleic acid that encodes an inhibitor-resistant MGMT polypeptide. In some embodiments, prime editing systems can be used to produce a modified MGMT-encoding nucleic acid that encodes an inhibitor-resistant MGMT polypeptide that includes at least one amino acid mutation selected from L33F, L33K, L33P, L33R, L33W, L33Y, M134F, M134V, M134W, M134Y, R135G, R135K, R135L, R135T, N137D, N137F, N137P, P138K, P140E, P140F, P140H, G156I, G156P, G156V, Y158M, Y158W, S159F, S159I, S159L, S159P, S159T, S159W, S159Y, G160D, G160E, G160H, G160K, and G160P. In some embodiments, prime editing systems can be used to produce a modified MGMT-encoding nucleic acid that encodes an inhibitor-resistant MGMT polypeptide that includes at least one amino acid mutation selected from L33K, L33R, L33W, L33Y, M134F, M134W, M134Y, R135L, N137F, N137P, P138K, P140E, P140H, G156I, G156V, Y158M, Y158W, S159I, S159L, S159T, S159Y, G160D, and G160H. In some embodiments, prime editing systems can be used to produce a modified MGMT-encoding nucleic acid that encodes an inhibitor-resistant MGMT polypeptide that includes at least one amino acid mutation selected from P140R, P140Q, G156A, Y158F, Y158H, G160A, G160S, and A170S. In some embodiments, prime editing systems can be used to produce a modified MGMT-encoding nucleic acid that encodes an inhibitor-resistant MGMT polypeptide that includes the amino acid mutation P140K.

[0226] The present disclosure includes that a prime editing system can include a plurality of pegRNAs (e.g., two or more, e.g., two, three, four, or five pegRNAs). In certain embodiments, two or more pegRNAs are used to target multiple sequences of a single nucleic acid to produce an inhibitor-resistant MGMT mutation (e.g., an inhibitor-resistant MGMT mutation of Table 1 or Table 2). For instance, in some embodiments, an inhibitor-resistant MGMT mutation includes two or more sequence modifications at positions that are separated by a plurality of nucleotides of genomic DNA (e.g., 10, 20, 30, 40, 50, 60, 70, 80, 90, 100, or more nucleotides of genomic DNA). In certain such instances, a first pegRNA can target a prime editing enzyme to a first target sequence of a nucleic acid for a first modification and a second (or further subsequent) pegRNA can target the prime editing enzyme to a second target sequence of the nucleic acid for the second (or further subsequent) modification(s), which modifications together produce the inhibitor-resistant MGMT mutation and/or produce a modified nucleic acid encoding an inhibitor-resistant MGMT polypeptide. Exemplary of certain such inhibitor-resistant MGMT mutations are inhibitor-resistant MGMT mutations that include modification of codons encoding each of amino acid 138, amino acid 139, and amino acid 140 of MGMT.

[0227] Prime editing systems do not require double-stranded DNA breaks. Prime editing systems provide precise control of the site at which the editing system modifies a target nucleic acid. Prime editing systems can be multiplexed to achieve editing of multiple targets using a single editing enzyme, optionally including therapeutic targets.

### CRISPR Enzymes and Systems for Modification of Nucleic Acids Encoding MGMT

[0228] The present disclosure includes CRISPR editing systems for editing of nucleic acid targets, including in various embodiments modification an MGMT-encoding nucleic acid to produce a nucleic acid encoding inhibitor-resistant MGMT. In various embodiments, an editing agent includes an editing enzyme that is an endonuclease. CRISPR (Clustered Regularly Interspaced Short Palindromic Repeats) enzymes and systems are exemplary of editing enzymes and systems that include an endonuclease. CRISPR editing systems include an engineered endonuclease (e.g., engineered Cas (CRISPR-associated) endonuclease) and are based, in part, on discoveries relating to immune responses of bacteria and archaea. When a virus or plasmid invades a bacterium, segments of the invader's DNA are converted into CRISPR RNAs (crRNA) by the bacteria's “immune” response. The crRNA then associates, through a region of partial complementarity, with another type of RNA called tracrRNA to guide a Cas nuclease to a region homologous to the crRNA in the target DNA called a “protospacer.” The Cas nuclease cleaves the DNA to generate blunt ends at the double-strand break at sites specified by a complementary sequence contained within the crRNA transcript.

[0229] Endonuclease domains of CRISPR editing enzymes can e RNA guided DNA binding domains, in that an RNA guide can direct the DNA binding domain to a target nucleic acid sequence. An endonuclease associated with an sgRNA can randomly interrogate DNA in a cell until contacting a nucleic acid including an appropriate protospacer adjacent motif (PAM) (e.g., in proximity to a target sequence). Upon recognition of the PAM sequence, the endonuclease unwinds the DNA, allowing the associated sgRNA to contact and/or hybridize with the exposed DNA strand (the protospacer). If the DNA sequence matches the sgRNA target sequence, the endonuclease catalytic domains (e.g., HNH and RuvC) can cleave both strands of the target DNA, generating a double-strand break, which can be repaired by NHEJ or HDR mechanisms.

[0230] Exemplary Cas nucleases include Cas1, Cas1B, Cas2, Cas3, Cas4, Cas5, Cas6, Cas7, Cas8, Cas9 (also known as Csn1 and Csx12), Cas10, Cas12, CasX, CasY, C2c3, C2c2 and C2c1, Csy1, Csy2, Csy3, Cse1, Cse2, Csc1, Csc2, Csa5, Csn2, Csm2, Csm3, Csm4, Csm5, Csm6, Cmr1, Cmr3, Cmr4, Cmr5, Cmr6, Cpf1, Csb1, Csb2, Csb3, Csx17, Csx14, Csx10, Csx16, CsaX, Csx3, Csx1, Csx15, Csf1, Csf2, Csf3, Csf4, and variants thereof. Cas endonucleases have been classified into at least three types (type I, type II, and type III), and at least 10 subtypes. Type II Cas nucleases include Cas1, Cas2, Csn2, and Cas9.

[0231] To provide one particular example, Cas9 refers to an RNA-guided double-stranded DNA-binding nuclease protein or nickase protein. Cas9 enzyme, in some embodiments, includes one or more catalytic domains of a Cas9 protein derived from bacteria such as Corynebacter, Sutterella, Legionella, Treponema, Filifactor, Eubacterium, Streptococcus, Lactobacillus, Mycoplasma, Bacteroides, Flaviivola, Flavobacterium, Sphaerochaeta, Azospirillum, Gluconacetobacter, Neisseria, Roseburia, Parvibaculum, Staphylococcus, Nitratifractor, and Campylobacter. Wild-type Cas9 nuclease has two functional domains, e.g., RuvC and HNH, that cut different DNA strands. Cas9 can induce double-strand breaks in genomic DNA (target DNA) when both functional domains are active. In some embodiments, the Cas9 is a fusion protein, e.g., a fusion of two nickases and/or where the two catalytic domains are derived from different bacterial species. In various embodiments, variants of the Cas9 nuclease include a single inactive catalytic domain, such as a RuvC or HNH enzyme or a nickase. A Cas9 nickase has only one active functional domain and, in some embodiments, cuts only one strand of the target DNA, thereby creating a single-strand break or nick. In some embodiments, the mutant Cas9 nuclease having at least a D10A mutation is a Cas9 nickase. In other embodiments, the mutant Cas9 nuclease having at least a H840A mutation is a Cas9 nickase. Other examples of mutations present in a Cas9 nickase include N854A and N863 A. A double-strand break is introduced using a Cas9 nickase if at least two DNA-targeting RNAs that target opposite DNA strands are used. A double-nicked induced double-strand break can be repaired by HDR.

[0232] A CRISPR editing system can include a gRNA that includes at least a fragment that base pairs with a complementary target nucleic acid (sometimes referred to as a crRNA) and a fragment that associates with an endonuclease (sometimes referred to as a tracrRNA). In particular embodiments, a gRNA including a fragment that base pairs with a complementary target nucleic acid and a fragment that associates with an endonuclease can be referred to as an sgRNA.

[0233] In various embodiments, a gRNA is expressed from a nucleic acid and is not modified after expression from the nucleic acid. In various embodiments, a gRNA can be modified. In particular embodiments, a gRNA can include one or more modifications (e.g., a base modification, a backbone modification). Modified backbones may include those that retain a phosphorus atom in the backbone and those that do not have a phosphorus atom in the backbone. Suitable modified backbones containing a phosphorus atom may include, for example, phosphorothioates, chiral phosphorothioates, phosphorodithioates, phosphotriesters, aminoalkylphosphotriesters, methyl and other alkyl phosphonates such as 3′-alkylene phosphonates, 5′-alkylene phosphonates, chiral phosphonates, phosphinates, phosphoramidates including 3′-amino phosphoramidate and aminoalkylphosphoramidates, phosphorodiamidates, thionophosphoramidates, thionoalkylphosphonates, thionoalkylphosphotriesters, selenophosphates, and boranophosphates having normal 3′-5′ linkages, 2′-5′ linked analogs, and those having inverted polarity wherein one or more internucleotide linkages is a 3′ to 3′, a 5′ to 5′ or a 2′ to 2′ linkage. Suitable targeting elements having inverted polarity can include a single 3′ to 3′ linkage at the 3′-most internucleotide linkage (i.e. a single inverted nucleoside residue in which the nucleobase is missing or has a hydroxyl group in place thereof). Various salts (e.g., potassium chloride or sodium chloride), mixed salts, and free acid forms can also be included.

[0234] Those of skill in the art will appreciate that a CRISPR editing gRNA (e.g., sgRNA) or other targeting elements to generate a selected nucleic acid sequence modification in a target nucleic acid can be readily designed and implemented, e.g., based on available sequence information. Thus, a CRISPR/Cas system can be engineered to create a double-strand break at a desired target in a genome of a cell, and can harness the cell's endogenous mechanisms to repair the induced break by HDR.

[0235] In particular embodiments, a double-strand break can be repaired by homology-directed repair (HDR) when a donor template is present. The donor template can be used as a template by cellular (e.g., endogenous) repair enzymes, incorporating sequence based on the donor template into the nucleic acid being repaired. The donor template can be a foreign nucleic acid such as a nucleic acid introduced in conjunction with delivery of an editing system of the present disclosure. A donor template can be used to introduce small changes (e.g., a mutation of one or a few nucleotides) or larger modifications (e.g., addition to the repaired nucleic acid of an entire transgene).

[0236] CRISPR editing is among the editing systems and methods that can be advantageously applied for editing of endogenous nucleic acids of target cells as set forth in the present disclosure. Like other editing systems disclosed herein, CRISPR permits rapid, efficient, and robust editing of nucleic acid targets.

### Zinc Finger Nucleases for Modification of Nucleic Acids Encoding MGMT

[0237] The present disclosure includes Zinc Finger Nuclease editing systems for editing of nucleic acid targets, including in various embodiments modification an MGMT-encoding nucleic acid to produce a nucleic acid encoding inhibitor-resistant MGMT. Zinc finger nucleases (ZFNs) are artificial restriction enzymes made by associating a sequence-targeted zinc-finger DNA-binding units with a nuclease domain (e.g., Fok1 nuclease domain) in a fusion protein. Each ZFN includes a nuclease domain (e.g., the cleavage domain of FokI) linked to an array of three to six zinc fingers zinc fingers (ZFs). For example, a ZFN can include several CyszHisz ZFs in which each unit includes about 30 amino acids and specifically binds about 3 nucleotides. The ZFs provide a ZFN with the ability to bind a particular nucleic acid sequence. Because the FokI cleavage domain must dimerize to cut DNA, a monomer is not active, and cleavage does not occur at single binding sites. Thus, for example, ZFNs including three ZFs that together bind a 9-bp target function as ZFN dimers that specifically bind 18 bp of DNA per cleavage site. In some embodiments, ZFNs can include up to six ZFs per ZFN.

[0238] Cleave of a target nucleic acid by ZFNs induces cellular repair processes that can mediate modification of the nucleic acid. ZFN-induced double-strand breaks can lead to both targeted modification and targeted gene replacement. For example, if a ZFN-induced cleavage is resolved by non-homologous end joining, this can result in small deletions or insertions, which can lead to gene knockout. If a ZFN-induced cleavage is resolved by a homology-based process in the presence of a provided donor nucleic acid, small changes (e.g., one or a few nucleotides) or more (e.g., up to and including entire transgenes) can be introduced into the target nucleic acid.

### TALENs for Modification of Nucleic Acids Encoding MGMT

[0239] The present disclosure includes Transcription Activator-Like Effector Nuclease (TALEN) editing systems for editing of nucleic acid targets, including in various embodiments modification an MGMT-encoding nucleic acid to produce a nucleic acid encoding inhibitor-resistant MGMT. Various editing enzymes and systems can include a transcription activator-like (TAL) effector DNA binding domain and an endonuclease enzyme. An editing enzyme including a TAL effector DNA binding domain and an endonuclease can be referred to as a TALEN.

[0240] TAL effector DNA binding domains includes a plurality of monomers, each of which monomers binds one nucleotide in the target nucleic acid sequence. Each monomer includes 34 amino acids. In each monomer, positions 12 and 13 (referred to as the repeat variable diresidue, RVD) are highly variable and contribute to specific recognition of different nucleotides. The final monomer of a TAL effector DNA binding domain, which binds the nucleotide at the 3′-end of the recognition site, can be only 20 amino acids in length and therefore is sometimes referred to as a half-repeat. RVD sequences can be degenerate, as certain RVD combinations can bind to two or more nucleotides, e.g., with distinct efficiency. For example, RVDs include Asn and Ile (NI), Asn and Gly (NG), Asn and Asn (NN), and His and Asp (HD), which bind A, T, G, and C nucleotides, respectively.

[0241] In various embodiments, a TAL effector DNA binding domain is isolated from Xanthomonas spp. In various embodiments, a TALEN includes an endonuclease domain (e.g., a FokI domain), e.g., C-terminal to the TAL effector DNA binding domain.

[0242] TALENs work as pairs, the two members having target binding site on opposite DNA strands of the target nucleic acid sequence, with the targets separated by a small fragment (e.g., 12-25 bp) that can be referred to as a spacer sequence. Once a pair of TALENs have bound their target sites, the endonuclease (e.g., FokI) domains dimerize and cause a double-strand break in a spacer sequence. Non-homologous end joining (NHEJ) to resolve a DSB directly ligates DNA from either side of the double-strand break where there is very little or no sequence overlap for annealing. This repair mechanism can cause indels (insertion or deletion), or chromosomal rearrangement, which can disrupt genes at that target nucleic acid sequence. Alternatively, DNA can be introduced into a genome through NHEJ in the presence of exogenous double-stranded DNA fragments. Homology directed repair can also introduce foreign DNA at the DSB as the transfected double-stranded sequences are used as templates for the repair enzymes

### Applications

[0243] In various embodiments, inhibitor-resistant MGMT sequences that include one or more mutations provided here can be used in cells. For example, in various embodiments, one or more cells can be engineered to include and/or express a nucleic acid sequence that encodes an inhibitor-resistant MGMT sequence that includes one or more mutations provided herein. As is discussed herein, certain such engineered cells can have a selective advantage in a cell population, tissue, organ, organism, or other system that also includes cells that do not include inhibitor-resistant, e.g., upon exposure to an MGMT inhibitor and/or an alkylating agent. The present disclosure therefore includes the production and use of such engineered cells, which production can be by any means known in the art and which use can be a use provided herein, e.g., for gene therapy. Production of engineered cells that include and/or express a nucleic acid sequence that encodes an inhibitor-resistant MGMT can be, for example, by transduction or transfection of cells with a nucleic acid that encodes and/or expresses inhibitor-resistant MGMT, or by editing of an endogenous MGMT-encoding nucleic acid sequence to produce a nucleic acid sequence that encodes inhibitor-resistant MGMT.

[0244] In vivo, in vitro, and or ex vivo modification of endogenous MGMT-encoding nucleic acids to encode an inhibitor-resistant MGMT can selectively protect MGMT-modified cells (i.e., cells including the modified nucleic acids) from a selection regimen including an MGMT inhibitor. In various embodiments, modified cells are selectively protected against the effects of MGMT inhibitors, and cells that do not encode and/or express inhibitor-resistant MGMT (“non-MGMT-modified cells” or “non-modified cells”) are vulnerable to the effects of MGMT inhibitors. In the presence of the selection regimen including an MGMT inhibitor, cells selectively protected by modification to encode an inhibitor-resistant MGMT can survive and/or proliferate at a greater rate and/or frequency than cells that are not selectively protected. For at least this reason, modification of endogenous MGMT-encoding nucleic acids as disclosed herein is useful in increasing the in vivo, in vitro, and or ex vivo prevalence of modified cells (e.g., therapeutic cells) as compared to non-modified cells, which in various embodiments can improve therapeutic efficacy.

### Nucleic Acids Encoding Editing Systems

[0245] In various embodiments, methods of the present disclosure that include modification of endogenous MGMT-encoding nucleic acids of target cells can include delivery to a subject, system, or cell of an editing system disclosed herein. In various embodiments, methods of the present disclosure that include modification of endogenous MGMT-encoding nucleic acids of target cells can include delivery to a subject, system, or cell of a nucleic acid encoding an editing system disclosed herein

[0246] The present disclosure includes compositions including a nucleic acid that encodes an editing system disclosed herein (which nucleic acid can be referred to as an “editing nucleic acid”). A nucleic acid encoding an editing system of the present disclosure can include one or more fragments each encoding one or more components of the editing system (and/or a fragment encoding the editing enzyme) operably linked with regulatory sequences such as a promoter. In various embodiments, with respect to a nucleic acid that encodes an editing system of the present disclosure, the one or more fragments of the nucleic acid that encode the one or more components of the editing system can be referred to as an “MGMT editing payload.” A nucleic acid encoding an editing system can further include a “therapeutic payload.” A therapeutic payload can refer to one or more fragments of a nucleic acid that encode one or more agents that cause, elicit, or contribute to a desired pharmacological and/or physiological effect (e.g., treatment of a disease, disorder, or condition) not achieved by modification of endogenous MGMT-encoding nucleic acids alone.

[0247] For avoidance of doubt, an editing nucleic acid of the present disclosure refers to any nucleic acid that encodes an editing system and can further include additional sequences including, for example, other payloads and/or functional sequences that do not perform or contribute to gene editing. Thus, to provide one example, an editing nucleic acid can refer to a viral vector genome that includes an MGMT editing payload.

[0248] In various embodiments, an MGMT editing payload is present in a nucleic acid that includes a therapeutic payload, where the therapeutic payload includes one or more components of an editing system that causes, elicits, or contributes to a desired pharmacological and/or physiological effect by editing a target nucleic acid sequence (a “therapeutic editing payload”).

[0249] At least in part because editing systems disclosed herein can be engineered to cause a wide variety of nucleic acid changes, editing systems disclosed herein are capable of treating a wide variety of genetic diseases, disorders, and conditions. To provide just one example, editing systems of the present disclosure can be used to treat a disease, disorder, or condition caused by a point mutation in the genomic DNA of a subject. Examples of diseases, disorders, and conditions that can result from point mutations include, without limitation cystic fibrosis, sickle cell anemia, phenylketonuria, and Tay-Sachs. Those of skill in the art will appreciate, however, that therapeutic editing payloads can have many other types of targets.

[0250] As further examples of therapeutic editing targets, various therapeutic editing systems can target one or more nucleic acid sequences to cause increased expression of a globin polypeptide. In some embodiments, a therapeutic gene editing payload encodes one or more components of a therapeutic gene editing system engineered to modify a nucleic acid sequence that encodes γ-globin, e.g., to increase expression of γ-globin. The main fetal form of hemoglobin, hemoglobin F (HbF) is formed by pairing of γ-globin polypeptide subunits with α-globin polypeptide subunits. Human fetal γ-globin genes (HBG1 and HBG2; two highly homologous genes produced by evolutionary duplication) are ordinarily silenced around birth, while expression of adult β-globin gene expression (HBB and HBD) increases. Mutations that cause or permit persistent expression of fetal γ-globin throughout life can ameliorate phenotypes of β-globin deficiencies. Thus, reactivation of fetal γ-globin genes can be therapeutically beneficial, particularly in subjects with β-globin deficiency. A variety of mutations that cause increased expression of γ-globin are known in the art (see, e.g., Wienert, Trends in Genetics 34 (12): 927-940, 2018, which is incorporated herein by reference in its entirety and with respect to mutations that increase expression of γ-globin). Certain such mutations are found in the HBG1 promoter or HBG2 promoter.

[0251] In various embodiments, a therapeutic gene editing system that is designed to increase expression of γ-globin targets an HBG1/2 promoter and is designed to increase expression of γ-globin coding by modification and/or inactivation of a BCL11A repressor protein binding site. In various embodiments, a therapeutic gene editing system that is designed to increase expression of γ-globin targets the erythroid bcl11a enhancer and is designed to increase expression of γ-globin by modification and/or inactivation of the erythroid bcl11a enhancer to reduce BCL11A repressor protein expression in erythroid cells. In various embodiments, a therapeutic gene editing system that is designed to increase expression of γ-globin is targeted to cause a loss of function mutation in the gene encoding BCL11A.

[0252] In various embodiments, an MGMT editing payload is present in a nucleic acid that includes a therapeutic editing payload, where the MGMT editing system and therapeutic editing system are “multiplexed” in that the MGMT editing system and therapeutic editing system include and/or utilize the same editing enzyme encoded by the same nucleic acid fragment. Thus, in various embodiments, a nucleic acid encoding editing systems for both MGMT editing and therapeutic editing can encode a single editing enzyme that participates in and/or causes both the MGMT editing and the therapeutic editing. To provide one example, in various multiplexed embodiments, (i) an MGMT editing payload encodes an MGMT editing system that includes a base editing enzyme and a base editing gRNA, (ii) a therapeutic editing payload encodes a therapeutic base editing gRNA, and (iii) the MGMT editing and the therapeutic editing utilize (and/or the MGMT editing system and therapeutic editing system include) the same base editing enzyme. To provide another example, in various multiplexed embodiments, (i) an MGMT editing payload encodes an MGMT editing system that includes a prime editing enzyme and a pegRNA, (ii) a therapeutic editing payload encodes a therapeutic pegRNA, and (iii) the MGMT editing and the therapeutic editing utilize (and/or the MGMT editing system and therapeutic editing system include) the same prime editing enzyme. In various embodiments, one or more components of a multiplexed system can be operably linked to distinct regulatory elements (e.g., distinct promoters), operably linked to a single regulatory element (e.g., a single promoter), or each operably linked to separate copies of the same regulatory element (e.g., separate copies of the same promoter).

[0253] The present disclosure includes embodiments in which an MGMT editing payload is present in a nucleic acid that includes a therapeutic editing payload, where the MGMT editing system and therapeutic editing system are not multiplexed, in that the MGMT editing system and therapeutic editing system do not include and/or utilize any of the same editing system components (i.e., have no shared components, e.g., no shared editing enzyme). Thus, for example, a nucleic acid of the present disclosure can include an MGMT editing payload that encodes a base editing system and a therapeutic editing payload that encodes a prime editing system. To provide another example, an editing nucleic acid of the present disclosure can include an MGMT editing payload that encodes a prime editing system and a therapeutic editing payload that encodes a base editing system.

[0254] In various embodiments, an MGMT editing payload is present in a nucleic acid that also includes a therapeutic payload that does not encode an editing system. In various embodiments, an MGMT editing payload is present in a nucleic acid that also includes a sequence encoding an expression product that is not a component of an editing system, optionally wherein the expression product is a therapeutic agent (such as a therapeutic polypeptide or therapeutic RNA). Exemplary expression products include proteins, including without limitation replacement therapy proteins for treatment of diseases or conditions characterized by low expression or activity of a biologically active protein as compared to a reference level. Exemplary expression products include antibodies, CARs, and TCRs. Exemplary expression products include small RNAs.

[0255] Particular examples of therapeutic genes and/or expression products include y-globin, Factor VIII, γC, JAK3, IL7RA, RAG1, RAG2, DCLRE1C, PRKDC, LIG4, NHEJ1, CD3D, CD3E, CD3Z, CD3G, PTPRC, ZAP70, LCK, AK2, ADA, PNP, WHN, CHD7, ORAI1, STIM1, CORO1A, CIITA, RFXANK, RFX5, RFXAP, RMRP, DKC1, TERT, TINF2, DCLRE1B, SLC46A1, a FANC family gene (e.g., FancA, FancB, FancC, FancD1 (BRCA2), FancD2, FancE, FancF, FancG, FancI, FancJ (BRIP1), FancL, FancM, FancN (PALB2), FancO (RAD51C), FancP (SLX4), FancQ (ERCC4), FancR (RAD51), FancS (BRCA1), FancT (UBE2T), FancU (XRCC2), FancV (MAD2L2), and FancW (RFWD3)), soluble CD40, CTLA, Fas L, an antibody (e.g., that specifically binds CD4, CD5, CD7, CD52, IL1, IL2, IL6, TNF, P53, PTPN22, or DRB1*1501/DQB1*0602), an antibody to TCR specifically present on autoreactive T cells, IL4, IL10, IL12, IL13, IL1Ra, sIL1RI, SIL1RII, STNFRI, STNFRII, globin family genes, WAS, phox, dystrophin, pyruvate kinase, CLN3, ABCD1, arylsulfatase A, SFTPB, SFTPC, NLX2.1, ABCA3, GATA1, ribosomal protein genes, TERT, TERC, DKC1, TINF2, CFTR, LRRK2, PARK2, PARK7, PINK1, SNCA, PSEN1, PSEN2, APP, SOD1, TDP43, FUS, ubiquilin 2, C9ORF72, and other therapeutic genes and/or expression products described herein.

[0256] A therapeutic gene and/or expression product can be selected to provide a therapeutically effective response against diseases related to red blood cells and clotting. In particular embodiments, the disease is a hemoglobinopathy like thalassemia, or a sickle cell disease/trait. The therapeutic gene and/or expression product may be, for example, a gene that induces or increases production of hemoglobin; induces or increases production of β-globin, γ-globin, or α-globin; or increases the availability of oxygen to cells in the body. The therapeutic gene and/or expression product may be, for example, HBB or CYBER3. Exemplary effective treatments may, for example, increase blood cell counts, improve blood cell function, or increase oxygenation of cells in patients. In another particular embodiment, the disease is hemophilia. The therapeutic gene may be, for example, a gene that increases the production of coagulation/clotting factor VIII or coagulation/clotting factor IX, causes the production of normal versions of coagulation factor VIII or coagulation factor IX, a gene that reduces the production of antibodies to coagulation/clotting factor VIII or coagulation/clotting factor IX, or a gene that causes the proper formation of blood clots. Exemplary therapeutic genes and/or expression products include F8 and F9. Exemplary effective treatments may, for example, increase or induce the production of coagulation/clotting factors VIII and IX; improve the functioning of coagulation/clotting factors VIII and IX, or reduce clotting time in subjects.

[0257] In various embodiments of the present disclosure, a therapeutic payload encodes a globin gene, wherein the globin protein encoded by the globin gene is selected from a γ-globin, a β-globin, and/or an α-globin. Globin genes of the present disclosure can include, e.g., one or more regulatory sequences such as a promoter operably linked to a nucleic acid sequence encoding a globin protein. As those of skill in the art will appreciate, each of γ-globin, β-globin, and/or α-globin is a component of fetal and/or adult hemoglobin and is therefore useful in various vectors disclosed herein.

[0258] In various embodiments, increasing expression of a globin protein can refer to any of one or more of (i) increasing the amount, concentration, or expression (e.g., transcription or translation of nucleic acids encoding) in a cell or system of globin protein having a particular sequence; (ii) increasing the amount, concentration, or expression (e.g., transcription or translation of nucleic acids encoding) in a cell or system of globin protein of a particular type (e.g., the total amount of all proteins that would be identified as γ-globin (or alternatively β-globin or α-globin) by those of skill in the art or as set forth in the present specification) without respect to the sequences of the proteins relative to each other; and/or (iii) expressing in a cell or system a heterologous globin protein, e.g., a globin protein not encoded by a host cell prior to gene therapy.

[0259] The following references describe particular exemplary sequences of functional globin genes. References 1˜4 relate to α-type globin sequences and references 4-12 relate to β-type globin sequences (including β and γ globin sequences), which sequences are hereby incorporated by reference: (1) GenBank Accession No. Z84721 (Mar. 19, 1997); (2) GenBank Accession No. NM_000517 (Oct. 31, 2000); (3) Hardison et al., J. Mol. Biol. (1991) 222 (2): 233-249; (4) A Syllabus of Human Hemoglobin Variants (1996), by Titus et al., published by The Sickle Cell Anemia Foundation in Augusta, Ga. (available online at globin.cse.psu.edu); (5) GenBank Accession No. J00179 (Aug. 26, 1993) or U01317.1; (6) Tagle et al., Genomics (1992) 13 (3): 741-760; (7) Grovsfeld et al., Cell (1987) 51 (6): 975-985; (8) Li et al., Blood (1999) 93 (7): 2208-2216; (9) Gorman et al., J. Biol. Chem. (2000) 275 (46): 35914-35919; (10) Slightom et al., Cell (1980) 21 (3): 627-638; (11) Fritsch et al., Cell (1980) 19 (4): 959-972; (12) Marotta et al., J. Biol. Chem. (1977) 252 (14): 5040-5053. For additional coding and non-coding regions of genes encoding globins see, for example, by Marotta et al., Prog. Nucleic Acid Res. Mol. Biol. 19, 165-175, 1976, Lawn et al., Cell 21 (3), 647-651, 1980, and Sadelain et al., PNAS.; 92:6728-6732, 1995. In some embodiments, a globin gene encodes a G16D gamma globin variant.

[0260] An exemplary amino acid sequence of hemoglobin subunit β is provided, for example, at NCBI Accession No. P68871. An exemplary amino acid sequence for β-globin is provided, for example, at NCBI Accession No. NP_000509.

[0261] Exemplary therapeutic genes and/or expression products also include checkpoint inhibitor reagents, chimeric antigen receptor molecules specific to one or more cancer antigens, and/or T-cell receptors specific to one or more cancer antigens.

[0262] As another example, a therapeutic gene can be selected to provide a therapeutically effective response against a lysosomal storage disorder. In particular embodiments, the lysosomal storage disorder is mucopolysaccharidosis (MPS), type I; MPS II or Hunter Syndrome; MPS III or Sanfilippo syndrome; MPS IV or Morquio syndrome; MPS V; MPS VI or Maroteaux-Lamy syndrome; MPS VII or sly syndrome; α-mannosidosis; β-mannosidosis; glycogen storage disease type I, also known as GSDI, von Gierke disease, or Tay-Sachs; Pompe disease; Gaucher disease; or Fabry disease. The therapeutic gene and/or expression product may, for example, be, encode, or induce expression of an enzyme, or that otherwise causes the degradation of mucopolysaccharides in lysosomes. Exemplary therapeutic genes and/or expression products include IDUA or iduronidase, IDS, GNS, HGSNAT, SGSH, NAGLU, GUSB, GALNS, GLB1, ARSB, and HYAL1. Exemplary effective genetic therapies for lysosomal storage disorders may, for example, encode or induce the production of enzymes responsible for the degradation of various substances in lysosomes; reduce, eliminate, prevent, or delay the swelling in various organs, including the head (exp. Macrosephaly), the liver, spleen, tongue, or vocal cords; reduce fluid in the brain; reduce heart valve abnormalities; prevent or dilate narrowing airways and prevent related upper respiratory conditions like infections and sleep apnea; reduce, eliminate, prevent, or delay the destruction of neurons, and/or the associated symptoms.

[0263] As another example, a therapeutic gene and/or expression product can be selected to provide a therapeutically effective response against a hyperproliferative disease. In particular embodiments, the hyperproliferative disease is cancer. The therapeutic gene and/or expression product may be, for example, a tumor suppressor gene, a gene that induces apoptosis, a gene encoding an enzyme, a gene encoding an antibody, or a gene encoding a hormone. Exemplary therapeutic genes and expression products include (in addition to those listed elsewhere herein) 101F6, 123F2 (RASSF1), 53BP2, abl, ABLI, ADP, aFGF, APC, ApoAI, ApoAIV, ApoE, ATM, BAI-1, BDNF, Beta*(BLU), bFGF, BLC1, BLC6, BRCA1, BRCA2, CBFA1, CBL, C-CAM, CNTF, COX-1, CSFIR, CTS-1, cytosine deaminase, DBCCR-1, DCC, Dp, DPC-4, E1A, E2F, EBRB2, erb, ERBA, ERBB, ETS1, ETS2, ETV6, Fab, FCC, FGF, FGR, FHIT, fms, FOX, FUS1, FYN, G-CSF, GDAIF, Gene 21 (NPRL2), Gene 26 (CACNA2D2), GM-CSF, GMF, gsp, HCR, HIC-1, HRAS, hst, IGF, IL-1, IL-2, IL-3, IL-5, IL-6, IL-7, IL-8, IL-9, IL-11, ING1, interferon α, interferon β, interferon γ, IRF-1, JUN, KRAS, LUCA-1 (HYAL1), LUCA-2 (HYAL2), LYN, MADH4, MADR2, MCC, mda7, MDM2, MEN-I, MEN-II, MLL, MMACI, MYB, MYC, MYCLI, MYCN, neu, NF-1, NF-2, NGF, NOEY1, NOEY2, NRAS, NT3, NT5, OVCA1, p16, p21, p27, p57, p73, p300, PGS, PIMI, PL6, PML, PTEN, raf, Rap1A, ras, Rb, RB1, RET, rks-3, ScFv, scFV ras, SEM A3, SRC, TALI, TCL3, TFPI, thrombospondin, thymidine kinase, TNF, TP53, trk, T-VEC, VEGF, VHL, WT1, WT-1, YES, and zac1. Exemplary effective genetic therapies may suppress or eliminate tumors, result in a decreased number of cancer cells, reduced tumor size, slow or eliminate tumor growth, or alleviate symptoms caused by tumors.

[0264] As another example, a therapeutic gene and/or expression product can be selected to provide a therapeutically effective response against an infectious disease. In particular embodiments, the infectious disease is human immunodeficiency virus (HIV). The therapeutic gene and/or expression product may be, for example, a gene rendering immune cells resistant to HIV infection, or which enables immune cells to effectively neutralize the virus via immune reconstruction, polymorphisms of genes encoding proteins expressed by immune cells, genes advantageous for fighting infection that are not expressed in the patient, genes encoding an infectious agent, receptor or coreceptor; a gene encoding ligands for receptors or coreceptors; viral and cellular genes essential for viral replication including; a gene encoding ribozymes, antisense RNA, small interfering RNA (siRNA) or decoy RNA to block the actions of certain transcription factors; a gene encoding dominant negative viral proteins, intracellular antibodies, intrakines and suicide genes. Exemplary therapeutic genes and expression products include α2β1; αvβ3; αvβ5; αvβ63; BOB/GPR15; Bonzo/STRL-33/TYMSTR; CCR2; CCR3; CCR5; CCR8; CD4; CD46; CD55; CXCR4; aminopeptidase-N; HHV-7; ICAM; ICAM-1; PRR2/HveB; HveA; a-dystroglycan; LDLR/a2MR/LRP; PVR; PRR1/HveC; and laminin receptor. A therapeutically effective amount for the treatment of HIV, for example, may increase the immunity of a subject against HIV, ameliorate a symptom associated with AIDS or HIV, or induce an innate or adaptive immune response in a subject against HIV. An immune response against HIV may include antibody production and result in the prevention of AIDS and/or ameliorate a symptom of AIDS or HIV infection of the subject, or decrease or eliminate HIV infectivity and/or virulence.

[0265] The present disclosure includes payloads that can include sequences that encode any of a variety of binding domains. Sequences that encode binding domains can encode, for example, antibodies, chimeric antigen receptors, TCRs, or other binding polypeptides.

[0266] Antibodies and antibody fragments are exemplary of binding domains. The term “antibody” can refer to a polypeptide that includes one or more canonical immunoglobulin sequence elements sufficient to confer specific binding to a particular antigen (e.g., a heavy chain variable domain, a light chain variable domain, and/or one or more CDRs). Thus, the term antibody includes, without limitation, human antibodies, non-human antibodies, synthetic and/or engineered antibodies, fragments thereof, and agents including the same. Antibodies can be naturally occurring immunoglobulins (e.g., generated by an organism reacting to an antigen). Synthetic, non-naturally occurring, or engineered antibodies can be produced by recombinant engineering, chemical synthesis, or other artificial systems or methodologies known to those of skill in the art.

[0267] As is well known in the art, typical human immunoglobulins are approximately 150 kD tetrameric agents that include two identical heavy (H) chain polypeptides (about 50 kD each) and two identical light (L) chain polypeptides (about 25 kD each) that associate with each other to form a structure commonly referred to as a “Y-shaped” structure. Typically, each heavy chain includes a heavy chain variable domain (VH) and a heavy chain constant domain (CH). The heavy chain constant domain includes three CH domains: CH1, CH2 and CH3. A short region, known as the “switch”, connects the heavy chain variable and constant regions. The “hinge” connects CH2 and CH3 domains to the rest of the immunoglobulin. Each light chain includes a light chain variable domain (VL) and a light chain constant domain (CL), separated from one another by another “switch.” Each variable domain contains three hypervariable loops known as “complement determining regions” (CDR1, CDR2, and CDR3) and four somewhat invariant “framework” regions (FR1, FR2, FR3, and FR4). In each VH and VL, the three CDRs and four FRs are arranged from amino-terminus to carboxy-terminus in the following order: FR1, CDR1, FR2, CDR2, FR3, CDR3, and FR4. The variable regions of a heavy and/or a light chain are typically understood to provide a binding moiety that can interact with an antigen. Constant domains can mediate binding of an antibody to various immune system cells (e.g., effector cells and/or cells that mediate cytotoxicity), receptors, and elements of the complement system. Heavy and light chains are linked to one another by a single disulfide bond, and two other disulfide bonds connect the heavy chain hinge regions to one another, so that the dimers are connected to one another and the tetramer is formed. When natural immunoglobulins fold, the FR regions form the beta sheets that provide the structural framework for the domains, and the CDR loop regions from both the heavy and light chains are brought together in three-dimensional space so that they create a single hypervariable antigen binding site located at the tip of the Y structure.

[0268] In some embodiments, an antibody is polyclonal, monoclonal, monospecific, or multispecific antibodies (including bispecific antibodies). In some embodiments, an antibody includes at least one light chain monomer or dimer, at least one heavy chain monomer or dimer, at least one heavy chain-light chain dimer, or a tetramer that includes two heavy chain monomers and two light chain monomers. Moreover, the term “antibody” can include (unless otherwise stated or clear from context) any art-known constructs or formats utilizing antibody structural and/or functional features including without limitation intrabodies, domain antibodies, antibody mimetics, Zybodies®, Fab fragments, Fab′ fragments, F(ab′)2 fragments, Fd′ fragments, Fd fragments, isolated CDRs or sets thereof, single chain antibodies, single-chain Fvs (scFvs), disulfide-linked Fvs (sdFv), polypeptide-Fc fusions, single domain antibodies (e.g., shark single domain antibodies such as IgNAR or fragments thereof), cameloid antibodies, camelized antibodies, masked antibodies (e.g., Probodies®), affybodies, anti-idiotypic (anti-Id) antibodies (including, e.g., anti-anti-Id antibodies), Small Modular ImmunoPharmaceuticals (“SMIPs™”), single chain or Tandem diabodies (TandAb®), VHHs, Anticalins®, Nanobodies® minibodies, BiTE®s, ankyrin repeat proteins or DARPINs®, Avimers®, DARTs, TCR-like antibodies, Adnectins®, Affilins®, Trans-bodies®, Affibodies®, TrimerX®, MicroProteins, Fynomers®, Centyrins®, and KALBITOR®s, CARs, engineered TCRs, and antigen-binding fragments of any of the above.

[0269] In various embodiments, an antibody includes one or more structural elements recognized by those skilled in the art as a complementarity determining region (CDR) or variable domain. In some embodiments, an antibody can be a covalently modified (“conjugated”) antibody (e.g., an antibody that includes a polypeptide including one or more canonical immunoglobulin sequence elements sufficient to confer specific binding to a particular antigen, where the polypeptide is covalently linked with one or more of a therapeutic agent, a detectable moiety, another polypeptide, a glycan, or a polyethylene glycol molecule). In some embodiments, antibody sequence elements are humanized, primatized, chimeric, etc., as is known in the art.

[0270] An antibody including a heavy chain constant domain can be, without limitation, an antibody of any known class, including but not limited to, IgA, secretory IgA, IgG, IgE, and IgM, based on heavy chain constant domain amino acid sequence (e.g., alpha (a), delta (8), epsilon (¿), gamma (γ) and mu (u)). IgG subclasses are also well known to those in the art and include but are not limited to human IgG1, IgG2, IgG3 and IgG4. “Isotype” refers to the Ab class or subclass (e.g., IgM or IgG1) that is encoded by the heavy chain constant region genes. As used herein, a “light chain” can be of a distinct type, e.g., kappa (κ) or lambda (λ), based on the amino acid sequence of the light chain constant domain. In some embodiments, an antibody has constant region sequences that are characteristic of mouse, rabbit, primate, or human immunoglobulins. Naturally-produced immunoglobulins are glycosylated, typically on the CH2 domain. As is known in the art, affinity and/or other binding attributes of Fc regions for Fc receptors can be modulated through glycosylation or other modification. In some embodiments, an antibody may lack a covalent modification (e.g., attachment of a glycan) that it would have if produced naturally. In some embodiments, antibodies produced and/or utilized in accordance with the present invention include glycosylated Fc domains, including Fc domains with modified or engineered such glycosylation.

[0271] The term “antibody fragment” can refer to a portion of an antibody or antibody agent as described herein, and typically refers to a portion that includes an antigen-binding portion or variable region thereof. An antibody fragment can be produced by any means. For example, in some embodiments, an antibody fragment can be enzymatically or chemically produced by fragmentation of an intact antibody or antibody agent. Alternatively, in some embodiments, an antibody fragment can be recombinantly produced (i.e., by expression of an engineered nucleic acid sequence. In some embodiments, an antibody fragment can be wholly or partially synthetically produced. In some embodiments, an antibody fragment (particularly an antigen-binding antibody fragment) can have a length of at least about 50, 60, 70, 80, 90, 100, 110, 120, 130, 140, 150, 160, 170, 180, 190 amino acids or more, in some embodiments at least about 200 amino acids.

[0272] In some instances, it is beneficial for the binding domain to be derived from the same species it will ultimately be used in. For example, for use in humans, it may be beneficial for the antigen binding domain to include a human antibody, humanized antibody, or a fragment or engineered form thereof. Antibodies from human origin or humanized antibodies have lowered or no immunogenicity in humans and have a lower number of non-immunogenic epitopes compared to non-human antibodies. Antibodies and their engineered fragments will generally be selected to have a reduced level or no antigenicity in human subjects.

[0273] In various embodiments, a payload can encode a binding agent that is a checkpoint inhibitor such as an antibody that specifically binds an immune checkpoint protein. A number of immune checkpoint inhibitors are known. Immune checkpoint inhibitors can include peptides, antibodies, nucleic acid molecules and small molecules. Examples of immune checkpoints include PD-1, PD-L1, lymphocyte activation gene-3 (LAG-3), and T cell immunoglobulin and mucin domain-containing molecule 3 (TIM-3).

[0274] The present disclosure further includes antibodies and other binding domains that bind CD4, CD5, CD7, CD52, etc.: antibodies; antibodies to IL1, IL2, IL6; an antibody to TCR specifically present on autoreactive T cells; IL4; IL10; IL12; IL13; IL1Ra; sIL1RI; sIL1RII; antibodies to TNF; ABCA3; ABCD1; ADA; AK2; APP; arginase; arylsulfatase A; A1AT; CD3D; CD3E; CD3G; CD3Z; CFTR; CHD7; chimeric antigen receptor (CAR); CIITA; CLN3; complement factor, CORO1A; CTLA; C1 inhibitor; C9ORF72; DCLRE1B; DCLRE1C; decoy receptors; DKC1; DRB1*1501/DQB1*0602; dystrophin; enzymes: Factor VIII, FANC family genes (FancA, FancB, FancC, FancD1 (BRCA2), FancD2, FancE, FancF, FancG, FancI, FancJ (BRIP1), FancL, FancM, FancN (PALB2), FancO (RAD51C), FancP (SLX4), FancQ (ERCC4), FancR (RAD51), FancS (BRCA1), FancT (UBE2T), FancU (XRCC2), FancV (MAD2L2), and FancW (RFWD3)); Fas L; FUS; GATA1; globin family genes (i.e., γ-globin); F8; glutaminase; HBA1; HBA2; HBB; IL7RA; JAK3; LCK; LIG4; LRRK2; NHEJ1; NLX2.1; neutralizing antibodies; ORAI1; PARK2; PARK7; phox; PINK1; PNP; PRKDC; PSEN1; PSEN2; PTPN22; PTPRC; P53; pyruvate kinase; RAG1; RAG2; RFXANK; RFXAP; RFX5; RMRP; ribosomal protein genes; SFTPB; SFTPC; SOD1; soluble CD40; STIM1; sTNFRI; sTNFRII; SLC46A1; SNCA; TDP43; TERT; TERC; TINF2; ubiquilin 2; WAS; WHN; ZAP70; γC; and other therapeutic genes and/or expression products described herein. In various embodiments, an antibody can be a multispecific antibody.

[0275] HSCs can be engineered to encode and/or express chimeric antigen receptor (CAR) constructs. CARs can include several distinct subcomponents that can cause cells to recognize and kill target cells such as cancer cells. The subcomponents include at least an extracellular component and an intracellular component. In various embodiments, the subcomponents can include at least an extracellular component, a transmembrane domain, and an intracellular component.

[0276] An extracellular CAR component can include a binding domain that specifically binds a marker that is preferentially present on the surface of unwanted cells. When the binding domain binds such markers, the intracellular component directs a cell to destroy the bound cancer cell. The binding domain is typically a single-chain variable fragment (scFv) derived from a monoclonal antibody (mAb), but it can be based on other formats which include an antibody-like antigen binding site.

[0277] Intracellular CAR components provide activation signals based on the inclusion of an effector domain. First generation CARs utilized the cytoplasmic region of CD35 as an effector domain. Second generation CARs utilized CD32 in combination with cluster of differentiation 28 (CD28) or 4-1BB (CD137), while third generation CARs have utilized CD35 in combination with CD28 and 4-1BB within intracellular effector domains.

[0278] Intracellular or otherwise the cytoplasmic signaling components of a CAR are responsible for activation of the cell in which the CAR is expressed. The term “intracellular signaling components” or “intracellular components” is thus meant to include any portion of the intracellular domain sufficient to transduce an activation signal. Intracellular components of expressed CAR can include effector domains. An effector domain is an intracellular portion of a fusion protein or receptor that can directly or indirectly promote a biological or physiological response in a cell when receiving the appropriate signal. In certain embodiments, an effector domain is part of a protein or protein complex that receives a signal when bound, or it binds directly to a target molecule, which triggers a signal from the effector domain. An effector domain may directly promote a cellular response when it contains one or more signaling domains or motifs, such as an immunoreceptor tyrosine-based activation motif (ITAM). In other embodiments, an effector domain will indirectly promote a cellular response by associating with one or more other proteins that directly promote a cellular response, such as co-stimulatory domains.

[0279] Effector domains can provide for activation of at least one function of a modified cell upon binding to the cellular marker expressed by a cancer cell. Activation of the modified cell can include one or more of differentiation, proliferation and/or activation or other effector functions. In particular embodiments, an effector domain can include an intracellular signaling component including a T cell receptor and a co-stimulatory domain which can include the cytoplasmic sequence from a co-receptor or co-stimulatory molecule.

[0280] An effector domain can include one, two, three or more receptor signaling domains, intracellular signaling components (e.g., cytoplasmic signaling sequences), co-stimulatory domains, or combinations thereof. Exemplary effector domains include signaling and stimulatory domains selected from: 4-1BB (CD137), CARD11, CD3γ, CD3δ, CD3ε, CD3ζ, CD27, CD28, CD79A, CD79B, DAP10, FcRα, FcRβ (FcεR1b), FcRγ, Fyn, HVEM (LIGHTR), ICOS, LAG3, LAT, Lck, LRP, NKG2D, NOTCH1, pTa, PTCH2, OX40, ROR2, Ryk, SLAMF1, Slp76, TCRα, TCRβ, TRIM, Wnt, Zap70, or any combination thereof. In particular embodiments, exemplary effector domains include signaling and co-stimulatory domains selected from: CD86, FcγRIIa, DAP12, CD30, CD40, PD-1, lymphocyte function-associated antigen-1 (LFA-1), CD2, CD7, LIGHT, NKG2C, B7-H3, a ligand that specifically binds with CD83, CDS, ICAM-1, GITR, BAFFR, SLAMF7, NKp80 (KLRF1), CD127, CD160, CD19, CD4, CD8α, CD8β, IL2Rβ, IL2Rγ, IL7Rα, ITGA4, VLA1, CD49a, IA4, CD49D, ITGA6, VLA-6, CD49f, ITGAD, CD11d, ITGAE, CD103, ITGAL, CD11a, ITGAM, CD11b, ITGAX, CD11c, ITGB1, CD29, ITGB2, CD18, ITGB7, TNFR2, TRANCE/RANKL, DNAM1 (CD226), SLAMF4 (CD244, 2B4), CD84, CD96 (Tactile), CEACAM1, CRTAM, Ly9 (CD229), PSGL1, CD100 (SEMA4D), CD69, SLAMF6 (NTB-A, Ly108), SLAM (CD150, IPO-3), BLAME (SLAMF8), SELPLG (CD162), LTBR, GADS, PAG/Cbp, NKp44, NKp30, or NKp46.

[0281] Intracellular signaling component sequences that act in a stimulatory manner may include iTAMs. Examples of iTAMs including primary cytoplasmic signaling sequences include those derived from CD3γ, CD3δ, CD3ε, CD3ζ, CD5, CD22, CD66d, CD79a, CD79b, and common FcRγ (FCERIG), FcγRIIa, FcRβ (Fcε Rib), DAP10, and DAP12. In particular embodiments, variants of CD35 retain at least one, two, three, or all ITAM regions.

[0282] In particular embodiments, an effector domain includes a cytoplasmic portion that associates with a cytoplasmic signaling protein, wherein the cytoplasmic signaling protein is a lymphocyte receptor or signaling domain thereof, a protein including a plurality of ITAMs, a co-stimulatory domain, or any combination thereof.

[0283] Additional examples of intracellular signaling components include the cytoplasmic sequences of the CD3L chain, and/or co-receptors that act in concert to initiate signal transduction following binding domain engagement.

[0284] A co-stimulatory domain is domain whose activation can be required for an efficient lymphocyte response to cellular marker binding. Some molecules are interchangeable as intracellular signaling components or co-stimulatory domains. Examples of costimulatory domains include CD27, CD28, 4-1BB (CD 137), OX40, CD30, CD40, PD-1, ICOS, lymphocyte function-associated antigen-1 (LFA-1), CD2, CD7, LIGHT, NKG2C, B7-H3, and a ligand that specifically binds with CD83. For example, CD27 co-stimulation has been demonstrated to enhance expansion, effector function, and survival of human CART cells in vitro and augments human T cell persistence and anti-cancer activity in vivo (Song et al., Blood. 2012; 119 (3): 696-706). Further examples of such co-stimulatory domain molecules include CDS, ICAM-1, GITR, BAFFR, HVEM (LIGHTR), SLAMF7, NKp80 (KLRF1), NKp44, NKp30, NKp46, CD160, CD19, CD4, CD8α, CD8β, IL2Rβ, IL2Rγ, IL7Rα, ITGA4, VLA1, CD49a, ITGA4, IA4, CD49D, ITGA6, VLA-6, CD49f, ITGAD, CDlld, ITGAE, CD103, ITGAL, CDlla, ITGAM, CDI 1b, ITGAX, CDllc, ITGBl, CD29, ITGB2, CD18, ITGB7, TNFR2, TRANCE/RANKL, DNAM1 (CD226), SLAMF4 (CD244, 2B4), CD84, CD96 (Tactile), NKG2D, CEACAM1, CRTAM, Ly9 (CD229), PSGL1, CD100 (SEMA4D), CD69, SLAMF6 (NTB-A, Ly108), SLAM (SLAMF1, CD150, IPO-3), BLAME (SLAMF8), SELPLG (CD162), LTBR, LAT, GADS, SLP-76, PAG/Cbp, and CD19a.

[0285] In particular embodiments, the amino acid sequence of the intracellular signaling component includes a variant of CD3} and a portion of the 4-1BB intracellular signaling component.

[0286] In particular embodiments, the intracellular signaling component includes (i) all or a portion of the signaling domain of CD34, (ii) all or a portion of the signaling domain of 4-1BB, or (iii) all or a portion of the signaling domain of CD33 and 4-1BB.

[0287] Intracellular components may also include one or more of a protein of a Wnt signaling pathway (e.g., LRP, Ryk, or ROR2), NOTCH signaling pathway (e.g., NOTCH1, NOTCH2, NOTCH3, or NOTCH4), Hedgehog signaling pathway (e.g., PTCH or SMO), receptor tyrosine kinases (RTKs) (e.g., epidermal growth factor (EGF) receptor family, fibroblast growth factor (FGF) receptor family, hepatocyte growth factor (HGF) receptor family, insulin receptor (IR) family, platelet-derived growth factor (PDGF) receptor family, vascular endothelial growth factor (VEGF) receptor family, tropomycin receptor kinase (Trk) receptor family, ephrin (Eph) receptor family, AXL receptor family, leukocyte tyrosine kinase (LTK) receptor family, tyrosine kinase with immunoglobulin-like and EGF-like domains 1 (TIE) receptor family, receptor tyrosine kinase-like orphan (ROR) receptor family, discoidin domain (DDR) receptor family, rearranged during transfection (RET) receptor family, tyrosine-protein kinase-like (PTK7) receptor family, related to receptor tyrosine kinase (RYK) receptor family, or muscle specific kinase (MuSK) receptor family); G-protein-coupled receptors, GPCRs (Frizzled or Smoothened); serine/threonine kinase receptors (BMPR or TGFR): or cytokine receptors (IL1R, IL2R, IL7R, or IL15R).

[0288] CAR generally also include one or more linker sequences that are used for a variety of purposes within the molecule. For example, a transmembrane domain can be used to link the extracellular component of the CAR to the intracellular component. A flexible linker sequence often referred to as a spacer region that is membrane-proximal to the binding domain can be used to create additional distance between a binding domain and the cellular membrane. This can be beneficial to reduce steric hindrance to binding based on proximity to the membrane. A common spacer region used for this purpose is the IgG4 linker. More compact spacers or longer spacers can be used, depending on the targeted cell marker. Other potential CAR subcomponents are described in more detail elsewhere herein.

[0289] Transmembrane domains within a CAR molecule, often serve to connect the extracellular component and intracellular component through the cell membrane. The transmembrane domain can anchor the expressed molecule in the modified cell's membrane.

[0290] The transmembrane domain can be derived either from a natural and/or a synthetic source. When the source is natural, the transmembrane domain can be derived from any membrane-bound or transmembrane protein. Transmembrane domains can include at least the transmembrane region(s) of the a, B or & chain of a T-cell receptor, CD28, CD27, CD3 epsilon, CD45, CD4, CD5, CD8, CD9, CD16, CD22; CD33, CD37, CD64, CD80, CD86, CD134, CD137 and CD154. In particular embodiments, a transmembrane domain may include at least the transmembrane region(s) of, e.g., KIRDS2, OX40, CD2, CD27, LFA-1 (CD 11a, CD18), ICOS (CD278), 4-1BB (CD137), GITR, CD40, BAFFR, HVEM (LIGHTR), SLAMF7, NKp80 (KLRF1), NKp44, NKp30, NKp46, CD160, CD19, IL2Rβ, IL2Rγ, IL7R a, ITGA1, VLA1, CD49a, ITGA4, IA4, CD49D, ITGA6, VLA-6, CD49f, ITGAD, CDI Id, ITGAE, CD103, ITGAL, CD11a, ITGAM, CD11b, ITGAX, CD11c, ITGB1, CD29, ITGB2, CD18, ITGB7, TNFR2, DNAM1 (CD226), SLAMF4 (CD244, 2B4), CD84, CD96 (Tactile), CEACAM1, CRT AM, Ly9 (CD229), PSGL1, CD100 (SEMA4D), SLAMF6 (NTB-A, Ly108), SLAM (SLAMF1, CD150, IPO-3), BLAME (SLAMF8), SELPLG (CD162), LTBR, PAG/Cbp, NKG2D, or NKG2C. In particular embodiments, a variety of human hinges can be employed as well including the human Ig (immunoglobulin) hinge (e.g., an IgG4 hinge, an IgD hinge), a GS linker (e.g., a GS linker described herein), a KIR2DS2 hinge or a CD8a hinge.

[0291] TCRs refer to naturally occurring T cell receptors. Payloads of the present disclosure can encode a TCR or a CAR/TCR hybrids that includes an element of a TCR and an element of a CAR. For example, a CAR/TCR hybrid could have a naturally occurring TCR binding domain with an effector domain that the TCR binding domain is not naturally associated with. A CAR/TCR hybrid could have a mutated TCR binding domain and an ITAM signaling domain. A CAR/TCR hybrid could have a naturally occurring TCR with an inserted non-naturally occurring spacer region or transmembrane domain.

[0292] Small RNAs are short, non-coding RNA molecules that play a role in regulating gene expression. In particular embodiments, small RNAs are less than 200 nucleotides in length. In particular embodiments, small RNAs are less than 100 nucleotides in length. In particular embodiments, small RNAs are less than 50, 45, 40, 35, 30, 25, or 20 nucleotides in length. In particular embodiments, small RNAs are less than 20 nucleotides in length. In various embodiments, a small RNA has a length having a lower bound of 5, 10, 15, 20, 25, or 30 nucleotides and an upper bound of 20, 25, 30, 35, 40, 45, 50, 75, or 100 nucleotides. Small RNAs include but are not limited to microRNAs (miRNAs, Piwi-interacting RNAs (piRNAs), small interfering RNAs (siRNAs), small nucleolar RNAs (snoRNAs), tRNA-derived small RNAs (tsRNAs) small rDNA-derived RNAs (srRNAs), and small nuclear RNAs. Additional classes of small RNAs continue to be discovered.

[0293] In particular embodiments, interfering RNA molecules that are homologous to a target mRNA or to which the interfering RNA can hybridize can lead to degradation of the target mRNA molecule or reduced translation of the target mRNA, a process referred to as RNA interference (RNAi) (Carthew, Curr. Opin. Cell. Biol. 13:244-248, 2001). RNAi occurs in cells naturally to remove foreign RNAs (e.g., viral RNAs). In some instances, natural RNAi proceeds via fragments cleaved from free double-strand RNA (dsRNA) which direct the degradative mechanism to other similar RNA sequences. Alternatively, RNAi can be manufactured, for example, to silence the expression of target genes. Exemplary RNAi molecules include small hairpin RNA (shRNA, also referred to as short hairpin RNA) and small interfering RNA (siRNA).

[0294] Without limiting the disclosure, and without being bound by theory, RNA interference in nature and/or in some embodiments is typically a two-step process. In the first step, the initiation step, input dsRNA is digested into 21-23 nucleotide (nt) siRNA, probably by the action of Dicer, a member of the ribonuclease (RNase) III family of dsRNA-specific ribonucleases, which processes (cleaves) dsRNA (introduced directly or via a transgene or a virus) in an ATP-dependent manner. Successive cleavage events degrade the RNA to 19-21 base pair (bp) duplexes (siRNA), each with 2-nucleotide 3′ overhangs.

[0295] In a second step, an effector step, the siRNA duplexes bind to a nuclease complex to form the RNA-induced silencing complex (RISC). An ATP-dependent unwinding of the siRNA duplex is required for activation of the RISC. The active RISC then targets the homologous transcript by base pairing interactions and typically cleaves the mRNA into 12 nucleotide fragments from the 3′ terminus of the siRNA. Research indicates that each RISC contains a single siRNA and an RNase.

[0296] Because of the remarkable potency of RNAi, an amplification step within the RNAi pathway has been suggested. Amplification could occur by copying of the input dsRNAs which would generate more siRNAs, or by replication of the siRNAs formed. Alternatively or additionally, amplification could be effected by multiple turnover events of the RISC.

[0297] ShRNAs are single-stranded polynucleotides with a hairpin loop structure. The single-stranded polynucleotide has a loop segment linking the 3′ end of one strand in the double-stranded region and the 5′ end of the other strand in the double-stranded region. The double-stranded region is formed from a first sequence that is hybridizable to a target sequence, such as a polynucleotide encoding transgene, and a second sequence that is complementary to the first sequence, thus the first and second sequence form a double-stranded region to which the linking sequence connects the ends of to form the hairpin loop structure. The first sequence can be hybridizable to any portion of a polynucleotide encoding transgene. The double-stranded stem domain of the shRNA can include a restriction endonuclease site.

[0298] Transcription of shRNAs is initiated at a polymerase III (Pol III) promoter and is thought to be terminated at position 2 of a 4-5-thymine transcription termination site. Upon expression, shRNAs are thought to fold into a stem-loop structure with 3′ UU-overhangs; subsequently, the ends of these shRNAs are processed, converting the shRNAs into siRNA-like molecules of 21-23 nucleotides.

[0299] The stem-loop structure of shRNAs can have optional nucleotide overhangs, such as 2-bp overhangs, for example, 3′ UU overhangs. While there may be variation, stems typically range from 15 to 49, 15 to 35, 19 to 35, 21 to 31 bp, or 21 to 29 bp, and the loops can range from 4 to 30 bp, for example, 4 to 23 bp. In particular embodiments, shRNA sequences include 45-65 bp; 50-60 bp; or 51, 52, 53, 54, 55, 56, 57, 58, or 59 bp. In particular embodiments, shRNA sequences include 52 or 55 bp. In particular embodiments, siRNAs have 15-25 bp. In particular embodiments, siRNAs have 16, 17, 18, 19, 20, 21, 22, 23, or 24 bp. In particular embodiments, siRNAs have 19 bp. The skilled artisan will appreciate, however, that siRNAs having a length of less than 16 nucleotides or greater than 24 nucleotides can also function to mediate RNAi. Longer RNAi agents have been demonstrated to elicit an interferon or Protein kinase R (PKR) response in certain mammalian cells which may be undesirable. Preferably the RNAi agents do not elicit a PKR response (i.e., are of a sufficiently short length). However, longer RNAi agents may be useful, for example, in situations where the PKR response has been downregulated or dampened by alternative means.

[0300] In certain illustrative embodiments, the present disclosure includes an adenoviral vector payload that encodes an shRNA targeted to the gene encoding BCL11A, where the shRNA causes decreased translation of BCL11A.

[0301] In various embodiments, an editing nucleic acid of the present disclosure includes a fragment that integrates (or is engineered to integrate) into genomic DNA of a target or recipient subject, cell, or system. In various embodiments, a payload can include a nucleic acid sequence engineered for integration into a host cell genome (an “integrating payload”), e.g., by recombination or transposition. In various embodiments, an editing nucleic acid of the present disclosure includes a fragment that does not integrate (and/or is not engineered to integrate) into genomic DNA of a target or recipient subject, cell, or system (a “non-integrating payload”). In various embodiments, a payload can include a nucleic acid sequence that is not engineered for integration into a host cell genome in that it is not flanked by sequences for recombination with genomic DNA and/or transposition into genomic DNA (e.g., is not flanked by transposon inverted repeats). In various embodiments, a payload this is not specifically associated with and/or engineered to include sequences that cause integration into genomic DNA can be referred to as a non-integrating payload, e.g., when present in a vector or vector nucleic acid sequence (e.g., a viral vector genome) that is not characterized by an ability to integrate into genomic DNA. An editing nucleic acid of the present disclosure can include an “integrating” portion that is engineered to integrate into genomic DNA of a target or recipient subject, cell, or system and a “non-integrating” portion that is not engineered to integrate into genomic DNA of a target or recipient subject, cell, or system.

[0302] In various embodiments, an MGMT editing payload is present in a nucleic acid that includes at least one therapeutic payload (e.g., a therapeutic payload that does not encode an editing system), where the therapeutic payload is integrating and the MGMT editing payload is non-integrating. In various embodiments, an integrating payload can encode one or more expression products for which permanent, long-term, or lineage-enduring expression is desired. For example, a gene that provides an expression product that counteracts a deficiency of endogenous cells (e.g., an enzyme deficiency and/or a deficiency resulting from a genomic mutation and/or a deficiency associated with a disease, disorder, or condition) can be included in an integration portion of an editing nucleic acid of the present disclosure. In various embodiments, an editing enzyme or editing system of the present disclosure is encoded by a non-integrating portion of an editing nucleic acid of the present disclosure, e.g., to minimize the level and/or duration of expression and/or activity of an encoded agent, and where applicable genotoxicity, fitness cost, or other undesired effects resulting therefrom.

[0303] The present disclosure includes various means of engineering a portion of an editing nucleic acid of the present disclosure for integration into genomic DNA of a target or recipient subject, cell, or system. For example, an integrating fragment of an editing nucleic acid of the present disclosure can be present in a transposon that can be integrated into genomic DNA by a transposase. Transposons include a short nucleic acid sequence with terminal repeat sequences upstream and downstream of a larger segment of DNA. Transposases bind the terminal repeat sequences and catalyze the movement of the transposon to another portion of the genome. Transposases can include integrases from retrotransposons or of retroviral origin, as well as an enzyme that is a component of a functional nucleic acid-protein complex capable of transposition and which is mediating transposition. A transposition reaction includes a transposon and a transposase or an integrase enzyme.

[0304] A number of transposases have been described in the art that facilitate insertion of nucleic acids into the genome of vertebrates, including humans. Examples of such transposases include sleeping beauty (“SB”, e.g., derived from the genome of salmonid fish); piggyback (e.g., derived from lepidopteran cells and/or the Myotis lucifugus); mariner (e.g., derived from Drosophila); frog prince (e.g., derived from Rana pipiens); Tol1; Tol2 (e.g., derived from medaka fish); TcBuster (e.g., derived from the red flour beetle Tribolium castaneum), Helraiser, Himar1, Passport, Minos, Ac/Ds, PIF, Harbinger, Harbinger3-DR, HSmar1, and spinON.

[0305] The Piggy Bac (PB) transposase is a compact functional transposase protein that is described in, for example, Fraser et al., Insect Mol. Biol., 1996, 5, 141-51; Mitra et al., EMBO J., 2008, 27, 1097-1109; Ding et al., Cell, 2005, 122, 473-83; and U.S. Pat. Nos. 6,218,185; 6,551,825; 6,962,810; 7,105,343; and 7,932,088. Hyperactive piggyBac transposases are described in U.S. Pat. No. 10,131,885.

[0306] Additional information on DNA transposons can be found, for instance, in Muñoz-López & García Perez, Curr Genomics, 11 (2): 115-128, 2010.

[0307] Sleeping Beauty is described in Ivics et al., Cell 91, 501-510, 1997; Izsvak et al., J. Mol. Biol., 302 (1): 93-102, 2000; Geurts et al., Molecular Therapy, 8 (1): 108-117, 2003; Mates et al., Nature Genetics 41:753-761, 2009; and U.S. Pat. Nos. 6,489,458; 7,148,203; and 7,160,682; US Publication Nos. 2011/117072; 2004/077572; and 2006/252140. In certain embodiments, the Sleeping Beauty transposase enzyme is a Hyperactive Sleeping Beauty SB100x transposase enzyme. SB transposons are most efficiently transposed when present in circularized nucleic acid molecules (Yant et al., Nature Biotechnology, 20:999-1005, 2002).

[0308] Systematic mutagenesis studies have been undertaken to increase the activity of the SB transposase. For example, Yant et al., undertook the systematic exchange of the N-terminal 95 AA of the SB transposase for alanine (Mol. Cell Biol. 24:9239-9247, 2004). Ten of these substitutions caused hyperactivity between 200-400% as compared to SB10 as a reference. SB16, described in Baus et al., (Mol. Therapy 12:1148-1156, 2005) was reported to have a 16-fold activity increase as compared to SB10. Additional hyperactive SB variants are described in Zayed et al., (Molecular Therapy 9 (2): 292-304, 2004) and U.S. Pat. No. 9,840,696.

[0309] SB transposases transpose nucleic acid transposon payloads that are positioned between SB ITRs. Various SB ITRs are known in the art. In some embodiments, an SB ITR is a 230 bp sequence including imperfect direct repeats of 32 bp in length that serve as recognition signals for the transposase.

[0310] In various embodiments, an editing nucleic acid of the present disclosure includes a payload that includes SB100x transposon inverted repeats that flank an integrating payload that includes at least one coding sequence that encodes a β-globin expression product or a γ-globin expression product.

[0311] In various embodiments, a transposase can be provided to the same cell as the integrating payload by a further vector, where the transposase corresponds to the inverted repeats that flank the integrating payload. Accordingly, in various embodiments, a support vector or genome thereof can encode, express, and/or deliver to a target subject, cell, or system a transposase for transposition of an integrating payload present in an editing nucleic acid of the present disclosure.

[0312] In certain embodiments, an integrating payload is flanked by recombinase direct repeats, e.g., where the integrating payload is flanked by transposon inverted repeats and the transposon inverted repeats are flanked by recombinase direct repeats. In various embodiments, a recombinase can be provided to the same cell as the integrating payload by a further vector, where the recombinase corresponds to the direct repeats. Accordingly, in various embodiments, a support vector or genome thereof can encode, express, and/or deliver to a target subject, cell, or system a recombinase for recombination of recombinase sites present in an editing nucleic acid of the present disclosure.

[0313] Examples of recombinase systems include the Flp/Frt system, the Cre/loxP system, the Dre/rox system, the Vika/vox system, and the PhiC31 system. The Flp/Frt DNA recombinase system was isolated from Saccharomyces cerevisiae. The Flp/Frt system includes the recombinase Flp (flippase) that catalyzes DNA-recombination on its Frt recognition sites. Variants of the Flp protein include GenBank: ABD57356.1) and GenBank: ANW61888.1.

[0314] The Cre/loxP system is described in, for example, EP 02200009B1. Cre is a site-specific DNA recombinase isolated from bacteriophage P1. The recognition site of the Cre protein is a nucleotide sequence of 34 base pairs, the loxP site. Cre recombines the 34 bp loxP DNA sequence by binding to the 13 base pair inverted repeats and catalyzing strand cleavage and re-ligation within the spacer region. The staggered DNA cuts made by Cre in the spacer region are separated by 6 base pairs to give an overlap region that acts as a homology sensor to ensure that only recombination sites having the same overlap region recombine. Variants of the lox recognition site that can also be used include: lox2272; lox511; lox66; lox71; loxM2; and lox5171. The VCre/VloxP recombinase system was isolated from Vibrio plasmid p0908. The sCre/SloxP system is described in WO 2010/143606. The Dre/rox system is described in U.S. Pat. Nos. 7,422,889 and 7,915,037B2. It generally includes a Dre recombinase isolated from Enterobacteria phage D6 and the rox recognition site. The Vika/vox system is described in U.S. Pat. No. 10,253,332. Additionally, the PhiC31 recombinase recognizes the AttB/AttP binding sites.

[0315] Integration includes stable integration of an integrating payload into a target cell genome. By stable integration is meant that the nucleic acid remains present in the target cell genome for more than a transient period of time and can be passed on as part of the chromosomal genetic material to progeny of the target cell.

[0316] In various embodiments, an integrating payload is integrated into a genome by a process that utilizes homology arms to facilitate targeted insertion. In various embodiments, a double-strand break (DSB) in DNA (e.g., caused by an editing enzyme such as a CRISPR enzyme) can result in homology directed repair (HDR) at the site of the DSB based on a DNA template. Exogenous DNA provided and, if used as a template, cause a targeted change in the cleaved nucleic acid. Homology arms can be any length with sufficient homology to a genomic sequence at a cleavage site, e.g., 70%, 80%, 85%, 90%, 95%, or 100% homology with the nucleotide sequences flanking the cleavage site, e.g., within 50 bases or less of the cleavage site, e.g., within 30 bases, within 15 bases, within 10 bases, within 5 bases, or immediately flanking the cleavage site, to support HDR between the homology arms and the genomic sequence to which it bears homology. Homology arms are generally identical to genomic sequence, for example, to the genomic region in which the double-strand break (DSB) occurs. However, as indicated, absolute identity is not required.

[0317] In certain embodiments, integration of an integrating payload at specific genomic loci such as genomic safe harbors can include homology-directed integration using CRISPR enzyme-mediated cleavage of a target genome. CRISPR enzyme (e.g., Cas9) cleaves double-stranded DNA at a site specified by a guide RNA (gRNA). The double-strand break can be repaired by homology-directed repair (HDR) when a donor template is present. In various such methods, an integrating payload is a “repair template” in that it includes left and right homology arms (e.g., of 500-3,000 bp) for insertion into a cleaved target genome. CRISPR-mediated gene insertion can be several orders of magnitude more efficient compared with spontaneous recombination of DNA template, demonstrating that CRISPR-mediated gene insertion can be an effective tool for genome editing. Exemplary methods of homology-directed integration of a nucleic acid sequence into a specified genomic locus are known in the art, e.g., in Richardson et al., (Nat Biotechnol. 34 (3): 339-44, 2016).

[0318] Particular embodiments can utilize homology arms that have at least or about 25, 50, 100, or 200 nucleotides, or more than 200 nucleotides of sequence homology between an HDR template and a targeted genomic sequence (or any integral value between 10 and 200 nucleotides, or more). In particular embodiments, homology arms are 40-1000 nucleotides in length. In particular embodiments, homology arms are 500-2500 nucleotides, 700-2000 nucleotides, or 800-1800 nucleotides in length. In particular embodiments, homology arms include at least 800 nucleotides or at least 850 nucleotides. The length of homology arms can also be symmetric or asymmetric.

[0319] Particular embodiment can utilize first and/or second homology arms each including at least 25, 50, 100, 200, 400, 600, 800, 1,000, 1,200, 1,400, 1,600, 1,800, 2,000, 2,500, or 3,000 nucleotides or more, having sequence identity or homology with a corresponding fragment of a target genome. In some embodiments, first and/or second homology arms each include a number of nucleotides having sequence identity or homology with a corresponding fragment of a target genome that has a lower bound of 25, 50, 100, 200, 400, 600, 800, 1,000, 1,200, 1,400, 1,600, or 1,800 nucleotides and an upper bound of 1,000, 1,200, 1,400, 1,600, 1,800, 2,000, 2,500, or 3,000 nucleotides. In some embodiments, first and/or second homology arms each include a number of nucleotides having sequence identity or homology with a corresponding fragment of a target genome that is between 40 and 1,000 nucleotides, between 500 and 2,500 nucleotides, between 700 and 2,000 nucleotides, or between 800 and 1800 nucleotides, or that has a length of at least 800 nucleotides or at least 850 nucleotides. First and second homology arms can have same, similar, or different lengths.

[0320] In particular embodiments, integrating payloads (e.g., genes leading to expression of a therapeutic product within a cell) are precisely inserted within genomic safe harbors. Genomic safe harbor sites are intragenic or extragenic regions of the genome that are able to accommodate the predictable expression of newly integrated DNA without adverse effects on the host cell. A useful safe harbor must permit sufficient transgene expression to yield desired levels of the encoded protein. A genomic safe harbor site also must not alter cellular functions. Methods for identifying genomic safe harbor sites are described in Sadelain et al., Nature Reviews 12:51-58, 2012; and Papapetrou et al., Nat Biotechnol. 29 (1): 73-8, 2011. In particular embodiments, a genomic safe harbor site meets one or more (one, two, three, four, or five) of the following criteria: (i) distance of at least 50 kb from the 5′ end of any gene, (ii) distance of at least 300 kb from any cancer-related gene, (iii) within an open/accessible chromatin structure (measured by DNA cleavage with natural or engineered nucleases), (iv) location outside a gene transcription unit and (v) location outside ultraconserved regions (UCRs), microRNA or long non-coding RNA of the genome.

[0321] In particular embodiments, to meet the criteria of a genomic safe harbor, chromatin sites must be >150 kb away from a known oncogene, >30 kb away from a known transcription start site; and have no overlap with coding mRNA. In particular embodiments, to meet the criteria of a genomic safe harbor, chromatin sites must be >200 kb away from a known oncogene, >40 kb away from a known transcription start site; and have no overlap with coding mRNA. In particular embodiments, to meet the criteria of a genomic safe harbor, chromatin sites must be >300 kb away from a known oncogene, >50 kb away from a known transcription start site; and have no overlap with coding mRNA. In particular embodiments, a genomic safe harbor meets the preceding criteria (>150 kb, >200 kb or >300 kb away from a known transcription start site; and have no overlap with coding mRNA >40 kb, or >50 kb away from a known transcription start site with no overlap with coding mRNA) and additionally is 100% homologous between an animal of a relevant animal model and the human genome to permit rapid clinical translation of relevant findings.

[0322] In particular embodiments, a genomic safe harbor meets criteria described herein and also demonstrates a 1:1 ratio of forward:reverse orientations of lentiviral integration further demonstrating the locus does not impact surrounding genetic material.

[0323] Particular genomic safe harbors sites include CCR5, HPRT, AAVS1, Rosa and albumin. See also, e.g., U.S. Pat. Nos. 7,951,925 and 8,110,379; U.S. Publication Nos. 2008/0159996; 2010/00218264; 2012/0017290; 2011/0265198; 2013/0137104; 2013/0122591; 2013/0177983 and 2013/0177960 for additional information and options for appropriate genomic safe harbor integration sites.

[0324] Various technologies known in the art can be used to direct integration of an integrating payload at specific genomic loci such as genomic safe harbors. For example AAV-mediated gene targeting, as well as homologous recombination enhanced by the introduction of DNA double-strand breaks using site-specific endonucleases (zinc-finger nucleases, meganucleases, transcription activator-like effector (TALE) nucleases), and CRISPR/Cas systems are all tools that can mediate targeted insertion of foreign DNA at predetermined genomic loci such as genomic safe harbors.

[0325] One means of engineering vectors that integrate a payload into a host cell genome has been to produce integrating viral hybrid vectors. Integrating viral hybrid vectors combine genetic elements of a vector that efficiently transduces target cells with genetic elements of a vector that stably integrates its vector payload. Integrating payloads of interest, e.g., for use in combination with vectors, have included those of bacteriophage integrase PHIC31, retrotransposons, retrovirus (e.g., LTR-mediated or retrovirus integrate-mediated), zinc-finger nuclease, DNA-binding domain-retroviral integrase fusion proteins, AAV (e.g., AAV-ITR or AAV-Rep protein-mediated), and Sleeping Beauty (SB) transposase.

[0326] Expression products (e.g., editing system components and/or therapeutic payload expression products) encoded by editing nucleic acids of the present disclosure can be operably linked with one or more regulatory sequences optionally selected from a promoter, enhancer, insulator, termination signal, polyadenylation signal, splicing signal, and/or the like. Those of skill in the art will appreciate that methods and techniques for operably linking a regulatory sequence and a coding sequence are known. Various exemplary regulatory sequences, such as exemplary promoters, are provided herein by way of example.

[0327] A promoter can be a non-coding genomic DNA sequence, usually upstream (5′) to the relevant coding sequence, to which RNA polymerase binds before initiating transcription. This binding aligns the RNA polymerase so that transcription will initiate at a specific transcription initiation site. The nucleotide sequence of the promoter determines the nature of the enzyme and other related protein factors that attach to it and the rate of RNA synthesis. The RNA is processed to produce messenger RNA (mRNA) which serves as a template for translation of the RNA sequence into the amino acid sequence of the encoded polypeptide. The 5′ non-translated leader sequence is a region of the mRNA upstream of the coding region that may play a role in initiation and translation of the mRNA. The 3′ transcription termination/polyadenylation signal is a non-translated region downstream of the coding region that functions in the plant cell to cause termination of the RNA synthesis and the addition of polyadenylate nucleotides to the 3′ end.

[0328] Promoters can include general promoters, tissue-specific promoters, cell-specific promoters, and/or promoters specific for the cytoplasm. Promoters may include strong promoters, weak promoters, constitutive expression promoters, and/or inducible (conditional) promoters. Inducible promoters direct or control expression in response to certain conditions, signals, or cellular events. For example, the promoter may be an inducible promoter that requires a particular ligand, small molecule, transcription factor, hormone, or hormone protein in order to effect transcription from the promoter. Particular examples of promoters include the AFP (α-fetoprotein) promoter, amylase 1C promoter, aquaporin-5 (AP5) promoter, al-antitrypsin promoter, β-act promoter, β-globin promoter, β-Kin promoter, B29 promoter, CCKAR promoter, CD14 promoter, CD43 promoter, CD45 promoter, CD68 promoter, CEA promoter, c-erbB2 promoter, COX-2 promoter, CXCR4 promoter, desmin promoter, E2F-1 promoter, human elongation factor 1α promoter (EF1α), CMV (cytomegalovirus viral) promoter, minCMV promoter, SV40 (simian virus 40) immediately early promoter, EGR1 promoter, eIF4A1 promoter, elastase-1 promoter, endoglin promoter, FerH promoter, FerL promoter, fibronectin promoter, Flt-1 promoter, GAPDH promoter, GFAP promoter, GPIIb promoter, GRP78 promoter, GRP94 promoter, HE4 promoter, hGR1/1 promoter, hNIS promoter, Hsp68 promoter, the Hsp68 minimal promoter (proHSP68), HSP70 promoter, HSV-1 virus TK gene promoter, hTERT promoter, ICAM-2 promoter, kallikrein promoter, LP promoter, major late promoter (MLP), Mb promoter, Rho promoter, MT (metallothionein) promoter, MUC1 promoter, NphsI promoter, OG-2 promoter, PGK (Phospho Glycerate kinase) promoters, PGK-1 promoter, polymerase III (Pol III) promoter, PSA promoter, ROSA promoter, SP-B promoter, Survivn promoter, SYNI promoter, SYT8 gene promoter, TRP1 promoter, Tyr promoter, ubiquitin B promoter, WASP promoter, and the Rous Sarcoma Virus (RSV) long-terminal repeat (LTR) promoter

[0329] Promoters may be obtained as native promoters or composite promoters. Native promoters, or minimal promoters, refer to promoters that include a nucleotide sequence from the 5′ region of a given gene. A native promoter includes a core promoter and its natural 5′UTR. In particular embodiments, the 5′UTR includes an intron. Composite promoters refer to promoters that are derived by combining promoter elements of different origins or by combining a distal enhancer with a minimal promoter of the same or different origin.

[0330] In particular embodiments, promoters include wild type promoter sequences and sequences with optional changes (including insertions, point mutations or deletions) at certain positions relative to the wild-type promoter. In particular embodiments, promoters vary from naturally occurring promoters by having 1 change per 20 nucleotide stretch, 2 changes per 20 nucleotide stretch, 3 changes per 20 nucleotide stretch, 4 changes per 20 nucleotide stretch, or 5 changes per 20 nucleotide stretch. In particular embodiments, the natural sequence will be altered in 1, 2, 3, 4, 5, 6, 7, 8, 9, or 10 bases. The promoter may vary in length, including from 50 nucleotides of LTR sequence to 100, 200, 250 or 350 nucleotides of LTR sequence, with or without other viral sequence.

[0331] Some promoters are specific to a tissue or cell and some promoters are non-specific to a tissue or cell. Each gene in mammalian cells has its own promoter and some promoters can only be activated in certain cell types. A specific promoter aids in cell specific expression of a nucleotide sequence that is operably linked to the promoter sequence. A non-specific promoter, or ubiquitous promoter, aids in initiation of transcription of a gene or nucleotide sequence that is operably linked to the promoter sequence in a wide range of cells, tissues and cell cycles.

[0332] In some embodiments, the promoter is a non-specific promoter. In particular embodiments, a non-specific promoter includes CMV promoter, RSV promoter, SV40 promoter, mammalian elongation factor 1α (EF1α) promoter, β-act promoter, EGR1 promoter, eIF4A1 promoter, FerH promoter, FerL promoter, GAPDH promoter, GRP78 promoter, GRP94 promoter, HSP70 promoter, β-Kin promoter, PGK-1 promoter, ROSA promoter, and/or ubiquitin B promoter.

[0333] In various embodiments, a coding sequence is operably linked to a microRNA (or miRNA) control system. An miRNA control system can refer to a method or composition in which expression of a coding sequence is regulated by the presence of microRNA sites (e.g., nucleic acid sequences with which a microRNA can interact). In various embodiments, the present disclosure includes payload in which a nucleic acid sequence encoding an expression product is operably linked to an miRNA target site such that expression of the expression product is controlled by presence, level, activity, and/or contact with a corresponding miRNA. For the avoidance of doubt the present disclosure contemplates that a nucleic acid sequence operably linked with an miRNA site, e.g., as disclosed herein can be a nucleic acid sequence that encodes, e.g., any of one or more expression products provided herein.

### Nucleic Acid Delivery Vectors

[0334] The present disclosure includes various methods and compositions for delivery of nucleic acids encoding an editing system of the present disclosure. Vectors of the present disclosure include agents for delivery of a nucleic acid to a subject, cell, or system. In various embodiments, a nucleic acid encoding an editing system of the present disclosure is delivered by a vector such as a nanoparticle, lipid nanoparticle, liposome, plasmid, cosmid, virus, or phage.

[0335] In various embodiments, a nucleic acid encoding an editing system of the present disclosure is included in and/or associated with a nanoparticle. Nanoparticles (NPs) can range in size from 10 to 1000 nm. Various nanoparticles that can include nucleic acids are known in the art. Examples include noble metal NPs, nanorods (NRs), nanoclusters (NCs), semiconductor quantum dots (QDs), and carbon allotropes such as single-wall carbon nanotubes (SWCNTs) and graphene. Particular examples further include gold NPs, silver NPs, gold NRs, gold/silver hybrids, silver NCs, magnetic nanoparticles, platinum NPs, palladium NPs, graphene oxide, micelles, polyacrylamide NPs, viral NPs, ferritin NPs, upconversion NPs, chalcogenide NPs, alkaline earth metal NPs, and DNA NPs. The present disclosure further includes lipid nanoparticles (LNPs, e.g., solid lipid nanoparticles (SLNs) and nanostructured lipid carriers (NLCs)).

[0336] In various embodiments, a nucleic acid encoding an editing system of the present disclosure is encapsulated in an LNP. LNPs can include cationic lipids together with other components such as neutral phospholipids, phosphatidylcholines, sterols such as cholesterol, and/or PEGylated phospholipids. SLNs, produced using lipids that are solid at room temperature and at body temperature, are colloidal nanoparticles with a solid lipophilic core. The solid lipid core of an SLN can include triglycerides (e.g., tri-stearin), glyceride mixtures or partial glycerides (e.g., Imwitor), fatty acids (e.g., stearic acid or palmitic acid), steroids (e.g., cholesterol), and/or waxes (e.g., cetyl palmitate) that are solid at both room temperature and human body temperature. Lipid nano-emulsions (LNE) are colloidal nanoparticles with a core that is liquid at room temperature. NLCs include a mixture of solid and liquid lipids, such as glyceryl tricaprylate, ethyl oleate, isopropyl myristate, and/or glyceryl dioleate.

[0337] In various embodiments, a nucleic acid encoding an editing system of the present disclosure is encapsulated in a liposome. Liposomes can include one or more phospholipid bilayers. Phospholipids can be organized in a bilayer structure due to their amphipathic properties, forming vesicles. Phospholipids can include, for example, phosphatidyl choline (lecithin; PC), phosphatidyl ethanolamine (cephalin; PE), phosphatidyl serine (PS), phosphatidyl inositol (PI), and/or phosphatidyl glycerol (PG). Liposomes can further include additional agents such as cholesterol, lipid chains, and/or surfactants. In various embodiments, cholesterol does not form a bilayer by itself, but can incorporate into phospholipid membranes. In various embodiments, a liposome can include a hydrophilic carbohydrate or polymer, such as a lipid derivative of polyethylene glycol (PEG). Liposomes include conventional liposomes, pH sensitive liposomes, cationic liposomes, immune liposomes, and long circulating liposomes. Liposomes include multilamellar vesicles and unilamellar vesicles (e.g., large and small unilamellar vesicles).

[0338] In various embodiments, a nucleic acid encoding an editing system of the present disclosure is encapsidated in a viral particle of a virus. Various types of viruses can be used for delivery of nucleic acids. Viruses for delivery of a nucleic acid encoding an editing system of the present disclosure can be adenoviruses, adeno-associated viruses, alphaviruses, flaviviruses, herpes simplex viruses (HSV), measles viruses, rhabdoviruses, retroviruses, lentiviruses, Newcastle disease virus (NDV), poxviruses, and picornaviruses.

[0339] In certain embodiments, a nucleic acid encoding an editing system of the present disclosure is encapsidated in a viral particle of an adenovirus. Adenoviruses are large, icosahedral-shaped, non-enveloped viruses. Natural adenoviral capsids include three types of proteins: fiber, penton, and hexon. The hexon makes up the majority of the viral capsid, forming 20 triangular faces. A penton base is located at each of the 12 vertices of the capsid, and a fiber (also referred to as a knobbed fiber) protrudes from each penton base. Penton and fiber, and in particular the fiber knob, are of particular importance in receptor binding and internalization as they facilitate the attachment of the capsid to host cells. In various embodiments, the adenovirus is a helper-dependent adenovirus. In various embodiments, an adenoviral vector is a vector of a serotype selected from Ad3, Ad5, Ad7, Ad11, Ad14, Ad16, Ad21, Ad34, Ad35, Ad37, or Ad50.

[0340] In various embodiments, an Ad3, Ad5, Ad7, Ad11, Ad14, Ad16, Ad21, Ad34, Ad35, Ad37, or Ad50 vector is an adenoviral vector that includes a genome of the indicated serotype. In various embodiments, an Ad3, 5, 7, 11, 14, 16, 21, 34, 35, 37, or 50 genome is a single-stranded or double-stranded DNA sequence that includes ITRs of an Ad3, 5, 7, 11, 14, 16, 21, 34, 35, 37, or 50 vector (e.g., a 5′ ITR according to SEQ ID NO: 10, 28, 46, 64, 82, 100, 118, 136, 154, 172, or 190 and a 3′ ITR according to SEQ ID NO: 11, 29, 47, 65, 83, 101, 119, 137, 155, 173, or 191), or ITRs that individually and/or together have at least 75% sequence identity (e.g., at least 75%, 80%, 85%, 90%, 95%, 96%, 97%, 98%, 99%, or 100% identity) thereto. In various embodiments, an Ad3, 5, 7, 11, 14, 16, 21, 34, 35, 37, or 50 genome is a single-stranded or double-stranded DNA sequence that includes a packaging sequence of an Ad3, 5, 7, 11, 14, 16, 21, 34, 35, 37, or 50 vector (e.g., a packaging sequence according to SEQ ID NO: 12, 30, 48, 66, 84, 102, 120, 138, 156, 174, or 192), or a packaging sequence having at least 75% sequence identity (e.g., at least 75%, 80%, 85%, 90%, 95%, 96%, 97%, 98%, 99%, or 100% identity) to the entirety of a portion thereof. In various embodiments, an Ad3, 5, 7, 11, 14, 16, 21, 34, 35, 37, or 50 genome is a single-stranded or double-stranded DNA sequence that includes a sequence with at least 75% sequence identity (e.g., at least 75%, 80%, 85%, 90%, 95%, 96%, 97%, 98%, 99%, or 100% identity) to all, a portion of, or a contiguous corresponding portion of, or a discontiguous corresponding portion of a reference Ad3, 5, 7, 11, 14, 16, 21, 34, 35, 37, or 50 genome (e.g., SEQ ID NO: 208, 209, 210, 211, 212, 213, 214, 215, 216, 217, or 218).

[0341] In various embodiments, an Ad3, 5, 7, 11, 14, 16, 21, 34, 35, 37, or 50 genome is any nucleotide sequence that includes at least ITRs of an Ad3, 5, 7, 11, 14, 16, 21, 34, 35, 37, or 50 vector (e.g., a 5′ITR according to SEQ ID NO: 10, 28, 46, 64, 82, 100, 118, 136, 154, 172, 190 and a 3′ ITR according to SEQ ID NO: 11, 29, 47, 65, 83, 101, 119, 137, 155, 173, or 191), or ITRs that individually and/or together have at least 75% sequence identity (e.g., at least 75%, 80%, 85%, 90%, 95%, 96%, 97%, 98%, 99%, or 100% identity) thereto. In various embodiments, an Ad3, 5, 7, 11, 14, 16, 21, 34, 35, 37, or 50 genome is an Ad3, 5, 7, 11, 14, 16, 21, 34, 35, 37, or 50 genome from which one or more nucleotides, coding sequences, and/or genes are completely or partially deleted as compared to a reference sequence. For example, in some embodiments, an Ad3, 5, 7, 11, 14, 16, 21, 34, 35, 37, or 50 genome can be a genome that does not include one or more of E1, E2, E3, and E4. In certain embodiments, an Ad3, 5, 7, 11, 14, 16, 21, 34, 35, 37, or 50 genome is a genome that does not include any coding sequences of an Ad3, 5, 7, 11, 14, 16, 21, 34, 35, 37, or 50 genome (e.g., a “gutless” vector that includes ITRs having at least 75% sequence identity to Ad3, 5, 7, 11, 14, 16, 21, 34, 35, 37, or 50 genome ITRs but includes none of the coding sequences present in a reference Ad3, 5, 7, 11, 14, 16, 21, 34, 35, 37, or 50 genome).

[0342] In various embodiments, an Ad3, 5, 7, 11, 14, 16, 21, 34, 35, 37, or 50 genome includes, does not include, or includes a deletion of, all or a portion of an E1 sequence according to SEQ ID NO: 13, 31, 49, 67, 85, 103, 121, 139, 157, 175, or 193, or a sequence having at least 75% sequence identity (e.g., at least 75%, 80%, 85%, 90%, 95%, 96%, 97%, 98%, 99%, or 100% identity) thereto.

[0343] In various embodiments, an Ad3, 5, 7, 11, 14, 16, 21, 34, 35, 37, or 50 genome includes, does not include, or includes a deletion of, all or a portion of an E2 sequence according to SEQ ID NO: 14, 32, 50, 68, 86, 104, 122, 140, 158, 176, or 194, or a sequence having at least 75% sequence identity (e.g., at least 75%, 80%, 85%, 90%, 95%, 96%, 97%, 98%, 99%, or 100% identity) thereto.

[0344] In various embodiments, an Ad3, 5, 7, 11, 14, 16, 21, 34, 35, 37, or 50 genome includes, does not include, or includes a deletion of, all or a portion of an E3 sequence according to SEQ ID NO: 15, 33, 51, 69, 87, 105, 123, 141, 159, 177, or 195, or a sequence having at least 75% sequence identity (e.g., at least 75%, 80%, 85%, 90%, 95%, 96%, 97%, 98%, 99%, or 100% identity) thereto.

[0345] In various embodiments, an Ad3, 5, 7, 11, 14, 16, 21, 34, 35, 37, or 50 genome includes, or does not include, a sequence that encodes a fiber, where the sequence has at least 75% sequence identity (e.g., at least 75%, 80%, 85%, 90%, 95%, 96%, 97%, 98%, 99%, or 100% identity) to SEQ ID NO: 16, 34, 52, 70, 88, 106, 124, 142, 160, 178, or 196.

[0346] In various embodiments, an Ad3, 5, 7, 11, 14, 16, 21, 34, 35, 37, or 50 genome includes, or does not include, a sequence that encodes a fiber tail, where the sequence has at least 75% sequence identity (e.g., at least 75%, 80%, 85%, 90%, 95%, 96%, 97%, 98%, 99%, or 100% identity) to a fiber tail of SEQ ID NO: 17, 35, 53, 71, 89, 107, 125, 143, 161, 179, or 197.

[0347] In various embodiments, an Ad3, 5, 7, 11, 14, 16, 21, 34, 35, 37, or 50 genome includes, or does not include, a sequence that encodes a fiber shaft, where the sequence has at least 75% sequence identity (e.g., at least 75%, 80%, 85%, 90%, 95%, 96%, 97%, 98%, 99%, or 100% identity) to SEQ ID NO: 18, 36, 54, 72, 90, 108, 126, 144, 162, 180, or 198.

[0348] In various embodiments, an Ad3, 5, 7, 11, 14, 16, 21, 34, 35, 37, or 50 genome includes, or does not include, a sequence that encodes a fiber knob, where the sequence has at least 75% sequence identity (e.g., at least 75%, 80%, 85%, 90%, 95%, 96%, 97%, 98%, 99%, or 100% identity) to SEQ ID NO: 19, 37, 55, 73, 91, 109, 127, 145, 163, 181, or 199.

[0349] In various embodiments, an Ad3, 5, 7, 11, 14, 16, 21, 34, 35, 37, or 50 genome includes, or does not include, a sequence that encodes a penton, where the sequence has at least 75% sequence identity (e.g., at least 75%, 80%, 85%, 90%, 95%, 96%, 97%, 98%, 99%, or 100% identity) to SEQ ID NO: 20, 38, 56, 74, 92, 110, 128, 146, 164, 182, or 200.

[0350] In various embodiments, an Ad3, 5, 7, 11, 14, 16, 21, 34, 35, 37, or 50 genome includes, or does not include, a sequence that encodes a hexon, where the sequence has at least 75% sequence identity (e.g., at least 75%, 80%, 85%, 90%, 95%, 96%, 97%, 98%, 99%, or 100% identity) to SEQ ID NO: 21, 39, 57, 75, 93, 111, 129, 147, 165, 183, or 201.

[0351] The present disclosure includes Ad3, 5, 7, 11, 14, 16, 21, 34, 35, 37, or 50 vectors that include a fiber having at least 75% sequence identity (e.g., at least 75%, 80%, 85%, 90%, 95%, 96%, 97%, 98%, 99%, or 100% identity) to an Ad3, 5, 7, 11, 14, 16, 21, 34, 35, 37, or 50 fiber (e.g., a fiber according to SEQ ID NO: 22, 40, 58, 76, 94, 112, 130, 148, 166, 184, or 202).

[0352] The present disclosure includes Ad3, 5, 7, 11, 14, 16, 21, 34, 35, 37, or 50 vectors that include a fiber tail having at least 75% sequence identity (e.g., at least 75%, 80%, 85%, 90%, 95%, 96%, 97%, 98%, 99%, or 100% identity) to an Ad3, 5, 7, 11, 14, 16, 21, 34, 35, 37, or 50 fiber tail (e.g., a fiber tail of a fiber according to SEQ ID NO: 22, 40, 58, 76, 94, 112, 130, 148, 166, 184, or 202, e.g., where the fiber tail is the portion of the fiber including all amino acids N-terminal to the fiber shaft).

[0353] The present disclosure includes Ad3, 5, 7, 11, 14, 16, 21, 34, 35, 37, or 50 vectors that include a fiber tail having at least 75% sequence identity (e.g., at least 75%, 80%, 85%, 90%, 95%, 96%, 97%, 98%, 99%, or 100% identity) to an Ad3, 5, 7, 11, 14, 16, 21, 34, 35, 37, or 50 fiber tail (e.g., a fiber tail according to SEQ ID NO: 27, 45, 63, 81, 99, 117, 135, 153, 171, 189, or 207).

[0354] The present disclosure includes Ad3, 5, 7, 11, 14, 16, 21, 34, 35, 37, or 50 vectors that include a fiber shaft having at least 75% sequence identity (e.g., at least 75%, 80%, 85%, 90%, 95%, 96%, 97%, 98%, 99%, or 100% identity) to an Ad3, 5, 7, 11, 14, 16, 21, 34, 35, 37, or 50 fiber shaft (e.g., a fiber shaft according to SEQ ID NO: 23, 41, 59, 77, 95, 113, 131, 149, 167, 185, or 203).

[0355] The present disclosure includes Ad3, 5, 7, 11, 14, 16, 21, 34, 35, 37, or 50 vectors that include a fiber knob having at least 75% sequence identity (e.g., at least 75%, 80%, 85%, 90%, 95%, 96%, 97%, 98%, 99%, or 100% identity) to an Ad3, 5, 7, 11, 14, 16, 21, 34, 35, 37, or 50 fiber knob (e.g., a fiber knob according to SEQ ID NO: 24, 42, 60, 78, 96, 114, 132, 150, 168, 186, or 204).

[0356] The present disclosure includes Ad3, 5, 7, 11, 14, 16, 21, 34, 35, 37, or 50 vectors that include a penton having at least 75% sequence identity (e.g., at least 75%, 80%, 85%, 90%, 95%, 96%, 97%, 98%, 99%, or 100% identity) to an Ad3, 5, 7, 11, 14, 16, 21, 34, 35, 37, or 50 penton (e.g., a penton according to SEQ ID NO: 25, 43, 61, 79, 97, 115, 133, 151, 169, 187, or 205).

[0357] The present disclosure includes Ad3, 5, 7, 11, 14, 16, 21, 34, 35, 37, or 50 vectors that include a hexon having at least 75% sequence identity (e.g., at least 75%, 80%, 85%, 90%, 95%, 96%, 97%, 98%, 99%, or 100% identity) to an Ad3, 5, 7, 11, 14, 16, 21, 34, 35, 37, or 50 hexon (e.g., a hexon according to SEQ ID NO: 26, 44, 62, 80, 98, 116, 134, 152, 170, 188, or 206).

[0358] In various embodiments, an Ad3, 5, 7, 11, 14, 16, 21, 34, 35, 37, or 50 vector is any adenoviral vector that includes at least a fiber having at least 75% sequence identity (e.g., at least 75%, 80%, 85%, 90%, 95%, 96%, 97%, 98%, 99%, or 100% identity) to an Ad3, 5, 7, 11, 14, 16, 21, 34, 35, 37, or 50 fiber (e.g., a fiber according to SEQ ID NO: 22, 40, 58, 76, 94, 112, 130, 148, 166, 184, or 202).

[0359] In various embodiments, an Ad3, 5, 7, 11, 14, 16, 21, 34, 35, 37, or 50 vector is any adenoviral vector that includes at least a fiber tail having at least 75% sequence identity (e.g., at least 75%, 80%, 85%, 90%, 95%, 96%, 97%, 98%, 99%, or 100% identity) to an Ad3, 5, 7, 11, 14, 16, 21, 34, 35, 37, or 50 fiber tail (e.g., a fiber tail of a fiber according to SEQ ID NO: 22, 40, 58, 76, 94, 112, 130, 148, 166, 184, or 202, e.g., where the fiber tail is the portion of the fiber including all amino acids N-terminal to the fiber shaft).

[0360] In various embodiments, an Ad3, 5, 7, 11, 14, 16, 21, 34, 35, 37, or 50 vector is any adenoviral vector that includes at least a fiber tail having at least 75% sequence identity (e.g., at least 75%, 80%, 85%, 90%, 95%, 96%, 97%, 98%, 99%, or 100% identity) to an Ad3, 5, 7, 11, 14, 16, 21, 34, 35, 37, or 50 fiber tail (e.g., a fiber tail according to SEQ ID NO: 27, 45, 63, 81, 99, 117, 135, 153, 171, 189, or 207).

[0361] In various embodiments, an Ad3, 5, 7, 11, 14, 16, 21, 34, 35, 37, or 50 vector is any adenoviral vector that includes at least a fiber shaft having at least 75% sequence identity (e.g., at least 75%, 80%, 85%, 90%, 95%, 96%, 97%, 98%, 99%, or 100% identity) to an Ad3, 5, 7, 11, 14, 16, 21, 34, 35, 37, or 50 fiber shaft (e.g., a fiber shaft according to SEQ ID NO: 23, 41, 59, 77, 95, 113, 131, 149, 167, 185, or 203).

[0362] In various embodiments, an Ad3, 5, 7, 11, 14, 16, 21, 34, 35, 37, or 50 vector is any adenoviral vector that includes at least a fiber knob having at least 75% sequence identity (e.g., at least 75%, 80%, 85%, 90%, 95%, 96%, 97%, 98%, 99%, or 100% identity) to an Ad3, 5, 7, 11, 14, 16, 21, 34, 35, 37, or 50 fiber knob (e.g., a fiber knob according to SEQ ID NO: 24, 42, 60, 78, 96, 114, 132, 150, 168, 186, or 204).

[0363] In various embodiments, an Ad3, 5, 7, 11, 14, 16, 21, 34, 35, 37, or 50 vector is any adenoviral vector that includes at least a penton having at least 75% sequence identity (e.g., at least 75%, 80%, 85%, 90%, 95%, 96%, 97%, 98%, 99%, or 100% identity) to an Ad3, 5, 7, 11, 14, 16, 21, 34, 35, 37, or 50 penton (e.g., a penton according to SEQ ID NO: 25, 43, 61, 79, 97, 115, 133, 151, 169, 187, or 205).

[0364] In various embodiments, an Ad3, 5, 7, 11, 14, 16, 21, 34, 35, 37, or 50 vector is any adenoviral vector that includes at least a hexon having at least 75% sequence identity (e.g., at least 75%, 80%, 85%, 90%, 95%, 96%, 97%, 98%, 99%, or 100% identity) to an Ad3, 5, 7, 11, 14, 16, 21, 34, 35, 37, or 50 hexon (e.g., a hexon according to SEQ ID NO: 26, 44, 62, 80, 98, 116, 134, 152, 170, 188, or 206).

[0365] Thus, an Ad3, 5, 7, 11, 14, 16, 21, 34, 35, 37, or 50 vector can be a chimeric adenoviral vector that includes at least a fiber knob having at least 75% sequence identity (e.g., at least 75%, 80%, 85%, 90%, 95%, 96%, 97%, 98%, 99%, or 100% identity) to an Ad3, 5, 7, 11, 14, 16, 21, 34, 35, 37, or 50 fiber knob and at least one protein or portion thereof (such as a fiber shaft, fiber tail, penton, or hexon) that has at least 75% sequence identity (e.g., at least 75%, 80%, 85%, 90%, 95%, 96%, 97%, 98%, 99%, or 100% identity) to a different adenoviral serotype.

[0366] An Ad3, 5, 7, 11, 14, 16, 21, 34, 35, 37, or 50 vector can be a chimeric adenoviral vector that includes at least a fiber shaft having at least 75% sequence identity (e.g., at least 75%, 80%, 85%, 90%, 95%, 96%, 97%, 98%, 99%, or 100% identity) to an Ad3, 5, 7, 11, 14, 16, 21, 34, 35, 37, or 50 fiber shaft and at least one protein or portion thereof (such as a fiber knob, fiber tail, penton, or hexon) that has at least 75% sequence identity (e.g., at least 75%, 80%, 85%, 90%, 95%, 96%, 97%, 98%, 99%, or 100% identity) to a different adenoviral serotype.

[0367] An Ad3, 5, 7, 11, 14, 16, 21, 34, 35, 37, or 50 vector can be a chimeric adenoviral vector that includes at least a fiber tail having at least 75% sequence identity (e.g., at least 75%, 80%, 85%, 90%, 95%, 96%, 97%, 98%, 99%, or 100% identity) to an Ad3, 5, 7, 11, 14, 16, 21, 34, 35, 37, or 50 fiber tail and at least one protein or portion thereof (such as a fiber knob, fiber shaft, penton, or hexon) that has at least 75% sequence identity (e.g., at least 75%, 80%, 85%, 90%, 95%, 96%, 97%, 98%, 99%, or 100% identity) to a different adenoviral serotype.

[0368] An Ad3, 5, 7, 11, 14, 16, 21, 34, 35, 37, or 50 vector can be a chimeric adenoviral vector that includes at least a penton having at least 75% sequence identity (e.g., at least 75%, 80%, 85%, 90%, 95%, 96%, 97%, 98%, 99%, or 100% identity) to an Ad3, 5, 7, 11, 14, 16, 21, 34, 35, 37, or 50 penton and at least one protein or portion thereof (such as a fiber knob, fiber shaft, fiber tail, or hexon) that has at least 75% sequence identity (e.g., at least 75%, 80%, 85%, 90%, 95%, 96%, 97%, 98%, 99%, or 100% identity) to a different adenoviral serotype.

[0369] An Ad3, 5, 7, 11, 14, 16, 21, 34, 35, 37, or 50 vector can be a chimeric adenoviral vector that includes at least a hexon having at least 75% sequence identity (e.g., at least 75%, 80%, 85%, 90%, 95%, 96%, 97%, 98%, 99%, or 100% identity) to an Ad3, 5, 7, 11, 14, 16, 21, 34, 35, 37, or 50 hexon and at least one protein or portion thereof (such as a fiber knob, fiber shaft, fiber tail, or penton) that has at least 75% sequence identity (e.g., at least 75%, 80%, 85%, 90%, 95%, 96%, 97%, 98%, 99%, or 100% identity) to a different adenoviral serotype.

[0370] Exemplary sequences of Ad3, 5, 7, 11, 14, 16, 21, 34, 35, 37, or 50 components (e.g., ITRs, packaging sequences, genes, and proteins) are provided in the following tables. Viral polypeptides include proteins that are components of viral vectors and portions or fragments thereof, including for example a fiber, fiber knob, fiber shaft, fiber tail, penton, or hexon.

[0371] In various embodiments, an Ad35 fiber knob of an Ad35 vector or chimeric Ad vector that includes an Ad35 fiber knob is a mutant Ad35 fiber knob. In particular embodiments, a mutant Ad35 fiber knob is an Ad35++ mutant fiber knob (alternatively referred to herein as an Ad35++ fiber knob). In various embodiments, an Ad35++ mutant fiber knob is an Ad35 fiber knob mutated to increase the affinity to CD46, e.g., by 25-fold, e.g., such that the Ad35++ mutant fiber knob increases cell transduction efficiency, e.g., at lower multiplicity of infection (MOI) (Li and Lieber, FEBS Letters, 593 (24): 3623-3648, 2019). In various embodiments, an Ad35++ mutant fiber knob includes at least one mutation selected from Ile192Val, Asp207Gly (or Glu207Gly in certain Ad35 sequences), Asn217Asp, Thr226Ala, Thr245Ala, Thr254Pro, Ile256Leu, Ile256Val, Arg259Cys, and Arg279His. In various embodiments, an Ad35++ mutant fiber knob includes each of the following mutations: Ile192Val, Asp207Gly (or Glu207Gly in certain Ad35 sequences), Asn217Asp, Thr226Ala, Thr245Ala, Thr254Pro, Ile256Leu, Ile256Val, Arg259Cys, and Arg279His. In various embodiments, amino acid numbering of an Ad35 fiber is according to GenBank Accession No. AP_000601 or an amino acid sequence corresponding thereto, e.g., where position 207 is Glu or Asp. In various embodiments, an Ad35 fiber has an amino acid sequence according to GenBank Accession No. AP_000601. Further description of Ad35++ fiber knob mutations is found in Wang 2008 J. Virol. 82 (21): 10567-10579, which is incorporated herein by reference in its entirety and with respect to fiber knobs. The present disclosure includes, for example, a recombinant Ad35 vector with a mutant Ad35 fiber knob or an Ad5/35 vector with a mutant Ad35 fiber knob.

[0372] In various embodiments, an adenoviral vector or genome of the present disclosure can be an adenoviral vector and/or genome disclosed in WO 2021/003432, which is herein incorporated by reference in its entirety, and particularly with respect to adenoviral vectors and genomes.

[0373] Various sequences corresponding to accession numbers disclosed herein, including e.g., accession sequences referred to herein as SEQ ID NOs: 208, 209, 210, 211, 212, 213, 214, 215, 216, 217, and/or 218 as indicated in Tables 3-24, are provided herein in the below listing of accession sequences. Those of skill in the art will appreciate that such sequences, including the sequences disclosed in the below listing of accession sequences, can be referenced in whole (e.g., by an accession number), or in part (e.g., by reference to a nucleotide position and/or a set or range of nucleotide positions of a sequence and/or accession number).

TABLE 3
Ad3 Genomic Sequences
Ad3 Genomic Sequences
Reference Ad3 Genome Sequence: GenBank
accession no. NC_011203 (SEQ ID NO: 208)

| | Exemplary Sequence | |
|---|---|---|
| Component | (position in reference) | SEQ ID NO: |
| Ad3 5′ (left) ITR | 1-136 | 10 |
| Ad3 3′ (right) ITR | 35208-35343 | 11 |
| Ad3 Packaging | 137-479 | 12 |
| Sequence | | |
| Ad3 E1 | 480-3918 | 13 |
| Ad3 E2 | 26643-3947 | 14 |
| Ad3 E3 | 27085-31186 | 15 |
| Ad3 fiber | 31368-32327 | 16 |
| Ad3 fiber tail | 31368-31493 | 17 |
| Ad3 fiber shaft | 31494-31763 | 18 |
| Ad3 fiber knob | 31764-32324 | 19 |
| Ad3 penton | 13905-15539 | 20 |
| Ad3 hexon | 18418-21252 | 21 |

TABLE 4
Ad3 Amino Acid Sequences
Ad3 Amino Acid Sequences

| | Exemplary Sequence | | |
|---|---|---|---|
| Component | (position in reference) | | SEQ ID NO: |
| Ad3 fiber | 1-319 | (GenBank accession no. YP_002213796) | 22 |
| Ad3 fiber shaft | 43-132 | (GenBank accession no. YP_002213796) | 23 |
| Ad3 fiber knob | 134-319 | (GenBank accession no. YP_002213796) | 24 |
| Ad3 penton | 1-544 | (GenBank accession no. YP_002213774) | 25 |
| Ad3 hexon | 1-944 | (GenBank accession no. YP_002213779) | 26 |
| Ad3 fiber tail | 1-42 | (GenBank accession no. YP_002213796) | 27 |

TABLE 5
Ad5 Genomic Sequences
Ad5 Genomic Sequences
Reference Ad5 Genome Sequence: GenBank
accession no. AC_000008 (SEQ ID NO: 209)

| | Exemplary Sequence | |
|---|---|---|
| Component | (position in reference) | SEQ ID NO: |
| Ad5 5′ (left) ITR | 1-103 | 28 |
| Ad5 3′ (right) ITR | 35836-35938 | 29 |
| Ad5 Packaging | 104-479 | 30 |
| Sequence | | |
| Ad5 E1 | 480-3509 | 31 |
| Ad5 E2 | 4091-24032 | 32 |
| Ad5 E3 | 27174-30839 | 33 |
| Ad5 fiber | 31042-32787 | 34 |
| Ad5 fiber tail | 31042-31170 | 35 |
| Ad5 fiber shaft | 31171-32241 | 36 |
| Ad5 fiber knob | 32242-32784 | 37 |
| Ad5 penton | 14156-15871 | 38 |
| Ad5 hexon | 18842-21700 | 39 |

TABLE 6
Ad5 Amino Acid Sequences
Ad5 Amino Acid Sequences

| | Exemplary Sequence | | SEQ |
|---|---|---|---|
| Component | (position in reference) | | ID NO: |
| Ad5 fiber | 1-581 | (GenBank accession no. AP_000226) | 40 |
| Ad5 fiber shaft | 44-400 | (GenBank accession no. AP_000226) | 41 |
| Ad5 fiber knob | 401-581 | (GenBank accession no. AP_000226) | 42 |
| Ad5 penton | 1-571 | (GenBank accession no. AP_000206) | 43 |
| Ad5 hexon | 1-952 | (GenBank accession no. AP_000211) | 44 |
| Ad5 fiber tail | 1-43 ( | GenBank accession no. AP_000226) | 45 |

TABLE 7
Ad7 Genomic Sequences
Ad7 Genomic Sequences
Reference Ad7 Genome Sequence: GenBank
accession no. AC_000018 (SEQ ID NO: 210)

| | Exemplary Sequence | SEQ |
|---|---|---|
| Component | (position in reference) | ID NO: |
| Ad7 5′ (left) ITR | 1-136 | 46 |
| Ad7 3′ (right) ITR | 35379-35514 | 47 |
| Ad7 Packaging | 137-479 | 48 |
| Sequence | | |
| Ad7 E1 | 480-3919 | 49 |
| Ad7 E2 | 26867-3947 | 50 |
| Ad7 E3 | 27308-31345 | 51 |
| Ad7 fiber | 31529-32506 | 52 |
| Ad7 fiber tail | 31529-31654 | 53 |
| Ad7 fiber shaft | 31655-31927 | 54 |
| Ad7 fiber knob | 31928-32503 | 55 |
| Ad7 penton | 14153-15787 | 56 |
| Ad7 hexon | 18666-21470 | 57 |

TABLE 8
Ad7 Amino Acid Sequences
Ad7 Amino Acid Sequences

| | Exemplary Sequence | | SEQ |
|---|---|---|---|
| Component | (position in reference) | | ID NO: |
| Ad7 fiber | 1-325 | (GenBank accession no. AP_000564) | 58 |
| Ad7 fiber shaft | 43-133 | (GenBank accession no. AP_000564) | 59 |
| Ad7 fiber knob | 134-325 | (GenBank accession no. AP_000564) | 60 |
| Ad7 penton | 1-544 | (GenBank accession no. AP_000543) | 61 |
| Ad7 hexon | 1-934 | (GenBank accession no. AP_000548) | 62 |
| Ad7 fiber tail | 1-42 | (GenBank accession no. AP_000564) | 63 |

TABLE 9
Ad11 Genomic Sequences
Ad11 Genomic Sequences
Reference Ad11 Genome Sequence: GenBank
accession no. NC_011202 (SEQ ID NO: 211)

| | Exemplary Sequence | |
|---|---|---|
| Component | (position in reference) | SEQ ID NO: |
| Ad11 5′ (left) ITR | 1-137 | 64 |
| Ad11 3′ (right) ITR | 34658-34794 | 65 |
| Ad11 Packaging | 138-479 | 66 |
| Sequence | | |
| Ad11 E1 | 480-3931 | 67 |
| Ad11 E2 | 25445-3963 | 68 |
| Ad11 E3 | 26866-30624 | 69 |
| Ad11 fiber | 30811-31788 | 70 |
| Ad11 fiber tail | 30811-30936 | 71 |
| Ad11 fiber shaft | 30937-31209 | 72 |
| Ad11 fiber knob | 31210-31785 | 73 |
| Ad11 penton | 13682-15367 | 74 |
| Ad11 hexon | 18254-21100 | 75 |

TABLE 10
Ad11 Amino Acid Sequences
Ad11 Amino Acid Sequences

| | Exemplary Sequence | | |
|---|---|---|---|
| Component | (position in reference) | | SEQ ID NO: |
| Ad11 fiber | 1-325 | (GenBank accession no. YP_002213828) | 76 |
| Ad11 fiber shaft | 43-133 | (GenBank accession no. YP_002213828) | 77 |
| Ad11 fiber knob | 134-325 | (GenBank accession no. YP_002213828) | 78 |
| Ad11 penton | 1-561 | (GenBank accession no. YP_002213807) | 79 |
| Ad11 hexon | 1-948 | (GenBank accession no. YP_002213812) | 80 |
| Ad11 fiber tail | 1-42 | (GenBank accession no. YP_002213828) | 81 |

TABLE 11
Ad14 Genomic Sequences
Ad14 Genomic Sequences
Reference Ad14 Genome Sequence:
GenBank accession no. AY803294 (SEQ ID NO: 212)

| | Exemplary Sequence | |
|---|---|---|
| Component | (position in reference) | SEQ ID NO: |
| Ad14 5′ (left) ITR | 1-137 | 82 |
| Ad14 3′ (right) ITR | 34628-34764 | 83 |
| Ad14 Packaging | 138-479 | 84 |
| Sequence | | |
| Ad14 E1 | 480-3947 | 85 |
| Ad14 E2 | 23389-3963 | 86 |
| Ad14 E3 | 26854-30601 | 87 |
| Ad14 fiber | 30788-31765 | 88 |
| Ad14 fiber tail | 30788-30913 | 89 |
| Ad14 fiber shaft | 30914-31186 | 90 |
| Ad14 fiber knob | 31187-31762 | 91 |
| Ad14 penton | 13698-15374 | 92 |
| Ad14 hexon | 18252-21089 | 93 |

TABLE 12
Ad14 Amino Acid Sequences
Ad14 Amino Acid Sequences

| | Exemplary Sequence | | |
|---|---|---|---|
| Component | (position in reference) | | SEQ ID NO: |
| Ad14 fiber | 1-325 | (GenBank accession no. AAW33140) | 94 |
| Ad14 fiber shaft | 43-133 | (GenBank accession no. AAW33140) | 95 |
| Ad14 fiber knob | 134-325 | (GenBank accession no. AAW33140) | 96 |
| Ad14 penton | 1-558 | (GenBank accession no. AAW33119) | 97 |
| Ad14 hexon | 1-945 | (GenBank accession no. AAW33124) | 98 |
| Ad14 fiber tail | 1-42 | (GenBank accession no. AAW33140) | 99 |

TABLE 13
Ad16 Genomic Sequences
Ad16 Genomic Sequences
Reference Ad16 Genome Sequence:
GenBank accession no. AY601636 (SEQ ID NO: 213)

| | Exemplary Sequence | |
|---|---|---|
| Component | (position in reference) | SEQ ID NO: |
| Ad16 5′ (left) ITR | 1-114 | 100 |
| Ad16 3′ (right) ITR | 35409-35522 | 101 |
| Ad16 Packaging | 115-479 | 102 |
| Sequence | | |
| Ad16 E1 | 480-3910 | 103 |
| Ad16 E2 | 23580-3954 | 104 |
| Ad16 E3 | 27107-31263 | 105 |
| Ad16 fiber | 31448-32509 | 106 |
| Ad16 fiber tail | 31448-31573 | 107 |
| Ad16 fiber shaft | 31574-31933 | 108 |
| Ad16 fiber knob | 31934-32506 | 109 |
| Ad16 penton | 13902-17534 | 110 |
| Ad16 hexon | 18450-21272 | 111 |

TABLE 14
Ad16 Amino Acid Sequences
Ad16 Amino Acid Sequences

| | Exemplary Sequence | | |
|---|---|---|---|
| Component | (position in reference) | | SEQ ID NO: |
| Ad16 fiber | 1-353 | (GenBank accession no. AAW33461) | 112 |
| Ad16 fiber shaft | 43-172 | (GenBank accession no. AAW33461) | 113 |
| Ad16 fiber knob | 173-353 | (GenBank accession no. AAW33461) | 114 |
| Ad16 penton | 1-555 | (GenBank accession no. AAW33439) | 115 |
| Ad16 hexon | 1-940 | (GenBank accession no. AAW33444) | 1160 |
| Ad16 fiber tail | 1-42 | (GenBank accession no. AAW33461) | 117 |

TABLE 15
Ad21 Genomic Sequences
Ad21 Genomic Sequences
Reference Ad21 Genome Sequence: GenBank
accession no. AY601633 (SEQ ID NO: 214)

| | Exemplary Sequence | |
|---|---|---|
| Component | (position in reference) | SEQ ID NO: |
| Ad21 5′ (left) ITR | 1-114 | 118 |
| Ad21 3′ (right) ITR | 35269-35382 | 119 |
| Ad21 Packaging | 115-479 | 120 |
| Sequence | | |
| Ad21 E1 | 480-3911 | 121 |
| Ad21 E2 | 23611-3924 | 122 |
| Ad21 E3 | 27441-31208 | 123 |
| Ad21 fiber | 31406-32377 | 124 |
| Ad21 fiber tail | 31406-31531 | 125 |
| Ad21 fiber shaft | 31532-31804 | 126 |
| Ad21 fiber knob | 31805-32374 | 127 |
| Ad21 penton | 13878-15563 | 128 |
| Ad21 hexon | 18454-21303 | 129 |

TABLE 16
Ad21 Amino Acid Sequences
Ad21 Amino Acid Sequences

| | Exemplary Sequence | | SEQ |
|---|---|---|---|
| Component | (position in reference) | | ID NO: |
| Ad21 fiber | 1-323 | (GenBank accession no. AAW33370) | 130 |
| Ad21 fiber shaft | 43-133 | (GenBank accession no. AAW33370) | 131 |
| Ad21 fiber knob | 134-323 | (GenBank accession no. AAW33370) | 132 |
| Ad21 penton | 1-561 | (GenBank accession no. AAW33349) | 133 |
| Ad21 hexon | 1-949 | (GenBank accession no. AAW33354) | 134 |
| Ad21 fiber tail | 1-42 | (GenBank accession no. AAW33370) | 135 |

TABLE 17
Ad34 Genomic Sequences
Ad34 Genomic Sequences
Reference Ad34 Genome Sequence: GenBank
accession no. AY737797 (SEQ ID NO: 215)

| | Exemplary Sequence | |
|---|---|---|
| Component | (position in reference) | SEQ ID NO: |
| Ad34 5′ (left) ITR | 1-137 | 136 |
| Ad34 3′ (right) ITR | 34639-34775 | 137 |
| Ad34 Packaging | 138-479 | 138 |
| Sequence | | |
| Ad34 E1 | 480-3929 | 139 |
| Ad34 E2 | 23399-3945 | 140 |
| Ad34 E3 | 27185-30625 | 141 |
| Ad34 fiber | 30812-31783 | 142 |
| Ad34 fiber tail | 30812-30937 | 143 |
| Ad34 fiber shaft | 30938-31210 | 144 |
| Ad34 fiber knob | 31211-31780 | 145 |
| Ad34 penton | 13681-15357 | 146 |
| Ad34 hexon | 18244-21099 | 147 |

TABLE 18
Ad34 Amino Acid Sequences
Ad34 Amino Acid Sequences

| | Exemplary Sequence | | SEQ |
|---|---|---|---|
| Component | (position in reference) | | ID NO: |
| Ad34 fiber | 1-323 | (GenBank accession no. AAW33501) | 148 |
| Ad34 fiber shaft | 43-133 | (GenBank accession no. AAW33501) | 149 |
| Ad34 fiber knob | 134-323 | (GenBank accession no. AAW33501) | 150 |
| Ad34 penton | 1-558 | (GenBank accession no. ABC49791) | 151 |
| Ad34 hexon | 1-951 | (GenBank accession no. AAW33485) | 152 |
| Ad34 fiber tail | 1-42 | (GenBank accession no. AAW33501) | 153 |

TABLE 19
Ad35 Genomic Sequences
Ad35 Genomic Sequences
Reference Ad35 Genome Sequence: GenBank
accession no. AY128640 (SEQ ID NO: 216)

| | Exemplary Sequence | |
|---|---|---|
| Component | (position in reference) | SEQ ID NO: |
| Ad35 5′ (left) ITR | 1-137 | 154 |
| Ad35 3′ (right) ITR | 34658-34794 | 155 |
| Ad35 Packaging | 138-479 | 156 |
| Sequence | | |
| Ad35 E1 | 480-3400 | 157 |
| Ad35 E2 | 3966-23415 | 158 |
| Ad35 E3 | 27198-30622 | 159 |
| Ad35 fiber | 30826-31797 | 160 |
| Ad35 fiber tail | 30826-30951 | 161 |
| Ad35 fiber shaft | 30952-31224 | 162 |
| Ad35 fiber knob | 31225-31797 | 163 |
| Ad35 penton | 13690-15375 | 164 |
| Ad35 hexon | 18255-21113 | 165 |

TABLE 20
Ad35 Amino Acid Sequences
Ad35 Amino Acid Sequences

| | Exemplary Sequence | | SEQ ID |
|---|---|---|---|
| Component | (position in reference) | | NO: |
| Ad35 fiber | 1-323 | (GenBank accession no. AP 000601) | 166 |
| Ad35 fiber shaft | 43-133 | (GenBank accession no. AP 000601) | 167 |
| Ad35 fiber knob | 134-323 | (GenBank accession no. AP 000601) | 168 |
| Ad35 penton | 1-561 | (GenBank accession no. AP 000580) | 169 |
| Ad35 hexon | 1-952 | (GenBank accession no. AP 000585) | 170 |
| Ad35 fiber tail | 1-42 | (GenBank accession no. AP 000601) | 171 |

TABLE 21
Ad37 Genomic Sequences
Ad37 Genomic Sequences
Reference Ad37 Genome Sequence: GenBank
accession no. DQ900900 (SEQ ID NO: 217)

| | Exemplary Sequence | |
|---|---|---|
| Component | (position in reference) | SEQ ID NO: |
| Ad37 5′ (left) ITR | 1-159 | 172 |
| Ad37 3′ (right) ITR | 35055-35213 | 173 |
| Ad37 Packaging | 160-479 | 174 |
| Sequence | | |
| Ad37 E1 | 480-3867 | 175 |
| Ad37 E2 | 22777-3902 | 176 |
| Ad37 E3 | 26198-30771 | 177 |
| Ad37 fiber | 31038-32135 | 178 |
| Ad37 fiber tail | 31038-31163 | 179 |
| Ad37 fiber shaft | 31164-31592 | 180 |
| Ad37 fiber knob | 31593-32132 | 181 |
| Ad37 penton | 13530-15089 | 182 |
| Ad37 hexon | 17775-20624 | 183 |

TABLE 22
Ad37 Amino Acid Sequences
Ad37 Amino Acid Sequences

| | Exemplary Sequence | | SEQ ID |
|---|---|---|---|
| Component | (position in reference) | | NO: |
| Ad37 fiber | 1-361 | (GenBank accession no. ABK59080) | 184 |
| Ad37 fiber shaft | 43-185 | (GenBank accession no. ABK59080) | 185 |
| Ad37 fiber knob | 186-361 | (GenBank accession no. ABK59080) | 186 |
| Ad37 penton | 1-519 | (GenBank accession no. ABK59086) | 187 |
| Ad37 hexon | 1-949 | (GenBank accession no. ABK59070) | 188 |
| Ad37 fiber tail | 1-42 | (GenBank accession no. ABK59080) | 189 |

TABLE 23
Ad50 Genomic Sequences
Ad50 Genomic Sequences
Reference Ad50 Genome Sequence: GenBank
accession no. AY737798 (SEQ ID NO: 218)

| | Exemplary Sequence | |
|---|---|---|
| Component | (position in reference) | SEQ ID NO: |
| Ad50 5′ (left) ITR | 1-114 | 190 |
| Ad50 3′ (right) ITR | 35272-35385 | 191 |
| Ad50 Packaging | 115-479 | 192 |
| Sequence | | |
| Ad50 E1 | 480-3910 | 193 |
| Ad50 E2 | 23590-3923 | 194 |
| Ad50 E3 | 27102-31222 | 195 |
| Ad50 fiber | 31409-32380 | 196 |
| Ad50 fiber tail | 31409-31534 | 197 |
| Ad50 fiber shaft | 31535-31807 | 198 |
| Ad50 fiber knob | 31808-32377 | 199 |
| Ad50 penton | 13888-15570 | 200 |
| Ad50 hexon | 18460-21282 | 201 |

TABLE 24
Ad50 Amino Acid Sequences
Ad50 Amino Acid Sequences

| | Exemplary Sequence | | SEQ |
|---|---|---|---|
| Component | (position in reference) | | ID NO: |
| Ad50 fiber | 1-323 | (GenBank accession no. AAW33547) | 202 |
| Ad50 fiber shaft | 43-133 | (GenBank accession no. AAW33547) | 203 |
| Ad50 fiber knob | 134-323 | (GenBank accession no. AAW33547) | 204 |
| Ad50 penton | 1-560 | (GenBank accession No. AAW33525) | 205 |
| Ad50 hexon | 1-940 | (GenBank accession no. AAW33530) | 206 |
| Ad50 fiber tail | 1-42 | (GenBank accession no. AAW33547) | 207 |

[0374] In various embodiments, an Ad3, 5, 7, 11, 14, 16, 21, 34, 35, 37, or 50 vector or genome includes modifications that reduce and/or eliminate replication of the virus in recipients. Broadly, there are three recognized “generations” of adenoviral vectors and genomes engineered to reduce and/or eliminate replication of the virus in recipients. Adenoviral vectors of the present disclosure can include vectors according to any of these three generations.

[0375] In various embodiments, an Ad3, 5, 7, 11, 14, 16, 21, 34, 35, 37, or 50 genome differs from a reference Ad sequence (e.g., one or more canonical, representative, exemplary, or wild-type sequence of an adenovirus of a serotype of interest) at least in that the regulatory E1 gene (E1a and E1b) is removed from the Ad genome (“first generation” vector modifications). E1a and E1b are the first transcriptional regulatory factors produced during the adenoviral replication cycle. E1 deletion reduces or eliminates expression of certain viral genes controlled by E1, and E1-deleted helper viruses are replication-defective. Thus, first generation Ad vectors are deficient for replication in a recipient. In some embodiments, first-generation adenoviral vectors are engineered to remove E1 and E3 genes. Retained portions of the reference genome can be identical in sequence to a reference genome or can have less than 100% identity with a reference genome, e.g., at least 99%, 98%, 97%, 96%, 95%, 90%, 85%, 80%, or 75% identity. Without these E1 (or E1 and E3) genes, adenoviral vectors cannot replicate on their own but can be produced in mammalian cell lines that express E1 (e.g., of the same serotype) or another protein sufficient to restore expression of the certain viral genes. For illustration, where an E1-deficient Ad5 vector encodes an Ad5 E4orf6, the helper vector can be propagated in a cell line that expresses Ad5 E1. In one exemplary cell type for adenoviral vector production, HEK293 cells express Ad5 E1b55k, which is known to form a complex with Ad5 E4 protein ORF6.

[0376] In various embodiments, an Ad3, 5, 7, 11, 14, 16, 21, 34, 35, 37, or 50 genome differs from a reference Ad sequence at least in that the E1 gene (E1a and E1b) and one or more of non-structural genes E2, E3 and/or E4 are deleted (“second generation” modifications). Second generation Ads have greater payload capacity than first generation Ads and are more deficient for replication than first generation viruses. In some embodiments, second-generation adenoviral vectors, in addition to E1/E3 removal, are engineered to remove non-structural genes E2 and E4, resulting in increased capacity and reduced immunogenicity. Retained portions of the reference genome can be identical in sequence to a reference genome or can have less than 100% identity with a reference genome, e.g., at least 99%, 98%, 97%, 96%, 95%, 90%, 85%, 80%, or 75% identity.

[0377] In various embodiments, an Ad3, 5, 7, 11, 14, 16, 21, 34, 35, 37, or 50 genome differs from a reference Ad sequence at least in that they are engineered to remove all viral coding sequences from the Ad genome, and retain only the ITRs of the genome and the packaging sequence of the genome or a functional fragment thereof (“third generation” modifications). Third generation adenoviral vectors can also be referred to as gutless, high capacity adenoviral vectors, or helper-dependent adenoviral vectors (HdAds). Retained portions of the reference genome can be identical in sequence to a reference genome or can have less than 100% identity with a reference genome, e.g., at least 99%, 98%, 97%, 96%, 95%, 90%, 85%, 80%, or 75% identity.

[0378] Because third generation Ad genomes do not encode the proteins necessary for viral production, they are helper-dependent: a helper-dependent genome can only be packaged into a vector if they are present in a cell that includes a nucleic acid sequence that provides viral proteins in trans. These helper-dependent vectors are also characterized by still greater capacity than first and second generation vectors and decreased immunogenicity. Because HDAd vectors do not express viral genes when used as a vector, the risk of cytotoxicity or interferon response in recipients is reduced.

[0379] Helper-dependent adenoviral vectors (HDAd) engineered to lack all viral coding sequences can efficiently transduce a wide variety of cell types, and can mediate long-term transgene expression with negligible chronic toxicity. By deleting the viral coding sequences and leaving only the cis-acting elements necessary for genome replication (ITRs) and packaging (v), cellular immune response against the Ad vector is reduced. HDAd vectors have a large cloning capacity of up to allowing for the delivery of large payloads. These payloads can include large therapeutic genes or even multiple transgenes and large regulatory components to enhance, prolong, and regulate transgene expression. It has also been observed that the certain HDAd vector genomes can be most efficiently packaged when the genome has at least a minimum a total length, e.g., a minimum to total length of at least 20 kb (e.g., 20, 21, 22, 23, 24, 25, 26, 27, 28, 29, 30, 31, 32, 33, 34, or 35 kb) which length can include, e.g., a therapeutic payload and/or a “stuffer” sequence. Where a payload does not utilize a number of nucleotides that causes the adenoviral genome to have at least a target length, a stuffer sequence can be used to achieve or surpass the target length. The present disclosure includes that a minimum length for efficient packaging is not required for beneficial use of vectors provided herein, such that meeting any target length may be advantageous but not required for use of compositions and methods provided herein. Like other adenoviral vectors, typical HDAd genomes generally remain episomal and do not integrate with a host genome.

[0380] Because HDAd vectors do not encode the viral proteins required to produce viral particles, viral proteins must be provided in trans, e.g., expressed in and/or by cells in which the HDAd genome is present. In some HDAd vector systems, one viral genome (a helper genome) encodes all of the proteins (e.g., all of the structural viral proteins) required for replication but has a conditional defect in the packaging sequence, making it less likely to be packaged into a vector under certain vector production conditions (e.g., in the presence of an agent that reduces function of the conditionally defective packaging sequence). Thus, the HDAd donor viral genome includes (e.g., only includes) Ad ITRs, a payload (e.g., a therapeutic payload), and a functional packaging sequence (e.g., a wild-type packaging sequence or a functional fragment thereof), which allows the HDAd donor viral genome to be selectively packaged into HDAd viral vectors produced from structural components expressed from the helper vector genome. In other words, Ad3, 5, 7, 11, 14, 16, 21, 34, 35, 37, or 50 helper vectors can be used for production of Ad3, 5, 7, 11, 14, 16, 21, 34, 35, 37, or 50 donor vectors. Production of HD Ad3, 5, 7, 11, 14, 16, 21, 34, 35, 37, or 50 vectors can include co-transfection of a plasmid containing the HDAd vector genome and a packaging-defective helper virus that provides structural and non-structural viral proteins. The helper virus genome can rescue propagation of the Ad3, 5, 7, 11, 14, 16, 21, 34, 35, 37, or 50 donor vector and Ad3, 5, 7, 11, 14, 16, 21, 34, 35, 37, or 50 donor vector can be produced, e.g., at a large scale, and isolated. Various protocols are known in the art, e.g., at Palmer et al., 2009 Gene Therapy Protocols. Methods in Molecular Biology, Volume 433. Humana Press; Totowa, NJ: 2009. pp. 33-53. In some embodiments, a helper genome is E1-deficient.

[0381] In some HDAd vector systems, a helper genome utilizes a recombinase system (e.g., a Cre/loxP system) for conditional packaging. In certain such HDAd vector systems, a helper genome can include a packaging sequence or functional fragment thereof (e.g., a fragment of the packaging sequence that is sufficient for packaging, required for packaging, or required for efficient packaging of the Ad genome into the capsid) flanked by recombinase (e.g., loxP) sites so that contact with a corresponding recombinase (e.g., Cre recombinase) excises the packaging sequence or functional fragment thereof from the helper genome by recombinase-mediated (e.g., Cre-mediated) site-specific recombination between the recombinase sites (e.g., loxP sites). The present disclosure includes, among other things, Ad3, 5, 7, 11, 14, 16, 21, 34, 35, 37, or 50 helper vectors and genomes that include two recombination sites that flank a packaging sequence or functional fragment thereof, where the two recombination sites are sites corresponding to (i.e., for, or acted upon by) the same recombinase.

[0382] In various embodiments, a helper genome can include deletion of E1, e.g., where the helper genome includes all of the viral genes except for E1, as E1 expression products can be supplied by complementary expression from the genome of a producer cell line. In some embodiments, to prevent generation of replication competent Ad (RCA) as a consequence of homologous recombination between the helper and HDAd donor genomes present in producer cells, a “stuffer” sequence can be inserted into the E3 region to render any recombinants too large to be packaged and/or efficiently packaged.

[0383] For production of HDAd vectors, an HDAd donor genome can be delivered to cells that express a recombinase for excision of the conditional packaging sequence of a helper vector (e.g., 293 cells (HEK293) that expresses Cre recombinase), optionally where the HDAd donor genome is delivered to the cells in a non-viral vector form, such as a bacterial plasmid form (e.g., where the HDAd donor genome is present in a bacterial plasmid (pHDAd) and/or is liberated by restriction enzyme digestion). The same cells can be transduced with the helper genome including a packaging sequence or functional fragment thereof flanked by recombinase sites (e.g., loxP sites). Thus, producer cells can be transfected with the HDAd donor genome and transduced with a helper genome bearing a packaging sequence or a functional fragment thereof flanked by recombinase sites (e.g., loxP sites), where the cells express a recombinase (e.g., Cre) corresponding to the recombinase sites such that excision of the packaging sequence or functional fragment thereof renders the helper virus genome deficient for packaging (e.g., unpackageable), but still able to provide all of the necessary trans-acting factors for production of HDAd donor vector including the HDAd donor genome.

[0384] Similar HDAd production systems have been developed using FLP (e.g., FLPe)/frt site-specific recombination, where FLP-mediated recombination between frt sites flanking the packaging sequence or functional fragment thereof of the helper genome reduces or eliminates packaging of helper genomes in producer cells that express FLP.

[0385] HDAd vectors including the donor vector genome including the payload can be isolated from the producer cells. HDAd donor vectors can be further purified from helper vectors by physical means. In general, some contamination of helper vectors and/or helper genomes in HDAd viral vectors and HDAd viral vector formulations can occur and can be tolerated.

[0386] HDAd3, 5, 7, 11, 14, 16, 21, 34, 35, 37, and 50 donor vectors, donor genomes, helper vectors, and helper genomes are also exemplary of compositions provided herein and can be used in various methods of the present disclosure. An HDAd3, 5, 7, 11, 14, 16, 21, 34, 35, 37, or 50 vector or genome is a helper-dependent Ad3, 5, 7, 11, 14, 16, 21, 34, 35, 37, or 50 vector or genome. An Ad3, 5, 7, 11, 14, 16, 21, 34, 35, 37, or 50 helper vector is a vector that includes a helper genome that includes a conditionally expressed (e.g., frt-site or loxP-site flanked) packaging sequence or fragment thereof and encodes all of the necessary trans-acting factors for production of Ad3, 5, 7, 11, 14, 16, 21, 34, 35, 37, or 50 virions into which the donor genome can be packaged.

[0387] The present disclosure further includes an HDAd3, 5, 7, 11, 14, 16, 21, 34, 35, 37, or 50 donor vector production system including a cell including an HDAd3, 5, 7, 11, 14, 16, 21, 34, 35, 37, or 50 donor genome and an Ad3, 5, 7, 11, 14, 16, 21, 34, 35, 37, or 50 helper genome. In certain such cells, viral proteins encoded and expressed by the helper genome can be utilized in production of HDAd3, 5, 7, 11, 14, 16, 21, 34, 35, 37, or 50 donor vectors in which the HDAd3, 5, 7, 11, 14, 16, 21, 34, 35, 37, or 50 donor genome is packaged. Accordingly, the present disclosure includes methods of production of HDAd3, 5, 7, 11, 14, 16, 21, 34, 35, 37, or 50 donor vectors by culturing cells that include an HDAd3, 5, 7, 11, 14, 16, 21, 34, 35, 37, or 50 donor genome and an Ad3, 5, 7, 11, 14, 16, 21, 34, 35, 37, or 50 helper genome. In some embodiments, the cells encode and express a recombinase that corresponds to recombinase direct repeats that flank a packaging sequence of the Ad3, 5, 7, 11, 14, 16, 21, 34, 35, 37, or 50 helper vector. In some embodiments, the flanked packaging sequence of the Ad3, 5, 7, 11, 14, 16, 21, 34, 35, 37, or 50 helper genome has been excised.

[0388] In some embodiments, the Ad3, 5, 7, 11, 14, 16, 21, 34, 35, 37, or 50 helper genome encodes all Ad3, 5, 7, 11, 14, 16, 21, 34, 35, 37, or 50 coding sequences. In some embodiments, the Ad3, 5, 7, 11, 14, 16, 21, 34, 35, 37, or 50 helper genome encodes and/or expresses all Ad3, 5, 7, 11, 14, 16, 21, 34, 35, 37, or 50 coding sequences except for one or more coding sequences of E1 and/or an E3 coding sequence and/or an E4 coding sequence. In various embodiments, a helper genome that does not encode and/or express an Ad3, 5, 7, 11, 14, 16, 21, 34, 35, 37, or 50 E1 gene does not encode and/or express an Ad3, 5, 7, 11, 14, 16, 21, 34, 35, 37, or 50 E4 gene. In various embodiments, as will be appreciate by those of skill in the art, cells of compositions and methods for production of HDAd donor vectors can be cells that express an E1 expression product.

[0389] The present disclosure includes, among other things, HDAd3, 5, 7, 11, 14, 16, 21, 34, 35, 37, or 50 donor vectors and genomes that include Ad3, 5, 7, 11, 14, 16, 21, 34, 35, 37, or 50 ITRs (a 5′ Ad3, 5, 7, 11, 14, 16, 21, 34, 35, 37, or 50 ITR and a 3′ ITR of the same serotype), e.g., where two Ad3, 5, 7, 11, 14, 16, 21, 34, 35, 37, or 50 ITRs flank a packaging sequence and a payload. The present disclosure includes, among other things, HDAd3, 5, 7, 11, 14, 16, 21, 34, 35, 37, or 50 donor vectors and genomes in which E1 or a fragment thereof is deleted. The present disclosure includes, among other things, HDAd3, 5, 7, 11, 14, 16, 21, 34, 35, 37, or 50 vectors and genomes in which E3 or a fragment thereof is deleted.

[0390] In various embodiments, excision of a packaging sequence or functional fragment thereof from an Ad3, 5, 7, 11, 14, 16, 21, 34, 35, 37, or 50 helper genome reduces propagation of the vector by, e.g., at least 20%, 30%, 40%, 50%, 60%, 70%, 80%, 90%, 91%, 92%, 93%, 94%, 95%, 96%, 97%, 98%, 99%, 99.5%, 99.9%, or 100% (e.g., reduces propagation of the vector by a percentage having a lower bound of 20%, 30%, 40%, 50%, 60%, 70%, and an upper bound of 60%, 70%, 80%, 90%, 91%, 92%, 93%, 94%, 95%, 96%, 97%, 98%, 99%, 99.5%, 99.9% or 100%), optionally where percent propagation is measured as the number of viral particles produced by propagation of excised vector (vector from which the recombinase site-flanked sequence has been excised) as compared to complete vector (vector from which the recombinase site-flanked sequence has not been excised) or as compared to wild-type Ad3, 5, 7, 11, 14, 16, 21, 34, 35, 37, or 50 vector under comparable conditions.

[0391] An additional optional engineering consideration can be engineering of a helper genome having a size that permits separation of helper vector from HDAd3, 5, 7, 11, 14, 16, 21, 34, 35, 37, or 50 donor vector by centrifugation, e.g., by CsCl ultracentrifugation. One means of achieving this result is to increase the size of the helper genome as compared to a typical Ad3, 5, 7, 11, 14, 16, 21, 34, 35, 37, or 50 genome. In particular, adenoviral genomes can be increased by engineering to at least 104% of wild-type length. Certain helper vectors of the present disclosure can accommodate a payload and/or stuffer sequence.

[0392] The present disclosure includes that in various embodiments a vector or genome of the present disclosure can include a selection of components each selected from, or having at least 75% sequence identity (e.g., at least 75%, 80%, 85%, 90%, 95%, 96%, 97%, 98%, 99%, or 100% identity) to, a corresponding sequence of a single particular serotype. To provide an illustrative example, all components can correspond to (e.g., have at least 75% sequence identity to sequences of) Ad34, excepting sequences otherwise indicated (e.g., a payload, e.g., a heterologous payload).

[0393] In various embodiments, a vector of the present disclosure is an HDAd5/35 vector that includes Ad5 capsid proteins except that the fibers are chimeric in that they include an Ad5 fiber tail, an Ad35 fiber shaft, and an Ad35 fiber knob, optionally wherein the Ad35 fiber knob is mutated for increased affinity to CD46 (e.g., Ad5/35++). In particular embodiments, an Ad5/35++ vector is a chimeric Ad5/35 vector with a mutant Ad35++ fiber knob (see, e.g., Wang et al., 2008 J. Virol. 82 (21): 10567-79, which is incorporated herein by reference in its entirety and particularly with respect to fiber knob mutations). In various embodiments, an Ad35++ mutant fiber knob is an Ad35 fiber knob mutated to increase the affinity to CD46, e.g., by 25-fold, e.g., such that the Ad35++ mutant fiber knob increases cell transduction efficiency, e.g., at lower multiplicity of infection (MOI) (Li and Lieber, FEBS Letters, 593 (24): 3623-3648, 2019). In various embodiments, an adenoviral vector or genome of the present disclosure can be an adenoviral vector and/or genome disclosed in WO 2021/003432, which is herein incorporated by reference in its entirety, and particularly with respect to adenoviral vectors and genomes.

### Gene Therapy

[0394] Methods and compositions provided herein are disclosed at least in part for use in in vivo, in vitro, and or ex vivo gene therapy. As used herein, the term in vivo has its art-recognized meaning, such that in vivo modification and in vivo gene therapy include modification of a cell and/or a component thereof (e.g., the genome of a cell or an mRNA molecule expressed therefrom) that is present in a living multicellular (e.g., mammalian, e.g., human) organism. However, for the avoidance of doubt, the present disclosure expressly includes the use of compositions and methods provided herein for ex-vivo engineering of cells and/or tissues, as well as in vitro uses including the engineering of cells and/or tissues for research purposes. As used herein, the term in vitro has its art-recognized meaning, such that in vitro modification and in vitro gene therapy include modification of a cell and/or a component thereof (e.g., the genome of a cell or an mRNA molecule expressed therefrom) that is present in an artificial environment (e.g., in a test tube, reaction vessel, incubator, or cell culture, etc.), rather than within a living multicellular (e.g., mammalian, e.g., human) organism. As used herein, the term ex vivo has its art-recognized meaning, such that ex vivo modification and ex vivo gene therapy include modification of a cell and/or a component thereof (e.g., the genome of a cell or an mRNA molecule expressed therefrom) that is present in an artificial environment (e.g., in a test tube, reaction vessel, incubator, or cell culture, etc.), rather than within a multicellular (e.g., mammalian, e.g., human) organism, after separation of the cell or component thereof from a multicellular (e.g., mammalian, e.g., human) organism. Gene therapy includes use of a vector, nucleic acid, and/or editing system of the present disclosure in a method of engineering a nucleic acid of a host cell (such as a target cell). Because such compositions and methods are of general utility, e.g., in gene therapy, they are useful both as tools in gene therapy in general and in various particular conditions, including those provided herein.

[0395] In vivo gene therapy is an attractive approach because it may not require any genotoxic conditioning (or could require less genotoxic conditioning) or ex vivo cell processing and thus could be adopted at many institutions worldwide, including those in developing countries, as the therapy could be administered through an injection, similar to platforms already used worldwide for delivery of vaccines. In various embodiments, methods of in vivo gene therapy with vectors of the present disclosure can include one or more steps of (i) target cell mobilization, (ii) immunosuppression, (iii) administration of a vector and/or editing system provided herein, and/or (iv) selection of modified cells.

[0396] Editing systems, nucleic acids, and vectors disclosed herein can be used for treating subjects (humans, veterinary animals (dogs, cats, reptiles, birds, etc.), livestock (horses, cattle, goats, pigs, chickens, etc.), and research animals (monkeys, rats, mice, fish, etc.). Treating subjects includes delivering therapeutically effective amounts of one or more editing systems, nucleic acids, or vectors of the present disclosure. Therapeutically effective amounts include those that provide therapeutic benefit in the treatment of a disease, disorder, or condition.

[0397] Vectors described herein can be administered in coordination with mobilization factors. In certain embodiments, vector formulations described herein can be administered in concert with HSPC and/or HSC mobilization. In particular embodiments, administration of vectors occurs concurrently with administration of one or more mobilization factors. In particular embodiments, administration of vector follows administration of one or more mobilization factors. In particular embodiments, administration of vector follows administration of a first one or more mobilization factors and occurs concurrently with administration of a second one or more mobilization factors. Agents for HSPC and/or HSC mobilization include, for example, granulocyte-colony stimulating factor (G-CSF), granulocyte macrophage colony stimulating factor (GM-CSF), AMD3100, SCF, S-CSF, a CXCR4 antagonist, a CXCR2 agonist, and Gro-Beta (GRO-β). In various embodiments, a CXCR4 antagonist is AMD3100 and/or a CXCR2 agonist is GRO-β.

[0398] In certain embodiments, vector formulations described herein are not administered in concert with HSPC and/or HSC mobilization, e.g., when it is desired to deliver an editing nucleic acid to cells other than HSPCs and/or HSCs.

[0399] G-CSF is a cytokine whose functions in HSPC and/or HSC mobilization can include the promotion of granulocyte expansion and both protease-dependent and independent attenuation of adhesion molecules and disruption of the SDF-1/CXCR4 axis. In particular embodiments, any commercially available form of G-CSF known to one of ordinary skill in the art can be used in the methods and formulations as disclosed herein, for example, Filgrastim (Neupogen®, Amgen Inc., Thousand Oaks, CA) and PEGylated Filgrastim (Pegfilgrastim, NEULASTA®, Amgen Inc., Thousand Oaks, CA).

[0400] GM-CSF is a monomeric glycoprotein also known as colony-stimulating factor 2 (CSF2) that functions as a cytokine and is naturally secreted by macrophages, T cells, mast cells, natural killer cells, endothelial cells, and fibroblasts. In particular embodiments, any commercially available form of GM-CSF known to one of ordinary skill in the art can be used in the methods and formulations as disclosed herein, for example, Sargramostim (Leukine, Bayer Healthcare Pharmaceuticals, Seattle, WA) and molgramostim (Schering-Plough, Kenilworth, NJ).

[0401] AMD3100 (MOZOBIL™, PLERIXAFOR™; Sanofi-Aventis, Paris, France), a synthetic organic molecule of the bicyclam class, is a chemokine receptor antagonist and reversibly inhibits SDF-1 binding to CXCR4, promoting HSPC and/or HSC mobilization. AMD3100 is approved to be used in combination with G-CSF for HSPC and/or HSC mobilization in patients with myeloma and lymphoma.

[0402] SCF, also known as KIT ligand, KL, or steel factor, is a cytokine that binds to the c-kit receptor (CD117). SCF can exist both as a transmembrane protein and a soluble protein. This cytokine plays an important role in hematopoiesis, spermatogenesis, and melanogenesis. In particular embodiments, any commercially available form of SCF known to one of ordinary skill in the art can be used in the methods and formulations as disclosed herein, for example, recombinant human SCF (Ancestim, STEMGEN®, Amgen Inc., Thousand Oaks, CA).

[0403] Chemotherapy used in intensive myelosuppressive treatments also mobilizes HSPCs to the peripheral blood as a result of compensatory neutrophil production following chemotherapy-induced aplasia. In particular embodiments, chemotherapeutic agents that can be used for mobilization of HSPCs and/or HSCs include cyclophosphamide, etoposide, ifosfamide, cisplatin, and cytarabine.

[0404] Additional agents that can be used for cell mobilization include: CXCL12/CXCR4 modulators (e.g., CXCR4 antagonists: POL6326 (Polyphor, Allschwil, Switzerland), a synthetic cyclic peptide which reversibly inhibits CXCR4; BKT-140 (4F-benzoyl-TN14003; Biokine Therapeutics, Rehovit, Israe); TG-0054 (Taigen Biotechnology, Taipei, Taiwan); CXCL12 neutralizer NOX-A12 (NOXXON Pharma, Berlin, Germany) which binds to SDF-1, inhibiting its binding to CXCR4); Sphingosine-1-phosphate (SIP) agonists (e.g., SEW2871, Juarez et al., Blood 119:707-716, 2012); vascular cell adhesion molecule-1 (VCAM) or very late antigen 4 (VLA-4) inhibitors (e.g., Natalizumab, a recombinant humanized monoclonal antibody against α4 subunit of VLA-4 (Zohren et al., Blood 111:3893-3895, 2008); BIO5192, a small molecule inhibitor of VLA-4 (Ramirez et al., Blood 114:1340-1343, 2009)); parathyroid hormone (Brunner et al., Exp Hematol. 36:1157-1166, 2008); proteasome inhibitors (e.g., Bortezomib, Ghobadi et al., ASH Annual Meeting Abstracts. p. 583, 2012); Groβ, a member of CXC chemokine family which stimulates chemotaxis and activation of neutrophils by binding to the CXCR2 receptor (e.g., SB-251353, King et al., Blood 97:1534-1542, 2001); stabilization of hypoxia inducible factor (HIF) (e.g., FG-4497, Forristal et al., ASH Annual Meeting Abstracts. p. 216, 2012); Firategrast, an α4β1 and α4β7 integrin inhibitor (α4β1/7) (Kim et al., Blood 128:2457-2461, 2016); Vedolizumab, a humanized monoclonal antibody against the α4β7 integrin (Rosario et al., Clin Drug Investig 36:913-923, 2016); and BOP (N-(benzenesulfonyl)-L-prolyl-L-O-(1-pyrrolidinylcarbonyl) tyrosine) which targets integrins α9β1/α4β1 (Cao et al., Nat Commun 7:11007, 2016). Additional agents that can be used for HSPC and/or HSC mobilization are described in, for example, Richter R et al., Transfus Med Hemother 44:151-164, 2017, Bendall & Bradstock, Cytokine & Growth Factor Reviews 25:355-367, 2014, WO 2003043651, WO 2005017160, WO 2011069336, U.S. Pat. Nos. 5,637,323, 7,288,521, 9,782,429, US 2002/0142462, and US 2010/02268.

[0405] In particular embodiments, a therapeutically effective amount of G-CSF includes 0.1 μg/kg to 100 μg/kg. In particular embodiments, a therapeutically effective amount of G-CSF includes 0.5 μg/kg to 50 μg/kg. In particular embodiments, a therapeutically effective amount of G-CSF includes 0.5 μg/kg, 1 μg/kg, 2 μg/kg, 3 μg/kg, 4 μg/kg, 5 μg/kg, 6 g/kg, 7 μg/kg, 8 μg/kg, 9 μg/kg, 10 μg/kg, 11 μg/kg, 12 μg/kg, 13 μg/kg, 14 μg/kg, 15 μg/kg, 16 μg/kg, 17 μg/kg, 18 μg/kg, 19 μg/kg, 20 μg/kg, or more. In particular embodiments, a therapeutically effective amount of G-CSF includes 5 μg/kg. In particular embodiments, G-CSF can be administered subcutaneously or intravenously. In particular embodiments, G-CSF can be administered for 1 day, 2 consecutive days, 3 consecutive days, 4 consecutive days, 5 consecutive days, or more. In particular embodiments, G-CSF can be administered for 4 consecutive days. In particular embodiments, G-CSF can be administered for 5 consecutive days. In particular embodiments, as a single agent, G-CSF can be used at a dose of 10 μg/kg subcutaneously daily, initiated 3, 4, 5, 6, 7, or 8 days before adenoviral delivery. In particular embodiments, G-CSF can be administered as a single agent followed by concurrent administration with another mobilization factor. In particular embodiments, G-CSF can be administered as a single agent followed by concurrent administration with AMD3100. In particular embodiments, a treatment protocol includes a 5 day treatment where G-CSF can be administered on day 1, day 2, day 3, and day 4 and on day 5, G-CSF and AMD3100 are administered 6 to 8 hours prior to adenoviral administration.

[0406] Therapeutically effective amounts of GM-CSF to administer can include doses ranging from, for example, 0.1 to 50 μg/kg or from 0.5 to 30 μg/kg. In particular embodiments, a dose at which GM-CSF can be administered includes 0.5 μg/kg, 1 μg/kg, 2 μg/kg, 3 μg/kg, 4 μg/kg, 5 μg/kg, 6 μg/kg, 7 μg/kg, 8 μg/kg, 9 μg/kg, 10 μg/kg, 11 μg/kg, 12 μg/kg, 13 μg/kg. 14 μg/kg, 15 μg/kg, 16 μg/kg, 17 μg/kg, 18 μg/kg, 19 μg/kg, 20 μg/kg, or more. In particular embodiments, GM-CSF can be administered subcutaneously for 1 day, 2 consecutive days, 3 consecutive days, 4 consecutive days, 5 consecutive days, or more. In particular embodiments, GM-CSF can be administered subcutaneously or intravenously. In particular embodiments, GM-CSF can be administered at a dose of 10 μg/kg subcutaneously daily initiated 3, 4, 5, 6, 7, or 8 days before adenoviral delivery. In particular embodiments, GM-CSF can be administered as a single agent followed by concurrent administration with another mobilization factor. In particular embodiments, GM-CSF can be administered as a single agent followed by concurrent administration with AMD3100. In particular embodiments, a treatment protocol includes a 5 day treatment where GM-CSF can be administered on day 1, day 2, day 3, and day 4 and on day 5, GM-CSF and AMD3100 are administered 6 to 8 hours prior to adenoviral administration. A dosing regimen for Sargramostim can include 200 μg/m², 210 μg/m², 220 μg/m², 230 μg/m², 240 μg/m², 250 μg/m², 260 μg/m², 270 μg/m², 280 μg/m², 290 μg/m², 300 μg/m², or more. In particular embodiments, Sargramostim can be administered for 1 day, 2 consecutive days, 3 consecutive days, 4 consecutive days, 5 consecutive days, or more. In particular embodiments, Sargramostim can be administered subcutaneously or intravenously. In particular embodiments, a dosing regimen for Sargramostim can include 250 μg/m²/day intravenous or subcutaneous and can be continued until a targeted cell amount is reached in the peripheral blood or can be continued for 5 days. In particular embodiments, Sargramostim can be administered as a single agent followed by concurrent administration with another mobilization factor. In particular embodiments, Sargramostim can be administered as a single agent followed by concurrent administration with AMD3100. In particular embodiments, a treatment protocol includes a 5 day treatment where Sargramostim can be administered on day 1, day 2, day 3, and day 4 and on day 5, Sargramostim and AMD3100 are administered 6 to 8 hours prior to adenoviral administration.

[0407] In particular embodiments, a therapeutically effective amount of AMD3100 includes 0.1 mg/kg to 100 mg/kg. In particular embodiments, a therapeutically effective amount of AMD3100 includes 0.5 mg/kg to 50 mg/kg. In particular embodiments, a therapeutically effective amount of AMD3100 includes 0.5 mg/kg, 1 mg/kg, 2 mg/kg, 3 mg/kg, 4 mg/kg, 5 mg/kg, 6 mg/kg, 7 mg/kg, 8 mg/kg, 9 mg/kg, 10 mg/kg, 11 mg/kg, 12 mg/kg, 13 mg/kg, 14 mg/kg, 15 mg/kg, 16 mg/kg, 17 mg/kg, 18 mg/kg, 19 mg/kg, 20 mg/kg, or more. In particular embodiments, a therapeutically effective amount of AMD3100 includes 4 mg/kg. In particular embodiments, a therapeutically effective amount of AMD3100 includes 5 mg/kg. In particular embodiments, a therapeutically effective amount of AMD3100 includes 10 μg/kg to 500 μg/kg or from 50 μg/kg to 400 μg/kg. In particular embodiments, a therapeutically effective amount of AMD3100 includes 100 g/kg, 150 μg/kg, 200 μg/kg, 250 μg/kg, 300 μg/kg, 350 μg/kg, or more. In particular embodiments, AMD3100 can be administered subcutaneously or intravenously. In particular embodiments, AMD3100 can be administered subcutaneously at 160-240 μg/kg 6 to 11 hours prior to adenoviral delivery. In particular embodiments, a therapeutically effective amount of AMID3100 can be administered concurrently with administration of another mobilization factor. In particular embodiments, a therapeutically effective amount of AMD3100 can be administered following administration of another mobilization factor. In particular embodiments, a therapeutically effective amount of AMD3100 can be administered following administration of G-CSF. In particular embodiments, a treatment protocol includes a 5-day treatment where G-CSF is administered on day 1, day 2, day 3, and day 4 and on day 5, G-CSF and AMD3100 are administered 6 to 8 hours prior to adenoviral injection.

[0408] Therapeutically effective amounts of SCF to administer can include doses ranging from, for example, 0.1 to 100 μg/kg/day or from 0.5 to 50 μg/kg/day. In particular embodiments, a dose at which SCF can be administered includes 0.5 μg/kg/day, 1 μg/kg/day, 2 μg/kg/day, 3 g/kg/day, 4 μg/kg/day, 5 μg/kg/day, 6 μg/kg/day, 7 μg/kg/day, 8 μg/kg/day, 9 μg/kg/day, 10 μg/kg/day, 11 μg/kg/day, 12 μg/kg/day, 13 μg/kg/day, 14 μg/kg/day, 15 μg/kg/day, 16 μg/kg/day, 17 μg/kg/day, 18 μg/kg/day, 19 μg/kg/day, 20 μg/kg/day, 21 μg/kg/day, 22 μg/kg/day, 23 μg/kg/day, 24 μg/kg/day, 25 μg/kg/day, 26 μg/kg/day, 27 μg/kg/day, 28 μg/kg/day, 29 μg/kg/day, 30 μg/kg/day, or more. In particular embodiments, SCF can be administered for 1 day, 2 consecutive days, 3 consecutive days, 4 consecutive days, 5 consecutive days, or more. In particular embodiments, SCF can be administered subcutaneously or intravenously. In particular embodiments, SCF can be injected subcutaneously at 20 μg/kg/day. In particular embodiments, SCF can be administered as a single agent followed by concurrent administration with another mobilization factor. In particular embodiments, SCF can be administered as a single agent followed by concurrent administration with AMD3100. In particular embodiments, a treatment protocol includes a 5 day treatment where SCF can be administered on day 1, day 2, day 3, and day 4 and on day 5, SCF and AMD3100 are administered 6 to 8 hours prior to adenoviral administration.

[0409] In particular embodiments, growth factors GM-CSF and G-CSF can be administered to mobilize HSPCs and/or HSCs in the bone marrow niches to the peripheral circulating blood to increase the fraction of HSPCs and/or HSCs circulating in the blood. In particular embodiments, mobilization can be achieved with administration of G-CSF/Filgrastim (Amgen) and/or AMD3100 (Sigma). In particular embodiments, mobilization can be achieved with administration of GM-CSF/Sargramostim (Amgen) and/or AMD3100 (Sigma). In particular embodiments, mobilization can be achieved with administration of SCF/Ancestim (Amgen) and/or AMD3100 (Sigma). In particular embodiments, administration of G-CSF/Filgrastim precedes administration of AMD3100. In particular embodiments, administration of G-CSF/Filgrastim occurs concurrently with administration of AMD3100. In particular embodiments, administration of G-CSF/Filgrastim precedes administration of AMD3100, followed by concurrent administration of G-CSF/Filgrastim and AMD3100. US 20140193376 describes mobilization protocols utilizing a CXCR4 antagonist with a S1P receptor 1 (S1PR1) modulator agent. US20110044997 describes mobilization protocols utilizing a CXCR4 antagonist with a vascular endothelial growth factor receptor (VEGFR) agonist.

[0410] In particular embodiments, administration of vector occurs concurrently with administration of one or more mobilization factors. In particular embodiments, administration of vector follows administration of one or more mobilization factors. In particular embodiments, administration of vector follows administration of a first one or more mobilization factors and occurs concurrently with administration of a second one or more mobilization factors.

[0411] In particular embodiments, an HSC enriching agent, such as a CD19 immunotoxin or 5-FU can be administered to enrich for HSPCs and/or HSCs. CD19 immunotoxin can be used to deplete all CD19 lineage cells, which accounts for 30% of bone marrow cells. Depletion encourages exit from the bone marrow. By forcing HSPCs and/or HSCs to proliferate (whether via, e.g., CD19 immunotoxin of 5-FU), this stimulates their differentiation and exit from the bone marrow and increases modified cells in peripheral blood cells.

[0412] Therapeutically effective amounts of HSPC and/or HSC mobilization factors, and/or HSPC and/or HSC enriching agents, can be administered through any appropriate administration route such as by, injection, infusion, perfusion, and more particularly by administration by one or more of bone marrow, intravenous, intradermal, intraarterial, intranodal, intralymphatic, intraperitoneal injection, infusion, or perfusion).

[0413] In particular embodiments, methods of the present disclosure can include selection for modified cells. In various embodiments, modified cells include cells modified to include a nucleic acid that encodes inhibitor-resistant MGMT. In various embodiments, modified cells include cells modified to include a nucleic acid that encodes inhibitor-resistant MGMT and to include, integrate, and/or express a therapeutic payload. In various embodiments, administration of a selection regimen can select for modified cells (e.g., modified HSCs), eliminate non-modified cells (e.g., non-modified HSCs), and/or contribute to therapeutic efficacy. In various embodiments, selection includes administering a selection regimen to a subject or system including one or more modified cells.

[0414] In various embodiments, a selection regimen includes an MGMT inhibitor. In various embodiments, a selection regimen includes an MGMT inhibitor and an alkylating agent. In various embodiments, a selection regimen can include an MGMT inhibitor disclosed herein and an alkylating agent disclosed herein. In various embodiments, a selection regimen includes a single composition or formulation that includes an MGMT inhibitor and an alkylating agent. In various embodiments, a selection regimen includes a first composition or formulation that includes an MGMT inhibitor and at least a second formulation or composition that includes an alkylating agent. In various embodiments, an MGMT inhibitor and an alkylating agent of a selection regimen are administered together (e.g., within the same period of 15, 30, 45, or 60 minutes). In various embodiments, an MGMT inhibitor and an alkylating agent of a selection regimen are administered separately (e.g., at times separated by period of at least 15, 30, 45, or 60 minutes).

[0415] In certain particular embodiments, a selection regimen includes O⁶BG or an analog or derivative thereof and an alkylating agent. In certain particular embodiments, a selection regimen includes O⁶BG or an analog or derivative thereof and BCNU. In certain particular embodiments, a selection regimen includes O⁶BG or an analog or derivative thereof and temozolomide. In certain particular embodiments, a selection regimen includes O⁶BG and an alkylating agent. In certain particular embodiments, a selection regimen includes O⁶BG and BCNU. In certain particular embodiments, a selection regimen includes O⁶BG and temozolomide. In certain particular embodiments, a selection regimen includes O⁶-(4-bromothenyl) guanine (O⁶BTG; PaTrin-2) and an alkylating agent. In certain particular embodiments, a selection regimen includes O⁶-(4-bromothenyl) guanine (O⁶BTG; PaTrin-2) and BCNU. In certain particular embodiments, a selection regimen includes O⁶-(4-bromothenyl) guanine (O′BTG; PaTrin-2) and temozolomide.

[0416] In certain particular embodiments, a selection regimen includes an MGMT inhibitor and BCNU. In certain particular embodiments, a selection regimen includes an MGMT inhibitor and temozolomide.

[0417] In various embodiments, a selection regimen or selection agent thereof is administered together with or concurrently with a vector of the present disclosure to a subject, cell, or system. In various embodiments, a selection regimen or selection agent thereof is administered within 1 hour, 30 minutes, 15 minutes, 10 minutes, 5 minutes, or 1 minute of administration of a vector to a subject, cell, or system

[0418] In various embodiments, a selection regimen or selection agent thereof is administered after administration of a vector of the present disclosure to a subject, cell, or system. In certain embodiments, a selection regimen or selection agent thereof is administered at least, up to, or about 1 hour, 2 hours, 3, hours, 4 hours, 5 hours, 6 hours, 12 hours, 1 day, 2 days, 3 days, 4 days, 5 days, 6 days, 1 week, 2 weeks, 3 weeks, 4 weeks, 6 weeks, 8 weeks, 10 weeks, 12 weeks, 14 weeks, 16 weeks, 18 weeks, 20 weeks, 22 weeks, and/or 24 weeks after administration of a vector to a subject, cell, or system.

[0419] In various embodiments, a selection regimen or selection agent thereof is administered prior to administration of a vector of the present disclosure to a subject, cell, or system. In certain embodiments, a selection regimen or selection agent thereof is administered at least, up to, or about 1 hour, 2 hours, 3, hours, 4 hours, 5 hours, 6 hours, 12 hours, 1 day, 2 days, 3 days, 4 days, 5 days, 6 days, 1 week, 2 weeks, 3 weeks, 4 weeks, 6 weeks, 8 weeks, 10 weeks, 12 weeks, 14 weeks, 16 weeks, 18 weeks, 20 weeks, 22 weeks, and/or 24 weeks prior to administration of a vector to a subject, cell, or system.

[0420] Vectors can be administered concurrently with or following administration of one or more immunosuppression agents or immunosuppression regimens. In various embodiments, one or more immunosuppression agents or immunosuppression regimens are administered after administration of a vector of the present disclosure to a subject, cell, or system. In certain embodiments, one or more immunosuppression agents or immunosuppression regimens are administered at least, up to, or about 1 hour, 2 hours, 3, hours, 4 hours, 5 hours, 6 hours, 12 hours, 1 day, 2 days, 3 days, 4 days, 5 days, 6 days, 1 week, 2 weeks, 3 weeks, 4 weeks, 6 weeks, 8 weeks, 10 weeks, 12 weeks, 14 weeks, 16 weeks, 18 weeks, 20 weeks, 22 weeks, and/or 24 weeks after administration of a vector to a subject, cell, or system. In various embodiments, one or more immunosuppression agents or immunosuppression regimens are administered prior to administration of a vector of the present disclosure to a subject, cell, or system. In certain embodiments, one or more immunosuppression agents or immunosuppression regimens are administered at least, up to, or about 1 hour, 2 hours, 3, hours, 4 hours, 5 hours, 6 hours, 12 hours, 1 day, 2 days, 3 days, 4 days, 5 days, 6 days, 1 week, 2 weeks, 3 weeks, 4 weeks, 6 weeks, 8 weeks, 10 weeks, 12 weeks, 14 weeks, 16 weeks, 18 weeks, 20 weeks, 22 weeks, and/or 24 weeks prior to administration of a vector to a subject, cell, or system.

[0421] In vitro gene therapy includes use of a vector to modify a target cell, where the target cell is not present in a multicellular organism (e.g., in a laboratory). In some embodiments, a target cell is derived from a multicellular organism, such as a mammal (e.g., a mouse, rat, human, or non-human primate). In vitro engineering of a cell derived from a multicellular organism can be referred to as ex vivo engineering, and can be used in ex vivo therapy. In various embodiments, methods and compositions of the present disclosure are utilized, e.g., as disclosed herein, to modify a target cell derived from a first multicellular organism and the engineered target cell is then administered to a second multicellular organism, such as a mammal (e.g., a mouse, rat, human, or non-human primate), e.g., in a method of adoptive cell therapy. In some instances, the first and second organisms are the same single subject organism. Return of in vitro engineered material to a subject from which the material was derived can be an autologous therapy. In some instances, the first and second organisms are different organisms (e.g., two organisms of the same species, e.g., two mice, two rats, two humans, or two non-human primates of the same species). Transfer of engineered material derived from a first subject to a second different subject can be an allogeneic therapy. Cells can be autologous or allogeneic in reference to a particular subject. In particular embodiments, the cells are part of an allograft.

[0422] Ex vivo cell therapies can include isolation of stem, progenitor or differentiated cells from a patient or a normal donor, expansion of isolated cells ex vivo—with or without genetic engineering—and administration of the cells to a subject to establish a transient or stable graft of the infused cells and/or their progeny. Such ex vivo approaches can be used, for example, to treat an inherited, infectious or neoplastic disease, to regenerate a tissue, or to deliver a therapeutic agent to a subject or disease site. In various ex vivo therapies there is no direct exposure of the subject to the gene transfer vector, and the target cells of transduction can be selected, expanded and/or differentiated, before or after any genetic engineering, to improve efficacy and safety.

[0423] Applications of ex vivo therapy include introducing novel nucleic acid sequences and/or functionality. Ex vivo gene therapy can confer a novel function to cells or their progeny. Ex vivo therapies include hematopoietic stem cell (HSC) transplantation (HCT). For example, autologous HSC gene therapy represents a therapeutic option for monogenic diseases of the blood and the immune system as well as for storage disorders. Another established cell and gene therapy application is adoptive immunotherapy, which exploits ex vivo expanded T cells, with or without genetic engineering to redirect their antigen specificity or to increase their safety profile, in order to harness the power of immune effector and regulatory cells for use against malignancies, infections and autoimmune diseases. A range of other types of somatic stem cells can be engineered for therapeutic applications, including epidermal and limbal stem cells, neural stem/progenitor cells (NSPCs), cardiac stem cells and multipotent stromal cells (MSCs).

[0424] Applications of ex vivo therapy include reconstituting dysfunctional cell lineages. For inherited diseases characterized by a defective or absent cell lineage, the lineage can be regenerated by functional progenitor cells, derived either from normal donors or from autologous cells that have been subjected to ex vivo modification to correct the deficiency. An example is provided by SCIDs, in which a deficiency in any one of several genes blocks the development of mature lymphoid cells. Transplantation of non-manipulated normal donor HSCs, which can allow generation of donor-derived functional hematopoietic cells of various lineages in the host, represents a therapeutic option for SCIDs, as well as many other diseases that affect the blood and immune system. Autologous HSC gene therapy can include ex vivo modification (e.g., replacing, supplementing, or repairing a defective gene) of HSCs or HSPCs for transplant and, like HCT, can provide a steady supply of functional progeny. Advantages can include reduced risk of graft versus host disease (GvHD), reduced risk of graft rejection, and reduced need for post-transplant immunosuppression.

[0425] Applications of ex vivo therapy include enhancing immune responses. For instance, immune cells such as T cells, can be engineered ex vivo to recognize and/or eliminate target cells such as cancer cells. Immune cells such as T cells can be engineered to express, for example, a chimeric antigen receptor that triggers an immune response.

[0426] In various embodiments, vectors of the present disclosure can deliver an editing nucleic acid of the present disclosure to a hematopoietic cell. Hematopoietic cell types of the present disclosure include hematopoietic cells of all lineages and stages of hematopoietic cell differentiation. Target cell types of the present disclosure include, without limitation, HSCs (e.g., CD34+ long-term (LT)-HSCs and/or CD34+ short-term (ST)-HSCs), common lymphoid progenitors (CLPs), T cells, NK cells, colony forming unit (CFU)-pre B cells, B cells, common myeloid progenitors (CMPs), granulocyte-macrophage progenitors (GMPs), CFU-M cells, monoblasts, monocytes, macrophages, CFU-G cells, myeloblasts, granulocytes, neutrophils, eosinophils, basophils, megakaryocyte-erythrocyte progenitors (MEPs), BFU-E cells, CFU-E cells, erythroblasts, erythrocytes, CFU-Mk cells, megakaryocytes, and/or platelets. Hematopoietic cell types (e.g., target hematopoietic cell types) of the present disclosure include CD34+ hematopoietic cells.

[0427] In various embodiments, vectors of the present disclosure can deliver an editing nucleic acid of the present disclosure to hematopoietic stem cells (HSCs).

[0428] In various embodiments, vectors such as certain adenoviral vectors can be targeted to HSCs for in vivo, in vitro, and or ex vivo genetic modification by binding of CD46. HSCs or subsets thereof can also be identified by any of the following marker profiles: CD34+; Lin−/CD34+/CD38−/CD45RA−/CD90+/CD49f+ (HSC1); CD34+/CD38−/CD45RA−/CD90−/CD49f+/(HSC2). In various embodiments, human HSC1 can be identified by any of the following profiles: CD34+/CD38−/CD45RA−/CD90+ or CD34−/CD45RA−/CD90+ and mouse LT-HSC can be identified by Lin−Scal+ckit+CD150+CD48−Flt3−CD34− (where Lin represents the absence of expression of any marker of mature cells including CD3, CD4, CD8, CD11b, CD11c, NK1.1, Gr1, and TER119). In particular embodiments, HSCs are identified by a CD164+ profile. In particular embodiments, HSC are identified by a CD34+/CD164+ profile. For additional information regarding HSC marker profiles, see WO2017/218948. Accordingly, HSCs can be beneficially caused to encode and/or express various payloads and/or agents provided herein, including without limitation MGMT editing payloads, inhibitor-resistant MGMT, and therapeutic payloads.

[0429] In various embodiments, hematopoietic cell types that can be targeted by vectors of the present disclosure include T cells. Several different subsets of T-cells have been discovered, each with a distinct function. For example, a majority of T-cells have a T-cell receptor (TCR) existing as a complex of several proteins. The actual T-cell receptor is composed of two separate peptide chains, which are produced from the independent T-cell receptor alpha and beta (TCRα and TCRβ) genes and are called α- and β-TCR chains.

[0430] γδ T-cells represent a small subset of T-cells that possess a distinct T-cell receptor (TCR) on their surface. In γδ T-cells, the TCR is made up of one γ-chain and one 8-chain. This group of T-cells is much less common (2% of total T-cells) than the αβ T-cells.

[0431] CD3 is expressed on all mature T cells. Activated T-cells express 4-1BB (CD137), CD69, and CD25. CD5 and transferrin receptor are also expressed on T-cells.

[0432] T-cells can further be classified into helper cells (CD4+ T-cells) and cytotoxic T-cells (CTLs, CD8+ T-cells), which include cytolytic T-cells. T helper cells assist other white blood cells in immunologic processes, including maturation of B cells into plasma cells and activation of cytotoxic T-cells and macrophages, among other functions. These cells are also known as CD4+ T-cells because they express the CD4 protein on their surface. Helper T-cells become activated when they are presented with peptide antigens by MHC class II molecules that are expressed on the surface of antigen presenting cells (APCs). Once activated, they divide rapidly and secrete small proteins called cytokines that regulate or assist in the active immune response.

[0433] Cytotoxic T-cells destroy virally infected cells and tumor cells, and are also implicated in transplant rejection. These cells are also known as CD8+ T-cells because they express the CD8 glycoprotein on their surface. These cells recognize their targets by binding to antigen associated with MHC class I, which is present on the surface of nearly every cell of the body.

[0434] In particular embodiments, CARs are genetically modified to be expressed in cytotoxic T-cells.

[0435] “Central memory” T-cells (or “TCM”) as used herein refers to an antigen experienced CTL that expresses CD62L or CCR7 and CD45RO on the surface thereof, and does not express or has decreased expression of CD45RA as compared to naive cells. In particular embodiments, central memory cells are positive for expression of CD62L, CCR7, CD25, CD127, CD45RO, and CD95, and have decreased expression of CD45RA as compared to naive cells.

[0436] “Effector memory” T-cell (or “TEM”) as used herein refers to an antigen experienced T-cell that does not express or has decreased expression of CD62L on the surface thereof as compared to central memory cells and does not express or has decreased expression of CD45RA as compared to a naive cell. In particular embodiments, effector memory cells are negative for expression of CD62L and CCR7, compared to naive cells or central memory cells, and have variable expression of CD28 and CD45RA. Effector T-cells are positive for granzyme B and perforin as compared to memory or naive T-cells.

[0437] “Naive” T-cells as used herein refers to a non-antigen experienced T cell that expresses CD62L and CD45RA and does not express CD45RO as compared to central or effector memory cells. In particular embodiments, naive CD8+T lymphocytes are characterized by the expression of phenotypic markers of naive T-cells including CD62L, CCR7, CD28, CD127, and CD45RA.

[0438] In various embodiments, hematopoietic cell types that can be targeted by vectors of the present disclosure include B cells. B cells are mediators of the humoral response and are responsible for production and release of antibodies specific to an antigen. Several types of B cells exist which can be characterized by key markers. In general, immature B cells express CD19, CD20, CD34, CD38, and CD45R, and as they mature the key expressed markers are CD19 and IgM.

[0439] In various embodiments, hematopoietic cell types that can be targeted by vectors of the present disclosure include natural killer (NK) cells.

[0440] In various embodiments, hematopoietic cell types that can be targeted by vectors of the present disclosure include monocytes.

[0441] HSCs can differentiate into HSPCs. HSPCs can self-renew or can differentiate into (i) myeloid progenitor cells which ultimately give rise to monocytes and macrophages, neutrophils, basophils, eosinophils, erythrocytes, megakaryocytes/platelets, or dendritic cells; or (ii) lymphoid progenitor cells which ultimately give rise to T-cells, B-cells, and lymphocyte-like cells called natural killer cells (NK-cells). For a general discussion of hematopoiesis and HSPC differentiation, see Chapter 17, Differentiated Cells and the Maintenance of Tissues, Alberts et al., 1989, Molecular Biology of the Cell, 2nd Ed., Garland Publishing, New York, NY; Chapter 2 of Regenerative Medicine, Department of Health and Human Services, Aug. 5, 2006, and Chapter 5 of Hematopoietic Stem Cells, 2009, Stem Cell Information, Department of Health and Human Services.

[0442] HSPCs can be positive for a specific marker expressed in increased levels on HSPCs relative to other types of hematopoietic cells. For example, such markers include CD34, CD43, CD45RO, CD45RA, CD59, CD90, CD109, CD117, CD133, CD166, HLA DR, or a combination thereof. Also, the HSPCs can be negative for an expressed marker relative to other types of hematopoietic cells. For example, such markers include Lin, CD38, or a combination thereof. Preferably, HSPCs are CD34+.

[0443] HSCs and HSPCs sources include umbilical cord blood, placental blood, bone marrow and peripheral blood (see U.S. Pat. Nos. 5,004,681; 7,399,633; and U.S. Pat. No. 7,147,626; Craddock et al., Blood. 90 (12): 4779-4788 (1997); Jin et al., Bone Marrow Transplant. 42 (9): 581-588 (2008); Jin et al., Bone Marrow Transplant. 42 (7): 455-459 (2008); Pelus, Curr. Opin. Hematol. 15 (4): 285-292 (2008); Papayannopoulou et al., Blood. 91:2231-2239 (1998); Tricot et al., Haematologica. 93 (11): 1739-1742 (2008); and Weaver et al., Bone Marrow Transplant. 27: S23-S29 (2001)), as well as fetal liver, and embryonic stem cells (ESC) and induced pluripotent stem cells (iPSCs) that can be differentiated into HSC. Methods regarding collection, anti-coagulation and processing, etc. of blood and tissue samples are well known in the art. See, for example, Alsever et al., J. Med. 41:126 (1941); De Gowin et al., J. Am. Med. Assoc. 114-850 (1940); Smith et al., J. Thome. Cardiovasc. Surg. 38:573 (1959); Rous and Turner, J. Exp. Med. 23 (2): 219-237 (1916); and Hum, Calif. Med. 108 (3): 218-224 (1968). Stem cell sources of HSCs and HSPCs also include aortal-gonadal-mesonephros derived cells, lymph, liver, thymus, and spleen from age-appropriate donors. All collected stem cell sources of HSCs and HSPCs can be screened for undesirable components and discarded, treated, or used according to accepted current standards at the time. These stem cell sources can be steady state/naïve or primed with mobilizing or growth factor agents.

[0444] In order to avoid surgical procedures to perform a bone marrow harvest to isolate HSCs or HSPCs, approaches that harvest stem cells from the peripheral blood can be preferred. Mobilization is a process whereby stem cells are stimulated out of the bone marrow (BM) niche into the peripheral blood (PB), and likely proliferate in the PB. Mobilization allows for a larger frequency of stem cells within the PB minimizing the number of days of apheresis, reaching target number collection of stem cells, and minimizing discomfort to the donor. Agents that enhance mobilization can either enhance proliferation in the PB, or enhance migration from the BM to PB, or both. Various mobilizing agents are described herein and/or known to those of skill in the art. et al.

[0445] HSC and/or HSPC can be collected and isolated from a sample using any appropriate technique. Appropriate collection and isolation procedures include magnetic separation; fluorescence activated cell sorting (FACS; Williams et al., Dev. Biol. 112 (1): 126-134, 1985; Lu et al., Exp. Hematol. 14 (10): 955-962, 1986; Lu et al., Blood. 68 (1): 126-133, 1986); nanosorting based on fluorophore expression; affinity chromatography; cytotoxic agents joined to a monoclonal antibody or used in conjunction with a monoclonal antibody, e.g., complement and cytotoxins; “panning” with an antibody attached to a solid matrix; selective agglutination using a lectin such as soybean (Reisner et al., Lancet. 2 (8208-8209): 1320-1324, 1980); immunomagnetic bead-based sorting or combinations of these techniques, etc. These techniques can also be used to assay for successful engraftment or manipulation of hematopoietic cells in vivo, for example for gene transfer, genetic editing or cell population expansion.

[0446] In particular embodiments, it is important to remove contaminating cell populations that would interfere with isolation of the intended cell population, such as red blood cells. Removing includes both biochemical and mechanical methods to remove the undesired cell populations. Examples include lysis of red blood cells using detergents, hetastarch (hydroxyethyl starch), hetastarch with centrifugation, cell washing, cell washing with density gradient, Ficoll-hypaque, Sepx, Optipress, filters, and other protocols that have been used both in the manufacture of HSC and/or gene therapies for research and therapeutic purposes.

[0447] In particular embodiments, a sample can be processed to select/enrich for CD34+ cells using anti-CD34 antibodies directly or indirectly conjugated to magnetic particles in connection with a magnetic cell separator, for example, the CliniMACS® Cell Separation System (Miltenyi Biotec, Bergisch Gladbach, Germany). See also, sec. 5.4.1.1 of U.S. Pat. No. 7,399,633 which describes enrichment of CD34+ HSC/HSPC from 1-2% of a normal bone marrow cell population to 50-80% of the population. HSC can also be selected to achieve the HSC profiles noted above, such as CD34+/CD45RA−/CD90+ or CD34+/CD38−/CD45RA−/CD90+.

[0448] Similarly, HSPC expressing CD43, CD45RO, CD45RA, CD59, CD90, CD109, CD117, CD133, CD166, HLA DR, or a combination thereof, can be enriched for using antibodies against these antigens. U.S. Pat. No. 5,877,299 describes additional appropriate hematopoietic antigens that can be used to isolate, collect, and enrich HSPC cells from samples.

[0449] Following isolation and/or enrichment, HSC or HSPC can be expanded in order to increase the number of HSC/HSPC. Isolation and/or expansion methods are described in, for example, U.S. Pat. Nos. 7,399,633 and 5,004,681; US Patent Publication No. 2010/0183564; International Patent Publications No. WO 2006/047569; WO 2007/095594; WO 2011/127470; and WO 2011/127472; Varnum-Finney et al., Blood 101:1784-1789, 1993; Delaney et al., Blood 106:2693-2699, 2005; Ohishi et al., J. Clin. Invest. 110:1165-1174, 2002; Delaney et al., Nature Med. 16 (2): 232-236, 2010; and Chapter 2 of Regenerative Medicine, Department of Health and Human Services, August 2006, and the references cited therein. Each of the referenced methods of collection, isolation, and expansion can be used in particular embodiments of the disclosure.

[0450] Particular methods of expanding HSC/HSPC include expansion with a Notch agonist. For information regarding expansion of HSC/HSPC using Notch agonists, see sec. 5.1 and 5.3 of U.S. Pat. Nos. 7,399,633; 5,780,300; 5,648,464; 5,849,869; and 5,856,441; WO 1992/119734; Schlondorfiand & Blobel, J. Cell Sci. 112:3603-3617, 1999; Olkkonen and Stenmark, Int. Rev. Cytol. 176:1-85, 1997; Kopan et al., Cell 137:216-233, 2009; Rebay et al., Cell 67:687-699, 1991 and Jarriault et al., Mol. Cell. Biol. 18:7423-7431, 1998.

[0451] Additional culture conditions can include expansion in the presence of one or more growth factors, such as: angiopoietin-like proteins (Angptls, e.g., Angptl2, Angptl3, Angptl7, Angpt15, and Mfap4); erythropoietin; fibroblast growth factor-1 (FGF-1); Flt-3 ligand (Flt-3L); G-CSF; GM-CSF; insulin growth factor-2 (IGF-2); interleukin-3 (IL-3); interleukin-6 (IL-6); interleukin-7 (IL-7); interleukin-11 (IL-11); stem cell factor (SCF; also known as the c-kit ligand or mast cell growth factor); thrombopoietin (TPO); and analogs thereof (wherein the analogs include any structural variants of the growth factors having the biological activity of the naturally occurring growth factor; see, e.g., WO 2007/1145227 and U.S. Patent Publication No. 2010/0183564). As a particular example for expanding HSC/HSPC, the cells can be cultured on a plastic tissue culture dish containing immobilized Delta ligand and fibronectin and 50 ng/ml of each of SCF, Flt-3L and TPO.

### Conditions Treatable by Gene Therapy

[0452] At least in part because vectors of the present disclosure (e.g., adenoviral vectors) can be used in vivo, in vitro, or ex vivo for modification of host and/or target cells, and further because a vector can include payloads encoding a wide variety of expression products, it will be clear from the present specification that various technologies provided herein have broad applicability and can be used to treat a wide variety of conditions. Examples of conditions treatable by administration of adenoviral vector, genome, or system of the present disclosure include, without limitation, genetic conditions (e.g., hemoglobinopathies) and conditions treatable by expression of a therapeutic polypeptide (e.g., cancer).

[0453] In various embodiments, methods and compositions of the present disclosure can be used to treat a genetic condition (e.g., a condition arising from and/or caused by a mutation present in the genome of one or more cells of a subject). In various embodiments, methods and compositions of the present disclosure can be used to treat a genetic condition arising from and/or caused by a single point mutation present in the genome of one or more cells of a subject (e.g., a heterozygous or homozygous single point mutation). In various embodiments, methods and compositions of the present disclosure can be used to treat a protein deficiency. In various embodiments, methods and compositions of the present disclosure can be used to treat an enzyme deficiency. In various embodiments, methods and compositions of the present disclosure can be used to treat a blood condition (e.g., a condition characterized by a blood cell abnormality). Examples of genetic (e.g., point mutation) conditions, protein deficiencies, enzyme deficiencies, and/or blood conditions that can be treated by methods and compositions of the present disclosure include adenosine deaminase deficiency (ADA), adrenoleukodystrophy (ALD), agammaglobulinemia, alpha-1 antitrypsin deficiency, congenital amegakaryocytic thrombocytopenia, amyotrophic lateral sclerosis (Lou Gehrig's disease), ataxia telangiectasia, Batten disease, Bernard-Soulier Syndrome, CD40/CD40L deficiency, chronic granulomatous disease, common variable immune deficiency (CVID), congenital thrombotic thrombocytopeni purpura (cTTP), cystic fibrosis, Diamond Blackfan anemia (DBA), DOCK 8 deficiency, dyskeratosis congenital, Fabry disease, Factor V Deficiency, Factor VII Deficiency, Factor X Deficiency, Factor XI Deficiency, Factor XII Deficiency, Factor XIII Deficiency, familial apolipoprotein E deficiency and atherosclerosis (ApoE), familial erythrophagocytic lymphohistiocytosis, Fanconi anemia (FA), Friedreich ataxia, Gaucher disease, Glanzmann thrombasthenia, glucosemia, glycogen storage disease, glycogen storage disease type I (GSDI), Gray Platelet Syndrome, hemophilia, hemophilia A, hemophilia B, hereditary hemochromatosis, Hurler's syndrome, hyper IgM, Hypogammaglobulinemia, Krabbe disease, major histocompatibility complex class II deficiency (MHC-II), maple syrup urine disease, metachromatic leukodystrophy (MLD), mucopolysaccharidoses, mucopolysaccharidosis type I (MPS I), MPS II (Hunter Syndrome), MPS III (Sanfilippo syndrome), MPS IV (Morquio syndrome), MPS V, MPS VI (Maroteaux-Lamy syndrome), MPS VII (sly syndrome), muscular dystrophy, Niemann-Pick disease, Parkinson's disease, paroxysmal nocturnal hemoglobinuria (PNH), pernicious anemia, phenylketonuria (PKU), Pompe disease, pulmonary alveolar proteinosis (PAP), pure red cell aplasia (PRCA), pyruvate kinase deficiency, refractory anemia, Shwachman-Diamond syndrome, selective IgA deficiency, severe aplastic anemia, severe combined immunodeficiency disease (SCID), Severe combined immunodeficiency due to adenosine deaminase deficiency (ADA-SCID), sickle cell anemia, sickle cell disease, sickle cell trait, Tay Sachs, thalassemia, thalassemia intermedia, von Gierke disease, von Willebrand Disease, Wiskott-Aldrich syndrome (WAS), X-linked agammaglobulinemia (XLA), X-linked severe combined immunodeficiency (SCID-X1), Zellweger syndrome, α-mannosidosis, β-mannosidosis, and/or β-thalassemia, β-thalassemia major.

[0454] In various embodiments, methods and compositions of the present disclosure can be used to treat an inborn error of metabolism. In various embodiments, methods and compositions of the present disclosure can be used to treat a hyperproliferative condition.

[0455] In various embodiments, methods and compositions of the present disclosure can be used to treat a cancer (e.g., a cancer characterized by abnormal blood cells). Examples of cancers that can be treated by methods and compositions of the present disclosure include acute lymphoblastic leukemia (ALL), acute myelogenous leukemia (AML), agnogenic myeloid metaplasia, astrocytoma, atypical teratoid rhabdoid tumor, brain and central nervous system (CNS) cancer, breast cancer, carcinosarcoma, chondrosarcoma, chordoma, choroid plexus carcinoma, choroid plexus papilloma, chronic lymphocytic leukemia (CLL), chronic myelogenous leukemia (CML), clear cell sarcoma of soft tissue, diffuse large B-cell lymphoma, ependymoma, epithelioid sarcoma, Ewing sarcoma, extragonadal germ cell tumor, extrarenal rhabdoid tumor, follicular lymphoma, gastrointestinal stromal tumor, glioblastoma, HBV-induced hepatocellular carcinoma, head and neck cancer, Hodgkin's lymphoma, juvenile myelomonocytic leukemia, kidney cancer, lung cancer, lymphoma, malignant rhabdoid tumor, medulloblastoma, melanoma, meningioma, mesothelioma, multiple myeloma, myeloma, neuroglial tumor, non-Hodgkin's lymphoma, not otherwise specified (NOS) sarcoma, oligoastrocytoma, oligodendroglioma, osteosarcoma, ovarian cancer, ovarian clear cell adenocarcinoma, ovarian endometrioid adenocarcinoma, ovarian serous adenocarcinoma, pancreatic cancer, pancreatic ductal adenocarcinoma, pancreatic endocrine tumor, pineoblastoma, prostate cancer, renal cell carcinoma, renal medullary carcinoma, rhabdomyosarcoma, sarcoma, schwannoma, skin squamous cell carcinoma, and/or stem cell cancer.

[0456] In various embodiments, methods and compositions of the present disclosure can be used to treat a hemoglobinopathy, red blood cell disorder, platelet disorder, and/or bone marrow disorder (e.g., a bone marrow failure condition).

[0457] In various embodiments, methods and compositions of the present disclosure can be used to treat an immune condition (e.g., an autoimmune condition). Examples of immune conditions (e.g., autoimmune conditions) that can be treated by methods and compositions of the present disclosure include acquired immunodeficiency syndrome (AIDS), acquired thrombotic thrombocytopenia purpura (aTTP), an autoimmune hematology, graft versus host disease (GVHD), Grave's Disease, inflammatory bowel disease, Multiple Sclerosis (MS), rheumatoid arthritis, severe aplastic anemia, and systemic lupus erythematosus (SLE).

[0458] In various embodiments, methods and compositions of the present disclosure can be used to treat an immunodeficiency (e.g., a primary immune deficiency, secondary immune deficiency, acquired immune deficiency, and/or an immune deficiency caused by trauma), an inflammatory condition, an IgG subclass deficiency, a complement disorders, or a specific antibody deficiency). In various embodiments, methods and compositions of the present disclosure can be used to eliminate or inhibit one or more subsets of lymphocytes (e.g., induce apoptosis in lymphocytes, inhibit lymphocyte activation, inhibit T cell activation, and/or inhibit Th-2 activity, and/or Th-1 activity), eliminate or inhibit autoreactive T cells, improve kinetics and/or clonal diversity of lymphocyte reconstitution, restore normal T lymphocyte development, restore thymic output, induce selective tolerance to an inciting agent, provide function to immune and other blood cells or treat an immune-mediated condition, In various embodiments, methods and compositions of the present disclosure can be used to normalize primary and secondary antibody responses to immunization.

[0459] In various embodiments, methods and compositions of the present disclosure can be used to treat and/or prevent an infection. In various embodiments, a composition of the present disclosure is a vaccine in that it encodes, and/or expresses in one or more cells of a subject, an antigen characteristic of an infectious agent (e.g., a viral or bacterial pathogen). In various embodiments, a method of the present disclosure is a method of vaccination in that it delivers to one or more cells of a subject an antigen characteristic of an infectious agent (e.g., a viral or bacterial pathogen) and/or induces an immune responses against the antigen and/or infectious agent. In various embodiments, a method or composition of the present disclosure delivers (e.g., causes transient expression of) an antigen in a subject. In various embodiments, a method or composition of the present disclosure is used to treat a subject that has the infection. In various embodiments, a method or composition of the present disclosure is used to treat a subject that is at risk of infection. In particular embodiments, the infectious disease is human immunodeficiency virus (HIV). A payload expression product can be, for example, an agent that renders a subject resistant to HIV infection, or which enables immune cells to effectively neutralize HIV. A therapeutically effective amount for the treatment of HIV, for example, may increase the immunity of a subject against HIV, ameliorate a symptom associated with AIDS or HIV, or induce an innate or adaptive immune response in a subject against HIV. An immune response against HIV may include antibody production and result in the prevention of AIDS and/or ameliorate a symptom of AIDS or HIV infection of the subject, or decrease or eliminate HIV infectivity and/or virulence.

[0460] In various embodiments, a method or composition of the present disclosure delivers to one or more cells of a subject in need thereof a coding sequence that encodes and/or expresses a replacement polypeptide (i.e., a wild type, reference, and/or functional polypeptide that corresponds to a disease variant encoded by the genome of the subject). In various embodiments, a method or composition of the present disclosure delivers to one or more cells of a subject in need thereof an editing system that modifies a nucleic acid of the subject (e.g., a genome of the subject) to express and/or increase expression of a wild type, reference, and/or functional polypeptide, e.g., by correction of a disease mutation present in the nucleic acid of the subject.

[0461] Particular examples of conditions that can be treated by methods and compositions of the present disclosure include conditions in which mutations of a globin gene results in expression of an abnormal form of hemoglobin (e.g., as in sickle cell disease (SCD) and hemoglobin C, D, and E disease) or results in reduced production of the a or B polypeptides (and thus an imbalance of the globin chains in the cell). These latter conditions are termed α- or β-thalassemias, depending on which globin chain is impaired. 5% of the world population carries a significant hemoglobin variant with the sickle cell mutation in the b-globin (HBB) gene (a glutamate to valine conversion; historically E6V, contemporaneously E7V) being by far the most common (40% of carriers). The high prevalence and severity of hemoglobin disorders presents a substantial burden, impacting not only the lives of those affected but also health-care systems, since lifelong patient care is costly.

[0462] There are two forms of hemoglobin, fetal (HbF), which includes two alpha (a) and two gamma (γ) chains (see e.g., PDB: 4MQJ_E for the alpha chain; and PDB: 4MQJ_F for the gamma chain), and adult (HbA), which includes two a and two beta (B) chains (see e.g., UniProtKB/Swiss-Prot: P69905.2 for the alpha chain; and UniProtKB/Swiss-Prot: P68871.2 for the beta chain). The natural switch from HbF to HbA occurs shortly after birth and is regulated by transcriptional repression of γ globin genes by factors including a master regulator, bcl11a. Critically, a variety of clinical observations demonstrate that the severity of β-hemoglobinopathies such as sickle cell disease and β-thalassemia are ameliorated by increased production of HbF.

[0463] In particular embodiments, a therapeutically effective treatment induces or increases expression of HbF, induces or increases production of hemoglobin, and/or induces or increases production of β-globin. In particular embodiments, a therapeutically effective treatment improves blood cell function, and/or increases oxygenation of cells.

[0464] In various embodiments, the present disclosure includes treatment of a blood disorder using a vector of the present disclosure that includes a coding nucleic acid sequence that encodes a protein or agent for treatment of the blood disorder. In various embodiments, the blood disorder is thalassemia and the protein is a β-globin or γ-globin protein, or a protein that otherwise partially or completely functionally replaces β-globin or γ-globin. In various embodiments, the blood disorder is hemophilia and the protein is ET3 or a protein that otherwise partially or completely functionally replaces Factor VIII. In various embodiments, the blood disorder is a point mutation disease such as sickle cell anemia, and the agent is a gene editing protein

[0465] ET3 can have or include the following amino acid sequence: SEQ ID NO: 219. In various embodiments, a Factor VIII replacement protein can have an amino acid sequence having at least 70%, 75%, 80%, 85%, 90%, 91%, 92%, 93%, 94%, 95%, 96%, 97%, 98%, 99%, or 100% identity to SEQ ID NO: 219

(MQLELSTCVFLCLLPLGFSAIRRYYLGAVELSWDYRQSELLREL
HVDTRFPATAPGALPLGPSVLYKKTVFVEFTDQLFSVARPRPPWM
GLLGPTIQAEVYDTVVVTLKNMASHPVSLHAVGVSFWKSSEGAEY
EDHTSQREKEDDKVLPGKSQTYVWQVLKENGPTASDPPCLTYSYL
SHVDLVKDLNSGLIGALLVCREGSLTRERTQNLHEFVLLFAVFDE
GKSWHSARNDSWTRAMDPAPARAQPAMHTVNGYVNRSLPGLIGCH
KKSVYWHVIGMGTSPEVHSIFLEGHTFLVRHHRQASLEISPLTFL
TAQTFLMDLGQFLLFCHISSHHHGGMEAHVRVESCAEEPQLRRK
ADEEEDYDDNLYDSDMDVVRLDGDDVSPFIQIRSVAKKHPKTWVH
YIAAEEEDWDYAPLVLAPDDRSYKSQYLNNGPQRIGRKYKKVRFM
AYTDETFKTREAIQHESGILGPLLYGEVGDTLLIIFKNQASRPYN
IYPHGITDVRPLYSRRLPKGVKHLKDFPILPGEIFKYKWTVTVED
GPTKSDPRCLTRYYSSFVNMERDLASGLIGPLLICYKESVDQRGN
QIMSDKRNVILFSVFDENRSWYLTENIQRFLPNPAGVQLEDPEFQ
ASNIMHSINGYVFDSLQLSVCLHEVAYWYILSIGAQTDFLSVFFS
GYTFKHKMVYEDTLTLFPFSGETVFMSMENPGLWILGCHNSDFRN
RGMTALLKVSSCDKNTGDYYEDSYEDISAYLLSKNNAIEPRSFAQ
NSRPPSASAPKPPVLRRHQRDISLPTFQPEEDKMDYDDIFSTETK
GEDFDIYGEDENQDPRSFQKRTRHYFIAAVEQLWDYGMSESPRAL
RNRAQNGEVPRFKKVVFREFADGSFTQPSYRGELNKHLGLLGPYI
RAEVEDNIMVTFKNQASRPYSFYSSLISYPDDQEQGAEPRHNFVQ
PNETRTYFWKVQHHMAPTEDEFDCKAWAYFSDVDLEKDVHSGLIG
PLLICRANTLNAAHGRQVTVQEFALFFTIFDETKSWYFTENVERN
CRAPCHLQMEDPTLKENYRFHAINGYVMDTLPGLVMAQNQRIRWY
LLSMGSNENIHSIHFSGHVFSVRKKEEYKMAVYNLYPGVFETVEM
LPSKVGIWRIECLIGEHLQAGMSTTFLVYSKKCQTPLGMASGHIR
DFQITASGQYGQWAPKLARLHYSGSINAWSTKEPFSWIKVDLLAP
MIIHGIKTQGARQKFSSLYISQFIIMYSLDGKKWQTYRGNSTGTL
MVFFGNVDSSGIKHNIFNPPIIARYIRLHPTHYSIRSTLRMELM
GCDLNSCSMPLGMESKAISDAQITASSYFTNMFATWSPSKARLHL
QGRSNAWRPQVNNPKEWLQVDFQKTMKVTGVTTQGVKSLLTSMYV
KEFLISSSQDGHQWTLFFQNGKVKVFQGNQDSFTPVVNSLDPPLL
TRYLRIHPQSWVHQIALRMEVLGCEAQDLYV).

[0466] β-globin can have or include the following amino acid sequence: SEQ ID NO: 220. In various embodiments, a β-globin replacement protein can have an amino acid sequence having at least 70%, 75%, 80%, 85%, 90%, 91%, 92%, 93%, 94%, 95%, 96%, 97%, 98%, 99%, or 100% identity to SEQ ID NO: 220

(MVHLTPEEKSAVTALWGKVNVDEVGGEALGRLLVVYPWTQRFFE
SFGDLSTPDAVMGNPKVKAHGKKVLGAFSDGLAHLDNLKGTFATL
SELHCDKLHVDPENFRLLGNVLVCVLAHHFGKEFTPPVQAAYQKV
VAGVANALAHKYH).

[0467] γ-globin can have or include the following amino acid sequence: SEQ ID NO: 221. In various embodiments, a γ-globin replacement protein can have an amino acid sequence having at least 70%, 75%, 80%, 85%, 90%, 91%, 92%, 93%, 94%, 95%, 96%, 97%, 98%, 99%, or 100% identity to SEQ ID NO: 221

(MGHFTEEDKATITSLWGKVNVEDAGGETLGRLLVVYPWTQRFFD
SFGNLSSASAIMGNPKVKAHGKKVLTSLGDATKHLDDLKGTFAQL
SELHCDKLHVDPENFKLLGNVLVTVLAIHFGKEFTPEVQASWQKM
VTAVASALSSRYH).

[0468] In various embodiments, gene therapy of the present disclosure can include and/or be directed to a modification as disclosed in WO 2021/003432, which is herein incorporated by reference in its entirety, and particularly with respect to therapeutic gene modifications.

### Dosages, Formulations, and Administration

[0469] A vector and/or nucleic acid for delivery of an editing nucleic acid of the present disclosure can be formulated such that it is acceptable (e.g., pharmaceutically acceptable) for administration to cells or animals, e.g., to humans. A vector and/or nucleic acid for delivery of an editing nucleic acid of the present disclosure may be administered in vitro, ex vivo, or in vivo. Vectors described herein can be formulated for administration to a subject. Formulations can include one or more pharmaceutically acceptable carriers.

[0470] As disclosed herein, a vector and/or nucleic acid for delivery of an editing nucleic acid of the present disclosure can be in any form known in the art. Such forms include, e.g., liquid, semi-solid and solid dosage forms, such as liquid solutions (e.g., injectable and infusible solutions), dispersions or suspensions, tablets, pills, powders, liposomes and suppositories.

[0471] Selection or use of any particular form may depend, in part, on the intended mode of administration and therapeutic application. For example, compositions containing a composition intended for systemic or local delivery can be in the form of injectable or infusible solutions. Accordingly, a vector can be formulated for administration by a parenteral mode (e.g., intravenous, subcutaneous, intraperitoneal, or intramuscular injection). As used herein, parenteral administration refers to modes of administration other than enteral and topical administration, usually by injection, and include, without limitation, intravenous, intranasal, intraocular, pulmonary, intramuscular, intraarterial, intrathecal, intracapsular, intraorbital, intracardiac, intradermal, intrapulmonary, intraperitoneal, transtracheal, subcutaneous, subcuticular, intraarticular, subcapsular, subarachnoid, intraspinal, epidural, intracerebral, intracranial, intracarotid and intracisternal injection and infusion. A parenteral route of administration can be, for example, administration by injection, transnasal administration, transpulmonary administration, or transcutaneous administration. Administration can be systemic or local by intravenous injection, intramuscular injection, intraperitoneal injection, subcutaneous injection.

[0472] In various embodiments, a vector and/or nucleic acid for delivery of an editing nucleic acid of the present disclosure of the present invention can be formulated as a solution, microemulsion, dispersion, liposome, lipid nanoparticle, or other ordered structure suitable for delivery to a subject, cell, or system, and/or stable storage at high concentration. Sterile injectable solutions can be prepared by incorporating a composition described herein in a pharmaceutically appropriate amount in a pharmaceutically appropriate solvent with one or a combination of ingredients enumerated above, as required, followed by filter sterilization. Generally, dispersions can be prepared by incorporating a composition described herein into a sterile vehicle that contains a basic dispersion medium and other ingredients as needed, e.g., from those enumerated above. In the case of sterile powders for the preparation of sterile injectable solutions, methods for preparation include vacuum drying and freeze-drying that yield a powder of a composition described herein plus any additional desired ingredient from a previously sterile-filtered solution thereof. The proper fluidity of a solution can be maintained, for example, by the use of a coating such as lecithin, by the maintenance of the required particle size in the case of dispersion, and/or by the use of surfactants. Prolonged absorption of injectable compositions can be brought about by including in the composition a reagent that delays absorption, for example, monostearate salts and/or gelatin.

[0473] A vector can be administered parenterally in the form of an injectable formulation including a sterile solution or suspension in water or another pharmaceutically acceptable liquid. For example, the vector can be formulated by suitably combining the therapeutic molecule with pharmaceutically acceptable vehicles or media, such as sterile water and physiological saline, vegetable oil, emulsifier, suspension agent, surfactant, stabilizer, flavoring excipient, diluent, vehicle, preservative, binder, followed by mixing in a unit dose form required for generally accepted pharmaceutical practices. The amount of vector included in the pharmaceutical preparations is such that a suitable dose within the designated range is provided. Examples of oils include sesame oil and soybean oil, optionally combined with benzyl benzoate or benzyl alcohol as a solubilizing agent. Other items that may be included are a buffer such as a phosphate buffer or sodium acetate buffer, a soothing agent such as procaine hydrochloride, a stabilizer such as benzyl alcohol or phenol, and an antioxidant. The formulated injection can be packaged in a suitable ampule.

[0474] In various embodiments, subcutaneous administration can be accomplished by means of a device, such as a syringe, a prefilled syringe, an auto-injector (e.g., disposable or reusable), a pen injector, a patch injector, a wearable injector, an ambulatory syringe infusion pump with subcutaneous infusion sets, or other device for subcutaneous injection.

[0475] In some embodiments, a vector described herein can be therapeutically delivered to a subject by way of local administration. As used herein, “local administration” or “local delivery,” can refer to delivery that does not rely upon transport of the vector or vector to its intended target tissue or site via the vascular system. For example, the vector may be delivered by injection or implantation of the composition or agent or by injection or implantation of a device containing the composition or agent. In certain embodiments, following local administration in the vicinity of a target tissue or site, the composition or agent, or one or more components thereof, may diffuse to an intended target tissue or site that is not the site of administration.

[0476] In some embodiments, compositions provided herein are present in unit dosage form, which unit dosage form can be suitable for self-administration. Such a unit dosage form may be provided within a container, typically, for example, a vial, cartridge, prefilled syringe or disposable pen. A doser may also be used, for example, with an injection system as described herein.

[0477] Pharmaceutical forms of vector formulations suitable for injection can include sterile aqueous solutions or dispersions. A formulation can be sterile and must be fluid to allow proper flow in and out of a syringe. A formulation can also be stable under the conditions of manufacture and storage. A carrier can be a solvent or dispersion medium containing, for example, water and saline or buffered aqueous solutions. Isotonic agents (e.g., sugars or sodium chloride) can be used in the formulations.

[0478] A suitable dose of a vector described herein can depend on a variety of factors including, e.g., the age, sex, and weight of a subject to be treated, the condition or disease to be treated, and the particular vector used. Other factors affecting the dose administered to the subject include, e.g., the type or severity of the condition or disease. Other factors can include, e.g., other medical disorders concurrently or previously affecting the subject, the general health of the subject, the genetic disposition of the subject, diet, time of administration, rate of excretion, drug combination, and any other additional therapeutics that are administered to the subject. A suitable means of administration of a vector can be selected based on the condition or disease to be treated and upon the age and condition of a subject. Dose and method of administration can vary depending on the weight, age, condition, and the like of a patient, and can be suitably selected as needed by those skilled in the art. A specific dosage and treatment regimen for any particular subject can be adjusted based on the judgment of a medical practitioner.

[0479] In various instances, a vector can be formulated to include a pharmaceutically acceptable carrier or excipient. Examples of pharmaceutically acceptable carriers include, without limitation, any and all solvents, dispersion media, coatings, antibacterial and antifungal agents, isotonic and absorption delaying agents, and the like that are physiologically compatible. Compositions of the present invention can include a pharmaceutically acceptable salt, e.g., an acid addition salt or a base addition salt.

[0480] Exemplary generally used pharmaceutically acceptable carriers include any and all absorption delaying agents, antioxidants, binders, buffering agents, bulking agents or fillers, chelating agents, coatings, disintegration agents, dispersion media, gels, isotonic agents, lubricants, preservatives, salts, solvents or co-solvents, stabilizers, surfactants, and/or delivery vehicles.

[0481] In various embodiments, a composition including a vector as described herein, e.g., a sterile formulation for injection, can be formulated in accordance with conventional pharmaceutical practices using distilled water for injection as a vehicle. For example, physiological saline or an isotonic solution containing glucose and other supplements such as D-sorbitol, D-mannose, D-mannitol, and sodium chloride may be used as an aqueous solution for injection, optionally in combination with a suitable solubilizing agent, for example, alcohol such as ethanol and polyalcohol such as propylene glycol or polyethylene glycol, and a nonionic surfactant such as polysorbate 80, HCO-50 and the like.

[0482] The formulations disclosed herein can be formulated for administration by, for example, injection. For injection, formulation can be formulated as aqueous solutions, such as in buffers including Hanks' solution, Ringer's solution, or physiological saline, or in culture media, such as Iscove's Modified Dulbecco's Medium (IMDM). The aqueous solutions can include formulatory agents such as suspending, stabilizing, and/or dispersing agents. Alternatively, the formulation can be in lyophilized and/or powder form for constitution with a suitable vehicle, e.g., sterile pyrogen-free water, before use.

[0483] Any formulation disclosed herein can advantageously include any other pharmaceutically acceptable carriers which include those that do not produce significantly adverse, allergic, or other untoward reactions that outweigh the benefit of administration. Exemplary pharmaceutically acceptable carriers and formulations are disclosed in Remington's Pharmaceutical Sciences, 18th Ed. Mack Printing Company, 1990. Moreover, formulations can be prepared to meet sterility, pyrogenicity, general safety, and purity standards as required by US FDA Office of Biological Standards and/or other relevant foreign regulatory agencies.

[0484] Therapeutically effective amounts of a viral vector can include doses ranging from, for example, 1×10⁷ to 50×10⁸ infection units (IU) or from 5×10⁷ to 20×10⁸ IU. In other examples, a dose can include 5×10⁷ IU, 6×10⁷ IU, 7×10⁷ IU, 8×10⁷ IU, 9×10⁷ IU, 1×10⁸ IU, 2×10⁸ IU, 3×10⁸ IU, 4×10⁸ IU, 5×10⁸ IU, 6×10⁸ IU, 7×10⁸ IU, 8×10⁸ IU, 9×10⁸ IU, 10×10⁸ IU, or more. In particular embodiments, a therapeutically effective amount of viral vector includes 4×10⁸ IU. In particular embodiments, a therapeutically effective amount of viral vector can be administered subcutaneously or intravenously. In particular embodiments, a therapeutically effective amount of viral vector associated with a therapeutic gene and/or expression product can be administered following administration with one or more mobilization factors.

[0485] In various embodiments of the present disclosure, an in vivo gene therapy includes administration of at least one viral vector to a subject in combination with at least one immune suppression regimen.

[0486] In an in vivo, in vitro, and or ex vivo gene therapy including more than one vector species, such as a first vector that is a viral vector in combination with a second vector that is a support vector, the first vector and the second vector can be administered in a single formulation or dosage form or in two separate formulations or dosage forms. In various embodiments, the first and second vectors can be administered at the same time or at different times, e.g., during the same one-hour period or during non-overlapping one-hour periods. In various embodiments, the first and second vectors can be administered at the same time or at different times, e.g., on the same day or on different days. In various embodiments, the first and second vectors can be administered at the same dosage or at different dosages, e.g., where the dosage is measured as the total number of viral particles or as a number of viral particles per kilogram of the subject. In various embodiments, the first and second vectors can be administered in a pre-defined ratio. In various embodiments, the ratio is in the range of 2:1 to 1:2, e.g., 1:1.

[0487] In various embodiments, a vector is administered to a subject in a single total dose on a single day. In various embodiments, a vector is administered in two, three, four, or more unit doses that together constitute a total dose. In various embodiments, one unit dose of a vector is administered to a subject per day on each of one, two, three, four, or more consecutive days. In various embodiments, two unit doses of a vector are administered to a subject per day on each of one, two, three, four, or more consecutive days. Accordingly, in various embodiments, a daily dose can refer to the dose of vector received by a subject over the course of a day. In various embodiments, the term day refers to a twenty-four-hour period, such as a twenty-four-hour period from midnight of a first calendar date to midnight of the next calendar date.

[0488] In various embodiments, a unit dose, daily dose, or total dose of a vector, such as a viral vector, or the total combined dose of a viral vector and a support vector, can be at least 1E8, 5E8, 1E9, 5E9, 1E10, 5E10, 1E11, 5E11, 1E12, 5E12, 1E13, 5E13, 1E14, or 1E15 viral particles per kilogram (vp/kg). In various embodiments, a unit dose, daily dose, or total dose of a vector, such as a viral vector, or the total combined dose of a viral vector and a support vector, can fall within a range having a lower bound selected from 1E8, 5E8, 1E9, 5E9, 1E10, 5E10, 1E11, 5E11, 1E12, 5E12, 1E13, 5E13, 1E14, or 1E15 vp/kg and an upper bound selected from 1E8, 5E8, 1E9, 5E9, 1E10, 5E10, 1E11, 5E11, 1E12, 5E12, 1E13, 5E13, 1E14, or 1E15 vp/kg.

### Selection Agent Dosages, Formulations, and Administration

[0489] A selection agent (e.g., an agent including an MGMT inhibitor, an alkylating agent, or a combination thereof) of the present disclosure can be formulated such that it is pharmaceutically acceptable for administration to cells or animals, e.g., to humans. A selection agent may be administered in vitro, ex vivo, or in vivo. Selection agents described herein can be formulated for administration to a subject. Formulations can include one or more pharmaceutically acceptable carriers.

[0490] As disclosed herein, a selection agent can be in any form known in the art. Such forms include, e.g., liquid, semi-solid and solid dosage forms, such as liquid solutions (e.g., injectable and infusible solutions), dispersions or suspensions, tablets, pills, powders, liposomes and suppositories.

[0491] Selection or use of any particular form may depend, in part, on the intended mode of administration and therapeutic application. For example, compositions containing a composition intended for systemic or local delivery can be in the form of injectable or infusible solutions. Accordingly, a selection agent can be formulated for administration by a parenteral mode (e.g., intravenous, subcutaneous, intraperitoneal, or intramuscular injection). As used herein, parenteral administration refers to modes of administration other than enteral and topical administration, usually by injection, and include, without limitation, intravenous, intranasal, intraocular, pulmonary, intramuscular, intraarterial, intrathecal, intracapsular, intraorbital, intracardiac, intradermal, intrapulmonary, intraperitoneal, transtracheal, subcutaneous, subcuticular, intraarticular, subcapsular, subarachnoid, intraspinal, epidural, intracerebral, intracranial, intracarotid and intracisternal injection and infusion. A parenteral route of administration can be, for example, administration by injection, transnasal administration, transpulmonary administration, or transcutaneous administration. Administration can be systemic or local by intravenous injection, intramuscular injection, intraperitoneal injection, subcutaneous injection.

[0492] In various embodiments, a selection agent of the present invention can be formulated as a solution, microemulsion, dispersion, liposome, lipid nanoparticle, or other ordered structure suitable for delivery to a subject, cell, or system, and/or stable storage at high concentration. Sterile injectable solutions can be prepared by incorporating a composition described herein in a pharmaceutically appropriate amount in a pharmaceutically appropriate solvent with one or a combination of ingredients enumerated above, as required, followed by filter sterilization. Generally, dispersions can be prepared by incorporating a composition described herein into a sterile vehicle that contains a basic dispersion medium and other ingredients as needed, e.g., from those enumerated above. In the case of sterile powders for the preparation of sterile injectable solutions, methods for preparation include vacuum drying and freeze-drying that yield a powder of a composition described herein plus any additional desired ingredient from a previously sterile-filtered solution thereof. The proper fluidity of a solution can be maintained, for example, by the use of a coating such as lecithin, by the maintenance of the required particle size in the case of dispersion, and/or by the use of surfactants. Prolonged absorption of injectable compositions can be brought about by including in the composition a reagent that delays absorption, for example, monostearate salts and/or gelatin.

[0493] A selection agent can be administered parenterally in the form of an injectable formulation including a sterile solution or suspension in water or another pharmaceutically acceptable liquid. For example, the selection agent can be formulated by suitably combining the therapeutic molecule with pharmaceutically acceptable vehicles or media, such as sterile water and physiological saline, vegetable oil, emulsifier, suspension agent, surfactant, stabilizer, flavoring excipient, diluent, vehicle, preservative, binder, followed by mixing in a unit dose form required for generally accepted pharmaceutical practices. The amount of selection agent included in the pharmaceutical preparations is such that a suitable dose within the designated range is provided. Examples of oils include sesame oil and soybean oil, optionally combined with benzyl benzoate or benzyl alcohol as a solubilizing agent. Other items that may be included are a buffer such as a phosphate buffer or sodium acetate buffer, a soothing agent such as procaine hydrochloride, a stabilizer such as benzyl alcohol or phenol, and an antioxidant. The formulated injection can be packaged in a suitable ampule.

[0494] In various embodiments, subcutaneous administration can be accomplished by means of a device, such as a syringe, a prefilled syringe, an auto-injector (e.g., disposable or reusable), a pen injector, a patch injector, a wearable injector, an ambulatory syringe infusion pump with subcutaneous infusion sets, or other device for subcutaneous injection.

[0495] In some embodiments, a selection agent described herein can be therapeutically delivered to a subject by way of local administration. As used herein, “local administration” or “local delivery,” can refer to delivery that does not rely upon transport of the selection agent to its intended target tissue or site via the vascular system. For example, the selection agent may be delivered by injection or implantation of the composition or agent or by injection or implantation of a device containing the composition or agent. In certain embodiments, following local administration in the vicinity of a target tissue or site, the composition or agent, or one or more components thereof, may diffuse to an intended target tissue or site that is not the site of administration.

[0496] In some embodiments, compositions provided herein are present in unit dosage form, which unit dosage form can be suitable for self-administration. Such a unit dosage form may be provided within a container, typically, for example, a vial, cartridge, prefilled syringe or disposable pen. A doser may also be used, for example, with an injection system as described herein.

[0497] Pharmaceutical forms of selection agent formulations suitable for injection can include sterile aqueous solutions or dispersions. A formulation can be sterile and must be fluid to allow proper flow in and out of a syringe. A formulation can also be stable under the conditions of manufacture and storage. A carrier can be a solvent or dispersion medium containing, for example, water and saline or buffered aqueous solutions. Isotonic agents (e.g., sugars or sodium chloride) can be used in the formulations.

[0498] A suitable dose of a selection agent described herein can depend on a variety of factors including, e.g., the age, sex, and weight of a subject to be treated, the condition or disease to be treated, and the particular selection agent used. Other factors affecting the dose administered to the subject include, e.g., the type or severity of the condition or disease. Other factors can include, e.g., other medical disorders concurrently or previously affecting the subject, the general health of the subject, the genetic disposition of the subject, diet, time of administration, rate of excretion, drug combination, and any other additional therapeutics that are administered to the subject. A suitable means of administration of a selection agent can be selected based on the condition or disease to be treated and upon the age and condition of a subject. Dose and method of administration can vary depending on the weight, age, condition, and the like of a patient, and can be suitably selected as needed by those skilled in the art. A specific dosage and treatment regimen for any particular subject can be adjusted based on the judgment of a medical practitioner.

[0499] In various instances, a selection agent can be formulated to include a pharmaceutically acceptable carrier or excipient. Examples of pharmaceutically acceptable carriers include, without limitation, any and all solvents, dispersion media, coatings, antibacterial and antifungal agents, isotonic and absorption delaying agents, and the like that are physiologically compatible. Compositions of the present invention can include a pharmaceutically acceptable salt, e.g., an acid addition salt or a base addition salt.

[0500] Exemplary generally used pharmaceutically acceptable carriers include any and all absorption delaying agents, antioxidants, binders, buffering agents, bulking agents or fillers, chelating agents, coatings, disintegration agents, dispersion media, gels, isotonic agents, lubricants, preservatives, salts, solvents or co-solvents, stabilizers, surfactants, and/or delivery vehicles.

[0501] In various embodiments, a composition including a selection agent as described herein, e.g., a sterile formulation for injection, can be formulated in accordance with conventional pharmaceutical practices using distilled water for injection as a vehicle. For example, physiological saline or an isotonic solution containing glucose and other supplements such as D-sorbitol, D-mannose, D-mannitol, and sodium chloride may be used as an aqueous solution for injection, optionally in combination with a suitable solubilizing agent, for example, alcohol such as ethanol and polyalcohol such as propylene glycol or polyethylene glycol, and a nonionic surfactant such as polysorbate 80™, HCO-50 and the like.

[0502] The formulations disclosed herein can be formulated for administration by, for example, injection. For injection, formulation can be formulated as aqueous solutions, such as in buffers including Hanks' solution, Ringer's solution, or physiological saline, or in culture media, such as Iscove's Modified Dulbecco's Medium (IMDM). The aqueous solutions can include formulatory agents such as suspending, stabilizing, and/or dispersing agents. Alternatively, the formulation can be in lyophilized and/or powder form for constitution with a suitable vehicle, e.g., sterile pyrogen-free water, before use.

[0503] Any formulation disclosed herein can advantageously include any other pharmaceutically acceptable carriers which include those that do not produce significantly adverse, allergic, or other untoward reactions that outweigh the benefit of administration. Exemplary pharmaceutically acceptable carriers and formulations are disclosed in Remington's Pharmaceutical Sciences, 18th Ed. Mack Printing Company, 1990. Moreover, formulations can be prepared to meet sterility, pyrogenicity, general safety, and purity standards as required by US FDA Office of Biological Standards and/or other relevant foreign regulatory agencies.

[0504] Therapeutically effective amounts of a selection agent can include a dose of an MGMT inhibitor such as O⁶BG or an analog or derivative thereof that ranges from, for example, 0.001 to 1,000 mg/kg (e.g., 1-5, 1-10, 1-20, 1-50, 1-100, 1-250, 1-500, 1-1,000, 10-50, 10-100, 10-250, 10-500, 10-1,000, 100-250, 100-500, or 100-1,000 mg/kg). In particular embodiments, a therapeutically effective amount of MGMT inhibitor includes 0.001 to 1,000 mg/kg (e.g., 1-5, 1-10, 1-20, 1-50, 1-100, 1-250, 1-500, 1-1,000, 10-50, 10-100, 10-250, 10-500, 10-1,000, 100-250, 100-500, or 100-1,000 mg/kg). Therapeutically effective amounts of a selection agent can include a dose of an alkylating agent such as BCNU or an analog or derivative thereof that ranges from, for example, 0.001 to 100 mg/kg (e.g., 1-5, 1-10, 1-20, 1-50, 5-10, 5-20, or 5-50 mg/kg). Therapeutically effective amounts of a selection agent can include a dose of an alkylating agent such as temozolomide or an analog or derivative thereof that ranges from, for example, 0.001 to 1,000 mg/kg (e.g., 1-5, 1-10, 1-20, 1-50, 1-100, 1-250, 1-500, 1-1,000, 10-50, 10-100, 10-250, 10-500, 10-1,000, 100-250, 100-500, or 100-1,000 mg/kg). In particular embodiments, a therapeutically effective amount of an alkylating agent includes 0.001 to 1,000 mg/kg (e.g., 1-5, 1-10, 1-20, 1-50, 1-100, 1-250, 1-500, 1-1,000, 10-50, 10-100, 10-250, 10-500, 10-1,000, 100-250, 100-500, or 100-1,000 mg/kg). In particular embodiments, a therapeutically effective amount of a selection agent can be administered subcutaneously or intravenously. In particular embodiments, a therapeutically effective amount of selection agent can be administered before, at the same time as, or after administration of one or more immunosuppression agents or immunosuppression regimens, one or more mobilization factors, one or more vectors, and/or one or more nucleic acids of the present disclosure.

[0505] In various embodiments of the present disclosure, an in vivo, in vitro, and or ex vivo gene therapy includes administration of at least one viral vector to a subject in combination with at least one selection agent. In an in vivo, in vitro, and or ex vivo gene therapy including more than one selection agent, the first selection agent and the second selection agent can be administered in a single formulation or dosage form or in two separate formulations or dosage forms. In various embodiments, the first and second selection agent can be administered at the same time or at different times, e.g., during the same one-hour period or during non-overlapping one-hour periods. In various embodiments, the first and second selection agent can be administered at the same time or at different times, e.g., on the same day or on different days.

[0506] In various embodiments, a selection agent is administered to a subject in a single total dose on a single day. In various embodiments, a selection agent is administered in two, three, four, or more unit doses that together constitute a total dose. In various embodiments, one unit dose of a selection agent is administered to a subject per day on each of one, two, three, four, or more consecutive days. In various embodiments, two unit doses of a selection agent are administered to a subject per day on each of one, two, three, four, or more consecutive days. Accordingly, in various embodiments, a daily dose can refer to the dose of selection agent received by a subject over the course of a day. In various embodiments, the term day refers to a twenty-four-hour period, such as a twenty-four-hour period from midnight of a first calendar date to midnight of the next calendar date.

### Kits

[0507] The present disclosure provides kits that include an editing nucleic acid of the present disclosure. In certain embodiments, the present disclosure provides kits that include a pharmaceutical composition disclosed herein and at least one additional composition for use in a method of gene therapy. In some embodiments, a kit of the present disclosure can include an editing nucleic acid and one or more MGMT inhibitors (e.g., O⁶BG or an analog or derivative thereof). In some embodiments, a kit of the present disclosure can include an editing nucleic acid and one or more alkylating agents (e.g., BCNU and/or temozolomide). In some embodiments, a kit of the present disclosure can include an editing nucleic acid and a selection regimen. In some embodiments, a kit of the present disclosure can include an editing nucleic acid and one or more hematopoietic cell mobilization agents. In some embodiments, a kit of the present disclosure can include an editing nucleic acid and one or more immunosuppression agents. In various embodiments, a kit can include instructions for selecting for modified cells. In some embodiments, a kit of the present disclosure can include an editing nucleic acid (optionally present in a pharmaceutically acceptable formulation) and a plurality of additional agents including, without limitation, one or more of an MGMT inhibitor, an alkylating agent, a selection regimen, a mobilization agent, an immunosuppression agent, and/or instructions for use thereof, e.g., in a method of gene therapy and/or a method of selecting for modified cells.

### EXAMPLES

[0508] The present Examples provide mutations that, when present in an MGMT polypeptide, unexpectedly confer inhibitor resistance to the MGMT polypeptide. The present Examples additionally provide assays useful in characterizing inhibitor-resistant MGMT polypeptides. The present Examples illustrate that editing systems can be engineered to target an MGMT-encoding nucleic acid in order to produce a modified MGMT-encoding nucleic acid that encodes an inhibitor-resistant MGMT. The present Examples further include that such editing systems can be delivered to a subject (e.g., using a viral vector) to modify cells of a subject. Moreover, administration of an editing system exemplified herein to a subject permits selection of modified cells (and selective elimination of non-modified cells) by administration of a selection regimen. Nucleic acids encoding editing systems exemplified herein can further deliver a therapeutic payload (e.g., a multiplexed editing system that includes a therapeutic component) to cells, whereby cells receiving the therapeutic payload that treats a target disease, disorder, or condition can be selected for. Such methods can increase the prevalence of cells that received the therapeutic payload to improve treatment of the disease, disorder, or condition.

### Example 1: Assays of MGMT Activity

[0509] The present Example provides methods that can be used to assess the activity of inhibitor-resistant MGMT (including, e.g., inhibitor-resistant MGMT encoded by modified MGMT-encoding nucleic acids). The present Example contemplates at least the following samples and conditions for analysis: purified samples of inhibitor-resistant cells or MGMT polypeptides (in the presence or absence of an MGMT inhibitor), purified samples of reference cells or polypeptides (in the presence or absence of an MGMT inhibitor), and samples including both inhibitor-resistant cells or MGMT polypeptides and reference cells or MGMT polypeptides (in the presence or absence of an MGMT inhibitor). Samples can be, without limitation, isolated cells or isolated polypeptides. Examples of samples including both reference MGMT polypeptides and inhibitor-resistant MGMT polypeptides can include samples isolated from, or in vivo assessment in, a subject or system to which an MGMT editing system was delivered.

[0510] Various assays can include assessment of any of one or more of i) expression and stability within mammalian cells, ii) endogenous alkyltransferase activity level, iii) resistance to inhibition by O⁶-BG (or other O⁶-benzylguanine analogues such as PaTrin-2), iv) ability to confer a proliferative advantage to HSCs following exposure to both an alkylating agent and O⁶-benzylguanine based inhibitor. A secondary criterion to assess can include the presence of a selective disadvantage conferred by the inhibitor-resistant MGMT in the absence of external selection pressures (e.g. alkylating agents and O⁶-BG).

[0511] The present Example includes, in part, an in vitro assay of [³H] methyl group transfer to MGMT under protein-limiting conditions. Highly specific radioactivity [3H]-methylated DNA substrate is incubated with cellular extract containing MGMT under protein-limiting conditions until the transfer reaction is complete or until a fixed time point. Excess substrate DNA is hydrolyzed to acid solubility and radioactivity in the residual protein is measured by liquid scintillation counting. Further description of certain such assays is found in Watson ((2000). O⁶-Alkylguanine-DNA Alkyltransferase Assay. In DNA Repair Protocols (pp. 49-61). Springer), which is incorporated herein by reference.

[0512] The present Example includes, in part, an in vitro competition assay that directly compares differences in proliferative advantage during or following exposure to alkylating agent and O⁶-BG. Cells (e.g., K562 or A549 cells) are transduced with plasmids or viral vectors (e.g. lentiviral vectors or integrating HDAd vectors) encoding, e.g., an MGMT editing system or an MGMT polypeptide. Cells are challenged with alkylating agent (e.g., 10 μM temozolomide) and O⁶-BG (e.g., 10 μM). Survival can be assessed, e.g., 3 and 6 days later via FACS. Further description of certain such assays is found in Woolford (2006 J. Gene Med. 8 (1): 29-34), which is incorporated herein by reference.

[0513] The present Example includes, in part, an in vitro assay of MGMT activity in which the MGMT is expressed from a transgene introduced into a cell genome by a viral vector. In some instances, an assay can utilize a two-vector HDAd system in which one vector (HDAd-GFP/MGMT) encodes MGMT and GFP within an integrating transposon flanked by inverted repeat (IR) and Flp Recognition Target (FRT) sites and the other vector (HDAd-SB) encodes Sleeping Beauty transposase and flp recombinase for circularization and integration of the MGMT-containing transposon. HUDEP-2 cells are transduced with both vectors. Erythroid differentiation of cells is initiated and cells are treated with multiple rounds of O⁶-BG (e.g., 50 μM) and BCNU (e.g., 10 μM and then 25 μM), e.g., at days 18 and 25. Positive selection of transduced cells can be assayed by flow cytometry. In some instances, a plasmid could be used to transfect HUDEP-2 cells in place of transduction with the HDAd-GFP/MGMT vector, with plasmid transfection one day prior to HDAd-SB transduction.

[0514] The present Example includes, in part, an in vitro assay that includes a fluorogenic probe of MGMT activity. A fluorogenic probe to assay for MGMT activity offers a straightforward, high dynamic range system that does not rely on radioactive reagents. The chemosensors operate via incorporation of a fluorophore and quencher pair, which become separated by the MGMT dealkylation reaction, yielding light-up responses of up to 55-fold, directly reflecting repair activity. Further description of certain such assays is found in Beharry (2016 PLoS ONE 11 (4): 1-15), which is incorporated herein by reference.

[0515] The present Example includes, in part, an in vitro fluorescence multiplex host cell reactivation (FM-HCR) assay in which a reporter plasmid with O⁶MeG-containing oligonucleotides is used. The oligonucleotides induce transcription errors that lead to expression of fluorescent mPlum protein. Functional MGMT will repair the O⁶MeG sites and reduce mPlum expression. This represents a rapid and validated assay system to assess intracellular activity of MGMT. Further description of certain such assays is found in Nagel (2014 PNAS USA 111 (18): E1823-32, which is incorporated herein by reference.

[0516] The present Example includes, in part, an in vitro survival assay using bacteria. Bacteria (e.g., E. coli) are engineered to express an MGMT polypeptide (e.g., an inhibitor-resistant MGMT polypeptide or a reference MGMT polypeptide). Bacteria are then contacted with a selection regimen including an alkylating agent (e.g., methylnitronitrosoguanidine (MNNG)) and cell survival of cells is subsequently assayed, e.g., as compared to a reference (e.g., reference cells and/or cells not contacted with the selection regimen). Further description of certain such assays is found in Pegg (1998 Cancer Res. 59:1936-1945) and Xu-Welliver (1999 Cancer Res. 59 (7): 1514-1519), which are incorporated herein by reference.

[0517] The present Example includes, in part, an in vivo assay in mice. Mice (e.g., CD46tg mice) are mobilized with G-CSF and AMD3100 and treated with dexamethasone. A two-vector HDAd system including HDAd-SB and HDAd-GFP/MGMT vectors is administered intravenously. Mice are subsequently administered O⁶BG/BCNU (e.g., in four doses at week 4, 6, 8, and 10 after HDAd administration). The O⁶BG dose can be, e.g., 30 mg/kg. BCNU doses can be, e.g., 5, 7.5, 10, 10, mg/kg corresponding in order to the four doses. Biweekly beginning at week 4, the fraction of gene modified PBMCs or RBCs can be assessed via qPCR or flow cytometry. The fraction of gene modified HSCs can be assessed from bone marrow samples. Further description of certain such assays is found in Wang (2020 JCI Insight 5 (16), 1-17), which is incorporated herein by reference.

### Example 2: Characterization of O(6)-Methylguanine Binding and Inhibitor Binding

[0518] The present Example provides an analysis of the binding site of MGMT with O(6)-methylguanine and the MGMT inhibitor O⁶BG. A model of binding between MGMT and each of O(6)-methylguanine and O⁶BG was prepared based on structures of wild-type MGMT protein alone, wild-type MGMT protein covalently bound to alkylguanine, and a modified MGMT^{C145S} bound to O⁶-benzylguanine (O⁶BG). Certain amino acid positions in which mutations of the present disclosure are found (Table 1) including positions 33, 134, 135, 137, 138, 140, 156, 158, 159, and 160 were in close proximity to the phenyl group in O⁶BG. MGMT mutations listed in Table 1, which mutations unexpectedly produce inhibitor-resistant MGMT polypeptides, were found to disrupt interaction of MGMT with the MGMT inhibitor O⁶BG while retaining some or all ability bind O(6)-methylguanine.

### Example 3. Characterization of MGMT Variants that are MGMT Inhibitor Resistant

[0519] The present Example demonstrates that exemplary MGMT variants disclosed in Table 1 and Table 2 are resistant to the MGMT inhibitor O⁶BG. The present Example uses an in vitro FM-HCR assay in which a reporter plasmid with 0° MeG-containing oligonucleotides is used to assay MGMT activity in cells. The O⁶MeG-containing oligonucleotides induce transcription errors that lead to expression of fluorescent mPlum protein. Functional MGMT will repair the O'MeG sites and reduce mPlum expression. This represents a rapid and validated assay system to assess intracellular activity of MGMT. Further description of certain such assays is found in Nagel et al., 2014 PNAS USA 111 (18): E1823-32 and Piett et al., 2021 Nat. Protoc. 16 (9): 4265-4298, each of which is incorporated herein by reference.

[0520] The in vitro FM-HCR assay was performed using the U251 human glioblastoma cell line. The cells were cultured in DMEM with 10% FBS and passaged every three days.

[0521] To express MGMT variants in the cells, plasmids encoding each MGMT variant were designed and generated by either de novo synthesis or cloning into the pTwist EF1 Alpha Puro vector at the HindII-BamHI multiple cloning site. The pTwist EF1 Alpha Puro plasmid vector drives expression of the MGMT transcript from a human EF1-alpha promoter including intron 1 and an SV40 polyadenylation signal. Plasmids encoding the MGMT variants were purified using standard molecular biology techniques from E. coli with low endotoxins. Plasmids encoding wild-type MGMT or O⁶BG-resistant MGMT^{P140K} were also designed and generated for use as controls.

[0522] To perform the in vitro FM-HCR assay, U251 cells were seeded in 12-well plates at a density of 50,000 cells per well in 1 mL culture media. The following day, the media was changed to 1 mL of culture media containing O⁶BG (100 μM O⁶BG and 0.1% DMSO final) or 0.1% DMSO; and the cells were transfected with 1,000 ng of a plasmid cocktail using Lipofectamine 3000 (ThermoFisher Scientific) at 1.8 μL Lipofectamine 3000 Reagent and 2 μL P3000 reagent in Opti-MEM medium (ThermoFisher Scientific). For the “damaged” condition, the plasmid cocktail comprised (i) 250 ng of an MGMT encoding plasmid, (ii) 100 ng of mPlum 0° MeG reporter plasmid, (iii) 100 ng of plasmid encoding blue fluorescent protein (BFP), and (vi) 550 ng of carrier plasmid that does not encode any fluorescent protein. For the “undamaged” condition, the plasmid cocktail replaced the mPlum O⁶MeG reporter plasmid with 100 ng of a plasmid expressing mPlum. The plasmid encoding BFP was used as an internal transfection control. For transfections where no MGMT encoding plasmid is used (no pMGMT), 250 ng of additional carrier plasmid was used to maintain a total DNA amount of 1,000 ng in each transfection. Four hours after transfection, the transfection medium was changed.

[0523] All transfected cells were analyzed by flow cytometry at 24-hours after transfection. Data was analyzed as previously described in Nagel et al., 2014 PNAS USA 111 (18): E1823-32 and Piett et al., 2021 Nat. Protoc. 16 (9): 4265-4298. For each condition, normalized reporter expression was determined by taking the product of the mPlum-positive cell count and the mean mPlum fluorescence intensity in mPlum-positive cells and dividing it by the product of the BFP-positive cell count and the mean BFP fluorescence intensity in BFP-positive cells. Next, for each MGMT variant, the percent reporter expression was determined by taking the normalized reporter expression in the “damaged” condition and dividing it by the normalized reporter expression in the “undamaged” condition, and then multiplying by 100 to obtain a percent value.

[0524] Table 25 shows in vitro FM-HCR assay results for the tested MGMT variants. For each MGMT variant, the mean percent reporter expression for the DMSO condition and the O⁶BG condition is shown, along with their associated standard deviations and the number of replicates (n). Additionally, Table 25 indicates for each MGMT variant whether prime editing and/or base editing can be used to modify an endogenous MGMT-encoding nucleic acid to produce a modified nucleic acid that encodes the MGMT variant.

TABLE 25
FM-HCR Assay Results

| | | | DMSO | | | O⁶BG | | |
|---|---|---|---|---|---|---|---|---|
| | | | Reporter | | | Reporter | | |
| MGMT | | | expression (%) | | | expression (%) | | |
| variant | Prime | Base | mean | stdev | n | mean | stdev | n |
| no pMGMT | — | — | 100.0 | 0.0 | 4 | 100.0 | 0.0 | 3 |
| WT | — | — | 18.5 | 2.1 | 4 | 70.0 | 6.6 | 4 |
| P140K | yes | — | 30.2 | 5.7 | 5 | 34.8 | 2.9 | 5 |
| L33F | yes | yes | 14.3 | 0.9 | 3 | 77.0 | 9.3 | 3 |
| L33K | yes | — | 16.0 | 2.1 | 4 | 62.3 | 1.5 | 4 |
| L33P | yes | yes | 12.3 | 0.5 | 3 | 54.7 | 1.2 | 3 |
| L33R | yes | — | 15.0 | 0.8 | 3 | 58.3 | 3.1 | 3 |
| L33W | yes | — | 14.3 | 0.5 | 3 | 57.7 | 8.0 | 3 |
| L33Y | yes | — | 17.0 | 0.7 | 4 | 77.3 | 13.4 | 4 |
| M134F | yes | — | 51.3 | 4.9 | 3 | 97.0 | 11.4 | 3 |
| M134V | yes | yes | 17.8 | 2.3 | 4 | 66.0 | 5.8 | 4 |
| M134W | yes | — | 103.5 | 11.8 | 4 | 112.3 | 11.4 | 3 |
| M134Y | yes | — | 108.0 | 6.2 | 3 | 106.3 | 13.1 | 3 |
| R135G | yes | yes | 20.0 | 0.8 | 3 | 106.0 | 11.3 | 3 |
| R135K | yes | yes | 13.3 | 0.5 | 3 | 84.3 | 13.3 | 3 |
| R135L | yes | — | 42.8 | 4.3 | 4 | 82.5 | 9.2 | 4 |
| R135T | yes | yes | 27.3 | 1.9 | 3 | 101.7 | 15.2 | 3 |
| N137D | yes | yes | 52.3 | 3.4 | 3 | 80.7 | 9.7 | 3 |
| N137F | yes | — | 109.7 | 7.4 | 3 | 104.3 | 11.1 | 3 |
| N137P | yes | — | 94.0 | 9.4 | 3 | 93.0 | 10.6 | 3 |
| P138K | yes | — | 16.3 | 1.2 | 3 | 64.0 | 8.3 | 3 |
| P140F | yes | yes | 25.3 | 10.8 | 4 | 76.8 | 31.6 | 4 |
| P140H | yes | — | 15.7 | 1.2 | 3 | 29.3 | 2.6 | 3 |
| P140I | yes | — | 14.7 | 1.2 | 3 | 31.0 | 5.0 | 3 |
| P140Q | yes | — | 15.3 | 0.5 | 3 | 49.0 | 4.2 | 3 |
| P140R | yes | yes | 25.3 | 2.1 | 3 | 38.3 | 2.1 | 3 |
| G156A | yes | yes | 32.3 | 5.4 | 4 | 79.0 | 28.5 | 4 |
| G156I | yes | — | 42.0 | 1.4 | 3 | 54.0 | 3.3 | 3 |
| G156P | yes | yes | 41.0 | 1.6 | 3 | 47.3 | 2.9 | 3 |
| G156V | yes | — | 36.8 | 3.6 | 4 | 55.0 | 4.5 | 4 |
| Y158F | yes | — | 12.3 | 1.2 | 3 | 61.3 | 3.3 | 3 |
| Y158H | yes | yes | 23.3 | 1.2 | 3 | 30.3 | 4.8 | 3 |
| Y158M | yes | — | 47.7 | 2.6 | 3 | 60.0 | 9.2 | 3 |
| Y158W | yes | — | 26.0 | 2.2 | 3 | 86.7 | 3.9 | 3 |
| S159F | yes | yes | 23.0 | 1.6 | 3 | 102.7 | 5.0 | 3 |
| S159I | yes | — | 18.0 | 2.4 | 3 | 40.3 | 6.8 | 3 |
| S159W | yes | yes | 31.3 | 2.6 | 3 | 108.0 | 7.9 | 3 |
| S159Y | yes | — | 26.0 | 5.4 | 3 | 142.7 | 11.0 | 3 |
| G160A | yes | yes | 15.5 | 1.7 | 4 | 74.5 | 1.7 | 4 |
| G160D | yes | — | 23.0 | 2.8 | 4 | 72.8 | 3.3 | 4 |
| G160E | yes | yes | 15.3 | 0.8 | 4 | 63.3 | 4.1 | 4 |
| G160H | yes | — | 10.3 | 1.2 | 3 | 21.3 | 2.1 | 3 |
| G160P | yes | yes | 22.8 | 5.1 | 4 | 47.5 | 9.7 | 4 |
| A170S | yes | — | 15.8 | 2.9 | 4 | 85.0 | 9.2 | 4 |

[0525] Table 26 shows analysis of the in vitro FM-HCR assay results presented in Table 25. As percent reporter expression shown in Table 25 is inversely related to MGMT activity, MGMT activity in DMSO and O⁶BG conditions can be determined and is presented in Table 26 as arbitrary units (a.u.), and also as a percentage relative to wild-type MGMT activity in the same condition. Additionally, Table 26 shows, for each MGMT variant, the ratio of the percent reporter expression for O⁶BG relative to DMSO. Lower values for this ratio are indicative of resistance to O⁶BG, while higher values are indicative of sensitivity to O⁶BG. Similarly, for each MGMT variant, the relative MGMT activity in the O⁶BG condition and the DMSO condition was calculated by dividing the respective MGMT activity (a.u.) values and then multiplying by 100 to obtain a percent value. Higher values for relative MGMT activity are indicative of resistance to O⁶BG, while lower values are indicative of sensitivity to O⁶BG. Finally, for each MGMT variant, O⁶BG resistance relative to wild-type MGMT was calculated as the percentage difference in relative MGMT activity (%) between the MGMT variant and wild-type MGMT. Positive values for O⁶BG resistance relative to WT are indicative of MGMT variants that have increased resistance to O⁶BG, while negative values are indicative of MGMT variants have increased sensitivity to O⁶BG.

TABLE 26
FM-HCR Assay Analysis

| | | | | | Ratio | | |
|---|---|---|---|---|---|---|---|
| | | | | | percent | | |
| | | | | | reporter | Relative | O⁶BG |
| | MGMT activity | | MGMT activity | | expression | MGMT | resistance |
| MGMT | (a.u.) | | (% of WT) | | (O⁶BG/ | activity | relative to |
| variant | DMSO | O⁶BG | DMSO | O⁶BG | DMSO) | (%) | WT (%) |
| no pMGMT | — | — | — | — | 1.00 | — | — |
| WT | 5.41 | 1.43 | 100.0 | 100.0 | 3.78 | 26.4 | 0.0 |
| P140K | 3.31 | 2.87 | 61.3 | 201.1 | 1.15 | 86.8 | 228.4 |
| L33F | 6.98 | 1.30 | 129.1 | 90.9 | 5.37 | 18.6 | −29.6 |
| L33K | 6.25 | 1.61 | 115.6 | 112.4 | 3.89 | 25.7 | −2.7 |
| L33P | 8.11 | 1.83 | 150.0 | 128.0 | 4.43 | 22.6 | −14.6 |
| L33R | 6.67 | 1.71 | 123.3 | 120.0 | 3.89 | 25.7 | −2.7 |
| L33W | 6.98 | 1.73 | 129.1 | 121.4 | 4.02 | 24.9 | −6.0 |
| L33Y | 5.88 | 1.29 | 108.8 | 90.6 | 4.54 | 22.0 | −16.7 |
| M134F | 1.95 | 1.03 | 36.0 | 72.2 | 1.89 | 52.9 | 100.2 |
| M134V | 5.63 | 1.52 | 104.2 | 106.1 | 3.72 | 26.9 | 1.8 |
| M134W | 0.97 | 0.89 | 17.9 | 62.3 | 1.09 | 92.1 | 248.6 |
| M134Y | 0.93 | 0.94 | 17.1 | 65.8 | 0.98 | 101.6 | 284.3 |
| R135G | 5.00 | 0.94 | 92.5 | 66.0 | 5.30 | 18.9 | −28.6 |
| R135K | 7.50 | 1.19 | 138.8 | 83.0 | 6.33 | 15.8 | −40.2 |
| R135L | 2.34 | 1.21 | 43.3 | 84.8 | 1.93 | 51.8 | 96.1 |
| R135T | 3.66 | 0.98 | 67.7 | 68.9 | 3.72 | 26.9 | 1.7 |
| N137D | 1.91 | 1.24 | 35.4 | 86.8 | 1.54 | 64.9 | 145.5 |
| N137F | 0.91 | 0.96 | 16.9 | 67.1 | 0.95 | 105.1 | 297.7 |
| N137P | 1.06 | 1.08 | 19.7 | 75.3 | 0.99 | 101.1 | 282.4 |
| P138K | 6.12 | 1.56 | 113.3 | 109.4 | 3.92 | 25.5 | −3.4 |
| P140F | 3.96 | 1.30 | 73.3 | 91.2 | 3.04 | 32.9 | 24.5 |
| P140H | 6.38 | 3.41 | 118.1 | 238.6 | 1.87 | 53.4 | 102.1 |
| P140I | 6.82 | 3.23 | 126.1 | 225.8 | 2.11 | 47.3 | 79.0 |
| P140Q | 6.52 | 2.04 | 120.7 | 142.9 | 3.20 | 31.3 | 18.4 |
| P140R | 3.95 | 2.61 | 73.0 | 182.6 | 1.51 | 66.1 | 150.1 |
| G156A | 3.10 | 1.27 | 57.4 | 88.6 | 2.45 | 40.8 | 54.5 |
| G156I | 2.38 | 1.85 | 44.0 | 129.6 | 1.29 | 77.8 | 194.3 |
| G156P | 2.44 | 2.11 | 45.1 | 147.9 | 1.15 | 86.6 | 227.8 |
| G156V | 2.72 | 1.82 | 50.3 | 127.3 | 1.50 | 66.8 | 152.8 |
| Y158F | 8.11 | 1.63 | 150.0 | 114.1 | 4.97 | 20.1 | −23.9 |
| Y158H | 4.29 | 3.30 | 79.3 | 230.8 | 1.30 | 76.9 | 191.1 |
| Y158M | 2.10 | 1.67 | 38.8 | 116.7 | 1.26 | 79.4 | 200.6 |
| Y158W | 3.85 | 1.15 | 71.2 | 80.8 | 3.33 | 30.0 | 13.5 |
| S159F | 4.35 | 0.97 | 80.4 | 68.2 | 4.46 | 22.4 | −15.2 |
| S159I | 5.56 | 2.48 | 102.8 | 173.6 | 2.24 | 44.6 | 68.9 |
| S159W | 3.19 | 0.93 | 59.0 | 64.8 | 3.45 | 29.0 | 9.8 |
| S159Y | 3.85 | 0.70 | 71.2 | 49.1 | 5.49 | 18.2 | −31.0 |
| G160A | 6.45 | 1.34 | 119.4 | 94.0 | 4.81 | 20.8 | −21.3 |
| G160D | 4.35 | 1.37 | 80.4 | 96.2 | 3.16 | 31.6 | 19.6 |
| G160E | 6.56 | 1.58 | 121.3 | 110.7 | 4.15 | 24.1 | −8.8 |
| G160H | 9.68 | 4.69 | 179.0 | 328.1 | 2.06 | 48.4 | 83.3 |
| G160P | 4.40 | 2.11 | 81.3 | 147.4 | 2.09 | 47.9 | 81.2 |
| A170S | 6.35 | 1.18 | 117.5 | 82.4 | 5.40 | 18.5 | −29.9 |

### Example 4: Prime Editing Systems that Introduce a P140K (AAA) MGMT Modification

[0526] Amino acid position 140 of a reference endogenous MGMT gene is a proline encoded by a CCC codon. Modification of the endogenous MGMT gene to instead encode a lysine at position 140 (e.g., by editing of the codon to AAA) causes the endogenous gene to encode an inhibitor-resistant MGMT polypeptide. The modified MGMT polypeptide of the present Example can be referred to as MGMT^{P140K}. The present Example includes prime editing systems that can modify an endogenous MGMT gene to produce a modified MGMT gene that encodes an inhibitor-resistant MGMT^{P140K} polypeptide.

[0527] pegRNAs can be generated by introducing user-designed target-specific nucleic acids into a pegRNA acceptor plasmid. The present Example utilizes the publicly available acceptor plasmid pU6-pegRNA-GG-acceptor (Addgene plasmid #132777). The pegRNA acceptor plasmid encodes and can express a pegRNA following introduction into the plasmid of a spacer and a 3′ extension (including the PBS and RT template).

[0528] The present Example includes pegRNAs characterized by a spacer selected from Table 27, an RT template selected from Table 28, and a PBS sequence selected from Table 29 in the following tables. Information presented in Table 27 additionally includes the strand orientation of the spacer sequence (whether a portion of a sequence such as SEQ ID NO: 3, 4, 5, 6, or 7, or NG_052673, that corresponds to the spacer sequence is present in a “sense” or “antisense” strand, e.g., relative to a provided sequence or a sequence encoding all or a portion of an MGMT polypeptide), the distance between the spacer sequence and the nearest edited nucleotide of the target sequence, and whether the PAM site is disrupted.

[0529] A secondary nicking sgRNA can also optionally be included to stimulate re-synthesis of the non-edited strand using the edited strand as a template, resulting in a fully edited duplex. sgRNAs can be generated by introducing user-designed target-specific nucleic acids into a sgRNA acceptor plasmid. The present Example utilizes the publicly available sgRNA acceptor plasmid, PE3. The sgRNA acceptor plasmid encodes and can express a sgRNA following introduction into the plasmid of a spacer sequence targeting the site to be nicked.

[0530] The present Example additionally includes secondary nicking sgRNAs characterized by a sequence selected from Table 30.

TABLE 27
Spacers

| | | Distance | Seed/ | SEQ |
|---|---|---|---|---|
| | | to Edit | PAM | ID |
| Sequence | Orientation | Start | Disrupt | NO: |
| TGTGGCACGGGATGAGGATG | antisense | 2 | 1 | 222 |
| CTGTGGCACGGGATGAGGAT | antisense | 3 | 1 | 223 |
| TCTGTGGCACGGGATGAGGA | antisense | 4 | 1 | 224 |
| TGGCTGCCCCCCTGTCTTCC | sense | 8 | 0 | 225 |
| CCACTCTGTGGCACGGGATG | antisense | 8 | 0 | 226 |
| TGCAGACCACTCTGTGGCAC | antisense | 14 | 0 | 227 |
| CTGCAGACCACTCTGTGGCA | antisense | 15 | 0 | 228 |
| CGCTGCTGCAGACCACTCTG | antisense | 20 | 0 | 229 |
| TCCAGATCCCTGACTGACAG | sense | 28 | 0 | 230 |
| TCCTCCGGAGTAGTTGCCCA | antisense | 46 | 0 | 231 |
| TTCCTTCACGGCCAGTCCTC | antisense | 61 | 0 | 232 |
| GGCCAGAAGCCATTCCTTCA | antisense | 73 | 0 | 233 |
| ACTCCTGTCAGTCAGGGCCT | sense | 74 | 0 | 234 |
| CACAGGACTCCTGTCAGTCA | sense | 80 | 0 | 235 |
| GCACAGGACTCCTGTCAGTC | sense | 81 | 0 | 236 |
| CCCCAACCGGTGGCCTTCAT | antisense | 94 | 0 | 237 |
| TCCCCAACCGGTGGCCTTCA | antisense | 95 | 0 | 238 |
| GGCCCCTGCTTGGTGGGCAC | sense | 97 | 0 | 239 |
| GGCACAGGCCCCTGCTTGGT | sense | 103 | 0 | 240 |
| AGCCTGGCTTCCCCAACCGG | antisense | 104 | 0 | 241 |
| TGGCACAGGCCCCTGCTTGG | sense | 104 | 0 | 242 |
| CCAAGCCTGGCTTCCCCAAC | antisense | 107 | 0 | 243 |
| CCCTGGCACAGGCCCCTGCT | sense | 107 | 0 | 244 |
| CAACAGCCTGCCCCTGGCAC | sense | 118 | 0 | 245 |
| CCTGAGCTCCCTCCCAAGCC | antisense | 120 | 0 | 246 |
| CCATGCCAACAGCCTGCCCC | sense | 124 | 0 | 247 |

TABLE 28
RT Templates

| | | SEQ ID |
|---|---|---|
| Sequence | Length | NO: |
| AGGTCAAAAT | 10 | 248 |
| CAGGTCAAAAT | 11 | 249 |
| CCAGGTCAAAAT | 12 | 250 |
| TCCAGGTCAAAAT | 13 | 251 |
| TTCCAGGTCAAAAT | 14 | 252 |
| CTTCCAGGTCAAAAT | 15 | 253 |
| TCTTCCAGGTCAAAAT | 16 | 254 |

TABLE 29
PBS Sequences

| | | SEQ ID |
|---|---|---|
| Sequence | Length | NO: |
| CCTCATCC | 8 | 255 |
| CCTCATCCC | 9 | 256 |
| CCTCATCCCG | 10 | 257 |
| CCTCATCCCGT | 11 | 258 |
| CCTCATCCCGTG | 12 | 259 |
| CCTCATCCCGTGC | 13 | 260 |
| CCTCATCCCGTGCC | 14 | 261 |
| CCTCATCCCGTGCCA | 15 | 262 |
| CCTCATCCCGTGCCAC | 16 | 263 |
| CCTCATCCCGTGCCACA | 17 | 264 |

TABLE 30
Secondary Nicking sgRNA Sequences

| | | | Distance | |
|---|---|---|---|---|
| | Nick | Orien- | to | SEQ |
| | Pos- | ta- | pegRNA | ID |
| Sequence | ition | tion | Nick | NO: |
| ACTCCTGTCAGTCAGGGCCT | 174 | Sense | 77 | 265 |
| CACAGGACTCCTGTCAGTCA | 168 | sense | 83 | 266 |
| GCACAGGACTCCTGTCAGTC | 167 | sense | 84 | 267 |
| GGCCCCTGCTTGGTGGGCAC | 151 | sense | 100 | 268 |
| GGCACAGGCCCCTGCTTGGT | 145 | sense | 106 | 269 |
| TGGCACAGGCCCCTGCTTGG | 144 | sense | 107 | 270 |
| CCCTGGCACAGGCCCCTGCT | 141 | sense | 110 | 271 |
| CAACAGCCTGCCCCTGGCAC | 130 | sense | 121 | 272 |
| CCATGCCAACAGCCTGCCCC | 124 | sense | 127 | 273 |
| GGTCTGCAGCAGCGGAGCCG | 291 | sense | −40 | 274 |
| GTCTGCAGCAGCGGAGCCGT | 292 | sense | −41 | 275 |
| GGAGCCGTGGGCAACTACTC | 304 | sense | −53 | 276 |
| GCCGTGGGCAACTACTCCGG | 307 | sense | −56 | 277 |
| GGGCAACTACTCCGGAGGAC | 312 | sense | −61 | 278 |
| CTCCGGAGGACTGGCCGTGA | 321 | sense | −70 | 279 |
| GAGGACTGGCCGTGAAGGAA | 326 | sense | −75 | 280 |
| GGCCGTGAAGGAATGGCTTC | 333 | sense | −82 | 281 |
| GAATGGCTTCTGGCCCATGA | 343 | sense | −92 | 282 |
| TTCTGGCCCATGAAGGCCAC | 350 | sense | −99 | 283 |
| GGCCCATGAAGGCCACCGGT | 354 | sense | −103 | 284 |
| GCCCATGAAGGCCACCGGTT | 355 | sense | −104 | 285 |
| CCCATGAAGGCCACCGGTTG | 356 | sense | −105 | 286 |
| GGCCACCGGTTGGGGAAGCC | 364 | sense | −113 | 287 |
| CCGGTTGGGGAAGCCAGGCT | 369 | sense | −118 | 288 |
| CGGTTGGGGAAGCCAGGCTT | 370 | sense | −119 | 289 |
| TTGGGGAAGCCAGGCTTGGG | 373 | sense | −122 | 290 |
| TGGGGAAGCCAGGCTTGGGA | 374 | sense | −123 | 291 |
| CCAGGCTTGGGAGGGAGCTC | 382 | sense | −131 | 292 |
| CTTGGGAGGGAGCTCAGGTC | 387 | sense | −136 | 293 |
| GGAGGGAGCTCAGGTCTGGC | 391 | sense | −140 | 294 |
| GAGGGAGCTCAGGTCTGGCA | 392 | sense | −141 | 295 |
| AGGGAGCTCAGGTCTGGCAG | 393 | sense | −142 | 296 |
| GCTCAGGTCTGGCAGGGGCC | 398 | sense | −147 | 297 |

### Example 5: Prime Editing Systems that Introduce a P140K(AAG) MGMT Modification

[0531] Due to the redundancy of the genetic code, a P140K inhibitor-resistant MGMT polypeptide can also be encoded by an endogenous MGMT gene modified to replace the CCC codon encoding P140 with a lysine-encoding AAG codon. The present Example includes prime editing systems that can modify an endogenous MGMT gene to produce a modified MGMT gene that encodes an inhibitor-resistant MGMT^{P140K} polypeptide. The present Example utilizes the pegRNA and sgRNA acceptor plasmids described in Example 4.

[0532] The present Example includes pegRNAs characterized by a spacer selected from Table 31, an RT template selected from Table 32, and a PBS sequence selected from Table 33 in the following tables. Information presented in Table 31 additionally includes the strand orientation of the spacer sequence, the distance between the spacer sequence and the nearest edited nucleotide of the target sequence, and whether the PAM site is disrupted.

[0533] The present Example additionally includes secondary nicking sgRNAs characterized by a sequence selected from Table 34.

TABLE 31
Spacers

| | Orien- | Distance | Seed/ | SEQ |
|---|---|---|---|---|
| | ta- | to Edit | PAM | ID |
| Sequence | tion | Start | Disrupt | NO: |
| TGTGGCACGGGATGAGGATG | Antisense | 2 | 1 | 298 |
| CTGTGGCACGGGATGAGGAT | Antisense | 3 | 1 | 299 |
| TCTGTGGCACGGGATGAGGA | Antisense | 4 | 1 | 300 |
| TGGCTGCCCCCCTGTCTTCC | sense | 8 | 0 | 301 |
| CCACTCTGTGGCACGGGATG | antisense | 8 | 0 | 302 |
| TGCAGACCACTCTGTGGCAC | antisense | 14 | 0 | 303 |
| CTGCAGACCACTCTGTGGCA | antisense | 15 | 0 | 304 |
| CGCTGCTGCAGACCACTCTG | antisense | 20 | 0 | 305 |
| TCCAGATCCCTGACTGACAG | sense | 28 | 0 | 306 |
| TCCTCCGGAGTAGTTGCCCA | antisense | 46 | 0 | 307 |
| TTCCTTCACGGCCAGTCCTC | antisense | 61 | 0 | 308 |
| GGCCAGAAGCCATTCCTTCA | antisense | 73 | 0 | 309 |
| ACTCCTGTCAGTCAGGGCCT | sense | 74 | 0 | 310 |
| CACAGGACTCCTGTCAGTCA | sense | 80 | 0 | 311 |
| GCACAGGACTCCTGTCAGTC | sense | 81 | 0 | 312 |
| CCCCAACCGGTGGCCTTCAT | antisense | 94 | 0 | 313 |
| TCCCCAACCGGTGGCCTTCA | antisense | 95 | 0 | 314 |
| GGCCCCTGCTTGGTGGGCAC | sense | 97 | 0 | 315 |
| GGCACAGGCCCCTGCTTGGT | sense | 103 | 0 | 316 |
| AGCCTGGCTTCCCCAACCGG | antisense | 104 | 0 | 317 |
| TGGCACAGGCCCCTGCTTGG | sense | 104 | 0 | 318 |
| CCAAGCCTGGCTTCCCCAAC | antisense | 107 | 0 | 319 |
| CCCTGGCACAGGCCCCTGCT | sense | 107 | 0 | 320 |
| CAACAGCCTGCCCCTGGCAC | sense | 118 | 0 | 321 |
| CCTGAGCTCCCTCCCAAGCC | antisense | 120 | 0 | 322 |
| CCATGCCAACAGCCTGCCCC | sense | 124 | 0 | 323 |

TABLE 32
RT Templates

| | | SEQ ID |
|---|---|---|
| Sequence | Length | NO: |
| AGGTCAAGAT | 10 | 324 |
| CAGGTCAAGAT | 11 | 325 |
| CCAGGTCAAGAT | 12 | 326 |
| TCCAGGTCAAGAT | 13 | 327 |
| TTCCAGGTCAAGAT | 14 | 328 |
| CTTCCAGGTCAAGAT | 15 | 329 |
| TCTTCCAGGTCAAGAT | 16 | 330 |

TABLE 33
PBS Sequences

| | | SEQ ID |
|---|---|---|
| Sequence | Length | NO: |
| CCTCATCC | 8 | 331 |
| CCTCATCCC | 9 | 332 |
| CCTCATCCCG | 10 | 333 |
| CCTCATCCCGT | 11 | 334 |
| CCTCATCCCGTG | 12 | 335 |
| CCTCATCCCGTGC | 13 | 336 |
| CCTCATCCCGTGCC | 14 | 337 |
| CCTCATCCCGTGCCA | 15 | 338 |
| CCTCATCCCGTGCCAC | 16 | 339 |
| CCTCATCCCGTGCCACA | 17 | 340 |

TABLE 34
Secondary Nicking sgRNA Sequences

| | | | Distance | |
|---|---|---|---|---|
| | Nick | Orien- | to | SEQ |
| | Pos- | ta- | pegRNA | ID |
| Sequence | ition | tion | Nick | NO: |
| ACTCCTGTCAGTCAGGGCCT | 174 | Sense | 77 | 341 |
| CACAGGACTCCTGTCAGTCA | 168 | Sense | 83 | 342 |
| GCACAGGACTCCTGTCAGTC | 167 | Sense | 84 | 343 |
| GGCCCCTGCTTGGTGGGCAC | 151 | Sense | 100 | 344 |
| GGCACAGGCCCCTGCTTGGT | 145 | Sense | 106 | 345 |
| TGGCACAGGCCCCTGCTTGG | 144 | Sense | 107 | 346 |
| CCCTGGCACAGGCCCCTGCT | 141 | Sense | 110 | 347 |
| CAACAGCCTGCCCCTGGCAC | 130 | Sense | 121 | 348 |
| CCATGCCAACAGCCTGCCCC | 124 | Sense | 127 | 349 |
| GGTCTGCAGCAGCGGAGCCG | 291 | Sense | −40 | 350 |
| GTCTGCAGCAGCGGAGCCGT | 292 | Sense | −41 | 351 |
| GGAGCCGTGGGCAACTACTC | 304 | Sense | −53 | 352 |
| GCCGTGGGCAACTACTCCGG | 307 | Sense | −56 | 353 |
| GGGCAACTACTCCGGAGGAC | 312 | Sense | −61 | 354 |
| CTCCGGAGGACTGGCCGTGA | 321 | Sense | −70 | 355 |
| GAGGACTGGCCGTGAAGGAA | 326 | Sense | −75 | 356 |
| GGCCGTGAAGGAATGGCTTC | 333 | Sense | −82 | 357 |
| GAATGGCTTCTGGCCCATGA | 343 | Sense | −92 | 358 |
| TTCTGGCCCATGAAGGCCAC | 350 | Sense | −99 | 359 |
| GGCCCATGAAGGCCACCGGT | 354 | Sense | −103 | 360 |
| GCCCATGAAGGCCACCGGTT | 355 | Sense | −104 | 361 |
| CCCATGAAGGCCACCGGTTG | 356 | Sense | −105 | 362 |
| GGCCACCGGTTGGGGAAGCC | 364 | Sense | −113 | 363 |
| CCGGTTGGGGAAGCCAGGCT | 369 | Sense | −118 | 364 |
| CGGTTGGGGAAGCCAGGCTT | 370 | Sense | −119 | 365 |
| TTGGGGAAGCCAGGCTTGGG | 373 | Sense | −122 | 366 |
| TGGGGAAGCCAGGCTTGGGA | 374 | Sense | −123 | 367 |
| CCAGGCTTGGGAGGGAGCTC | 382 | Sense | −131 | 368 |
| CTTGGGAGGGAGCTCAGGTC | 387 | Sense | −136 | 369 |
| GGAGGGAGCTCAGGTCTGGC | 391 | Sense | −140 | 370 |
| GAGGGAGCTCAGGTCTGGCA | 392 | Sense | −141 | 371 |
| AGGGAGCTCAGGTCTGGCAG | 393 | Sense | −142 | 372 |
| GCTCAGGTCTGGCAGGGGCC | 398 | Sense | −147 | 373 |

### Example 6: Prime Editing Systems that Introduce a G156A (GCG) MGMT Modification

[0534] Amino acid position 156 of a reference endogenous MGMT gene is a glycine encoded by a ggc codon. Modification of the endogenous MGMT gene to instead encode an alanine at position 156 (e.g., by editing of the codon to GCG) causes the endogenous gene to encode an inhibitor-resistant MGMT polypeptide. The modified MGMT polypeptide of the present Example can be referred to as MGMT^{G156A}

[0535] The present Example includes prime editing systems that can modify an endogenous MGMT gene to produce a modified MGMT gene that encodes MGMT^{G156A}. The present Example utilizes the pegRNA and sgRNA acceptor plasmids described in Example 4.

[0536] The present Example includes pegRNAs characterized by a spacer selected from Table 35, an RT template selected from Table 36, and a PBS sequence selected from Table 37 in the following tables. Information presented in Table 35 additionally includes the strand orientation of the spacer sequence, the distance between the spacer sequence and the nearest edited nucleotide of the target sequence, and whether the PAM site is disrupted.

[0537] The present Example additionally includes secondary nicking sgRNAs characterized by a sequence selected from Table 38.

TABLE 35
Spacers

| | Orien- | Distance | Seed/ | SEQ |
|---|---|---|---|---|
| | ta- | to Edit | PAM | ID |
| Sequence | tion | Start | Disrupt | NO: |
| GTCTGCAGCAGCGGAGCCGT | sense | 5 | 1 | 374 |
| GGTCTGCAGCAGCGGAGCCG | sense | 6 | 0 | 375 |
| TTCCTTCACGGCCAGTCCTC | antisense | 13 | 0 | 376 |
| CACAGAGTGGTCTGCAGCAG | sense | 14 | 0 | 377 |
| GGCCAGAAGCCATTCCTTCA | antisense | 25 | 0 | 378 |
| CCTCATCCCGTGCCACAGAG | sense | 27 | 0 | 379 |
| CCCCAACCGGTGGCCTTCAT | antisense | 46 | 0 | 380 |
| TCCCCAACCGGTGGCCTTCA | antisense | 47 | 0 | 381 |
| AGCCTGGCTTCCCCAACCGG | antisense | 56 | 0 | 382 |
| TGGCTGCCCCCCTGTCTTCC | sense | 57 | 0 | 383 |
| CCAAGCCTGGCTTCCCCAAC | antisense | 59 | 0 | 384 |
| CCTGAGCTCCCTCCCAAGCC | antisense | 72 | 0 | 385 |
| TCCAGATCCCTGACTGACAG | sense | 77 | 0 | 386 |
| AGCTCCCGCTCCCTTGAGCC | antisense | 106 | 0 | 387 |
| ACTCCTGTCAGTCAGGGCCT | sense | 123 | 0 | 388 |
| CACAGGACTCCTGTCAGTCA | sense | 129 | 0 | 389 |
| GCCAGCAGGCGGGGAGCCCG | antisense | 130 | 0 | 390 |
| GCACAGGACTCCTGTCAGTC | sense | 130 | 0 | 391 |
| TCAGTTTCGGCCAGCAGGCG | antisense | 139 | 0 | 392 |
| CTCAGTTTCGGCCAGCAGGC | antisense | 140 | 0 | 393 |
| ACTCAGTTTCGGCCAGCAGG | antisense | 141 | 0 | 394 |
| CATACTCAGTTTCGGCCAGC | antisense | 144 | 0 | 395 |
| GGCCCCTGCTTGGTGGGCAC | sense | 146 | 0 | 396 |

TABLE 36
RT Templates

| | | SEQ ID |
|---|---|---|
| Sequence | Length | NO: |
| GTTCGCCACG | 10 | 397 |
| AGTTCGCCACG | 11 | 398 |
| TAGTTCGCCACG | 12 | 399 |
| GTAGTTCGCCACG | 13 | 400 |
| AGTAGTTCGCCACG | 14 | 401 |
| GAGTAGTTCGCCACG | 15 | 402 |
| GGAGTAGTTCGCCACG | 16 | 403 |
| CGGAGTAGTTCGCCACG | 17 | 404 |

TABLE 37
PBS Sequences

| | | SEQ ID |
|---|---|---|
| Sequence | Length | NO: |
| GCTCCGCT | 8 | 405 |
| GCTCCGCTG | 9 | 406 |
| GCTCCGCTGC | 10 | 407 |
| GCTCCGCTGCT | 11 | 408 |
| GCTCCGCTGCTG | 12 | 409 |
| GCTCCGCTGCTGC | 13 | 410 |
| GCTCCGCTGCTGCA | 14 | 411 |
| GCTCCGCTGCTGCAG | 15 | 412 |
| GCTCCGCTGCTGCAGA | 16 | 413 |
| GCTCCGCTGCTGCAGAC | 17 | 414 |

TABLE 38
Secondary Nicking sgRNA Sequences

| | | | Distance | |
|---|---|---|---|---|
| | Nick | Orien- | to | SEQ |
| | Pos- | ta- | pegRNA | ID |
| Sequence | ition | tion | Nick | NO: |
| TCCTCCGGAGTAGTTCGCCA | 198 | antisense | 5 | 415 |
| CCCCAACCGGTGGCCTTCAT | 246 | antisense | 53 | 416 |
| TCCCCAACCGGTGGCCTTCA | 247 | antisense | 54 | 417 |
| AGCCTGGCTTCCCCAACCGG | 256 | antisense | 63 | 418 |
| CCAAGCCTGGCTTCCCCAAC | 259 | antisense | 66 | 419 |
| CCTGAGCTCCCTCCCAAGCC | 272 | antisense | 79 | 420 |
| AGCTCCCGCTCCCTTGAGCC | 306 | antisense | 113 | 421 |
| GCCAGCAGGCGGGGAGCCCG | 330 | antisense | 137 | 422 |
| ACGGGATGAGGATGGGGACC | 148 | antisense | −45 | 423 |
| TCAGTTTCGGCCAGCAGGCG | 339 | antisense | 146 | 424 |
| CTCAGTTTCGGCCAGCAGGC | 340 | antisense | 147 | 425 |
| ACTCAGTTTCGGCCAGCAGG | 341 | antisense | 148 | 426 |
| AGGATGGGGACCTGGAAGAC | 140 | antisense | −53 | 427 |
| GGATGGGGACCTGGAAGACA | 139 | antisense | −54 | 428 |
| GATGGGGACCTGGAAGACAG | 138 | antisense | −55 | 429 |
| ATGGGGACCTGGAAGACAGG | 137 | antisense | −56 | 430 |
| TGGGGACCTGGAAGACAGGG | 136 | antisense | −57 | 431 |
| GGGGGCAGCCACTGTCAGTC | 118 | antisense | −75 | 432 |
| GGGGCAGCCACTGTCAGTCA | 117 | antisense | −76 | 433 |
| GCCACTGTCAGTCAGGGATC | 111 | antisense | −82 | 434 |
| AGTCAGGGATCTGGACAACG | 102 | antisense | −91 | 435 |
| GATCTGGACAACGAGGTCTT | 95 | antisense | −98 | 436 |
| ATCTGGACAACGAGGTCTTT | 94 | antisense | −99 | 437 |
| TCTGGACAACGAGGTCTTTG | 93 | antisense | −100 | 438 |
| CAACGAGGTCTTTGGGGTCA | 87 | antisense | −106 | 439 |
| GGTCTTTGGGGTCAAGGCCA | 81 | antisense | −112 | 440 |
| AGGCCAAGGCCCTGACTGAC | 67 | antisense | −126 | 441 |
| GAGTCCTGTGCCCACCAAGC | 45 | antisense | −148 | 442 |
| AGTCCTGTGCCCACCAAGCA | 44 | antisense | −149 | 443 |
| GTCCTGTGCCCACCAAGCAG | 43 | antisense | −150 | 444 |

### Example 7: Multiplex Base Editing/Prime Editing for Enrichment of HBG-Edited HSCs

[0538] A significant obstacle in certain hematopoietic stem cell (HSC) gene therapy studies has been the inability to consistently and reliably achieve sufficiently high engraftment levels of gene-modified cells to provide long-term therapeutic efficacy. Subtherapeutic engraftment has been observed to occur even after fully myeloablative conditioning and is conceptually of still greater concern with nonmyeloablative and nongenotoxic conditioning. One remedy for subtherapeutic engraftment of gene-modified autologous cells is allogeneic (allo-) HSC transplantation, which is associated with significant toxicity from graft-versus-host disease and high-dose conditioning. This Example provides an alternative approach that enables increasing engraftment levels of gene-modified autologous cells into a therapeutic range after HSC gene therapy, thus avoiding the need for an allo-HSC transplant and associated toxicities. Post-engraftment selection of hereditary persistence of fetal hemoglobin (HPFH)-edited HSCs will raise HbF to therapeutic levels. To accomplish this, an engineered mutation in the O⁶-methylguanine DNA methyltransferase (MGMT) gene will be used. When virally delivered, the MGMT^{P140K}-based selection system significantly increases modified HSCs in large animals and patients (Adair et al., Sci Translat Med. 2012; 4 (133): 133ra57; Beard et al., J Clin Invest. 2010; 120 (7): 2345-54; Beard et al., Blood. 2009; 113 (21): 5094-103). To simultaneously generate HPFH alleles and a drug-resistance mutation for selection in the same cell, novel base editors (BE) as well as the newly described prime editor (PE) platform (Anzalone et al., Nature. 2019; 576 (7785): 149-57) will be used, which systems can be even safer than the more commonly used CRISPR/Cas9 platform at least in part because they introduce precise genetic alterations without double-stranded DNA breaks (DSBs), thus reducing potential for genotoxicity (Kosicki et al., Nat Biotechnol. 2018; 36 (8): 765-71).

[0539] CD34+ HSCs will be edited using PE and/or BE systems for targeting the therapeutic HBG site for HbF reactivation, and the selection gene MGMT for enrichment of therapeutically edited cells. Multilineage engraftment of edited HSCs will be assessed in vivo in a humanized NBSGW mouse xenotransplantation model (McIntosh et al., Stem Cell Reports. 2015; 4 (2): 171-80). In vitro and in vivo selection for HPFH-edited cells will be quantified following treatment with the respective drugs and by measuring editing efficiency before and after selection. Another group of mice will be transplanted with SCD cells to verify reversal of the SCD sickling phenotype at time of necropsy.

[0540] Representative Methods: Methods used may include those described in the following publications: Traxler et al., Nat Med. 2016; 22 (9): 987-90; Metais et al., Blood Adv. 2019; 3 (21): 3379-92; and Humbert et al., Leukemia. 2019; 33 (3): 762-808.

[0541] Human HSC's: De-identified, PB-mobilized CD34+ cells will be obtained from several sources, such as the Fred Hutch Cell Processing facility and commercial vendors. Plerixafor-mobilized or BM HSCs isolated from SCD patients will be obtained through several clinical research protocols opened at St. Jude. CD34+ cells will be enriched by immunomagnetic beads using the CliniMACS Plus system. The HSCs will be cultured in vitro as described (Metais et al., Blood Adv. 2019; 3 (21): 3379-92). Studies will be performed in CD34+ cells isolated from at least three different normal subjects and three individuals with SCD. Cells from each individual will be analyzed in at least two biological replicate experiments.

[0542] BE mRNA: mRNA encoding BE will be modified with CleanCap and 5′ N1 methyl pseudouridine to enhance mRNA stability and reduce innate cellular immune response (Uzri et al., J Virol. 2009; 83 (9): 4174-84; Vaidyanathan et al., Mol Ther Nucleic acids. 2018; 12:530-42). gRNAs will be sourced from Biosprings or Synthego, with 2′O-methyl analogs and 3′phosphorothioate internucleotide linkages at the first three 5′ and 3′ termini to protect from exonucleases and reduce innate immune response (Kim et al., Genome Res. 2018, doi: 10.1101/gr.231936.117.; Wienert et al., PLoS Biol. 2018; 16 (7): e2005840). The gRNAs and mRNAs will be purified by high performance liquid chromatography (HPLC) to isolate full-length products and eliminate DNA contamination and double-stranded RNA, which can induce innate immune responses.

[0543] Mouse xenotransplantation. The NBSGW mouse xenotransplantation model is widely used to evaluate multi-lineage engraftment of normal and genome-edited human HSCs (McIntosh et al., Stem Cell Reports. 2015; 4 (2): 171-80). Efficient engraftment of human CD34+ cells has been demonstrated in this model and differentiation into CD3+ (T-cells), CD34+ (HSCs), CD14+ (myeloid), CD19+ (B-cells), and CD235a (erythroid) cells that persisted for over 16 wks has been confirmed (Metais et al., Blood Adv. 2019; 3 (21): 3379-92). NBSGW mice support human donor cell erythropoiesis, with recipient BM containing up to 10% late-stage human erythroid precursors, mainly polychromatophilic erythroblasts and reticulocytes that can be purified and analyzed for HbF expression and in vitro sickling under hypoxia. For xenotransplantation studies, mice of 8-13 weeks of age are injected intravenously with 3-5×10⁵ edited or control CD34+ cells, without prior conditioning. Female mice will be used as xenotransplantation recipients, as this sex engrafts more efficiently with human donor cells (Notta et al., Blood. 2010; 115 (18): 3704-7). For engraftment studies using CD34+ HSCs from healthy patients, groups of 10 mice transplanted with single BE treated cells (HBG, MGMT, CD33) will be compared to multiplex BE treated cells (HBG+MGMT; HBG+CD33) or to unmanipulated cells. It is expected that genome-edited cells will engraft in a similar fashion to that seen in the mice that received unmanipulated cells based on results from CRISPR/Cas9 studies. After stable engraftment at 15-18 weeks post-transplant, 5 out of 10 mice will be treated with selection drugs to enrich for genome-edited cells. To account for donor to donor variability, cells from 3 different donors will be used for these purposes, resulting in 30 mice per treatment group (x 6 groups=180 mice). This number of biological replicates is sufficient to account for occasional mortality of transplanted mice and detect robust differences at statistical significance. For engraftment studies using CD34+ HSCs from SCD patients, only the multiplex approaches (HBG+MGMT; HBG+CD33) will be tested using a similar procedure as described above for healthy CD34+ cells, resulting in 60 mice (30×2 groups).

[0544] Selection for multiplex-edited cells. For MGMT-based selection in vitro, cells will be treated with 50 μM O⁶BG and 50 μM BCNU for 3 hr. Editing efficiency will be compared between treated and untreated cells in bulk populations and in clonal hematopoietic colony assays. Briefly, these assays are performed in Methocult H4230 methylcellulose media (STEMCELL Technologies, Vancouver, Canada) supplemented with 100 ng/ml each of recombinant human IL-3, IL-6, SCF, TPO, G-CSF, GM-CSF, and EPO. After stable engraftment at 15-18 weeks, mice will be treated with two doses of O⁶BG (15 mg/kg) administered intraperitoneally 30 min apart, followed by a dose of BCNU (5 mg/kg) to select for MGMT-edited cells. Selection drugs may be administered up to three times in each animal after hematopoietic recovery for further amplification of genome-edited cells.

[0545] Statistical analysis: The difference in engraftment of edited cells between each animal group will be assessed after stable engraftment (15-18 weeks) by comparing the means between two groups, totaling 15 mice per group, which will provide 91% power to observe a statistically significant difference (at the two-sided significance level of 0.05) in means if the true distributions are separated by 1.25 standard-deviation (sd) units (using a two-sample t-test). If one compares the means across 6 groups, if the distribution of one group is 1.25 sd units from the common distribution of each of the other 5 groups, 15 mice per group provides 93% power (using one-way ANOVA).

### Example 8: Base Editing of HBG

[0546] Most small (“non-deletional”) HPFH mutations alter the HBG gene promoter to either create new binding sites for an erythroid transcriptional activator, or disrupt a binding site for a transcriptional repressor, either BCL11A or ZBTB7A (Wienert et al., Trends Genet. 2018; 34 (12): 927-40). ABE 7.10 was used to generate three HPFH point mutations: −198 T>C, −175 T>C, and −113 A>G in human CD34+ HSCs (FIG. 1A). The cells were electroporated with RNPs consisting of ABE7.10 protein complexed with a targeting gRNA, then induced to undergo erythroid maturation. On-target editing was measured at day 3 by next generation sequencing (NGS) and showed up to 35% efficiency with a corresponding increase in protein HbF expression measured by HPLC in erythroid differentiated cells at day 15 (FIGS. 1B, IC). After further process optimization, on-target editing efficiency reached as much as 60% in human CD34+ HSCs. In additional experiments, the CBE BE4 (Komor et al., Sci Adv. 2017; 3 (8): eaao4774) was evaluated for editing of the same-113 HPFH site to inactivate the BCL11A binding site. Titration of CBE protein in human CD34+ HSC showed up to 30% editing efficiency (FIG. 1D) with significant HbF reactivation.

[0547] These data validate the use of both CBE and ABE for the targeting of HPFH sites and for increasing HbF expression. BE targeting the −175 and −113 sites yield the greatest HbF reactivation.

### REFERENCES

[0548] Anzalone, A. V., Randolph, P. B., Davis, J. R., Sousa, A. A., Koblan, L. W., Levy, J. M., Chen, P. J., Wilson, C., Newby, G. A., Raguram, A., & Liu, D. R. (2019). Search-and-replace genome editing without double-strand breaks or donor DNA. Nature, 576 (7785), 149-157.
[0549] Beharry, A. A., Nagel, Z. D., Samson, L. D., & Kool, E. T. K. (2016). Fluorogenic real-time reporters of DNA repair by MGMT, a clinical predictor of antitumor drug response. PLoS ONE, 11 (4), 1-15.
[0550] Chen, L., Park, J. E., Paa, P., Rajakumar, P. D., Chew, Y. T., Manivannan, S. N., & Chew, W. L. (2020). Precise and programmable C: G to G: C base editing in genomic DNA. BioRxiv.
[0551] Choi, J., Chen, W., Suiter, C. C., Lee, C., Chardon, F. M., Yang, W., Leith, A., Daza, R. M., Martin, B., & Shendure, J. (2021). Precise genomic deletions using paired prime editing. BioRxiv, 2012-2020.
[0552] Chow, R. D., Chen, J. S., Shen, J., & Chen, S. (2020). A web tool for the design of prime-editing guide RNAs. Nature Biomedical Engineering.
[0553] Christians, F. C., Dawson, B. J., Coates, M. M., & Loeb, L. A. (1997). Creation of human alkyltransferases resistant to O⁶-benzylguanine. Cancer Research, 57 (10), 2007-2012.
[0554] Cox, D. B. T., Gootenberg, J. S., Abudayyeh, O. O., Franklin, B., Kellner, M. J., Joung, J., & Zhang, F. (2017). RNA editing with CRISPR-Cas13. Science, 358 (6366), 1019-1027.
[0555] Crone, T. M., Goodtzova, K., Edara, S., & Pegg, A. E. (1994). Mutations inHuman Alkyltransferase Imparting Resistance. 6221-6227.
[0556] Daniels, D. S., Mol, C. D., Arvai, A. S., Kanugula, S., Pegg, A. E., & Tainer, J. A. (2000). Active and alkylated human AGT structures: A novel zinc site, inhibitor and extrahelical base binding. EMBO Journal, 19 (7), 1719-1730.
[0557] Daniels, D. S., Woo, T. T., Luu, K. X., Noll, D. M., Clarke, N. D., Pegg, A. E., & Tainer, J. A. (2004). DNA binding and nucleotide flipping by the human DNA repair protein AGT. Nature Structural and Molecular Biology, 11 (8), 714-720.
[0558] Davis, B. M., Encell, L. P., Zielske, S. P., Christians, F. C., Liu, L., Friebert, S. E., Loeb, L. A., & Gerson, S. L. (2001). Applied molecular evolution of O⁶-benzylguanine-resistant DNA alkyltransferases in human hematopoietic cells. Proceedings of the National Academy of Sciences of the United States of America, 98 (9): 4950-4954.
[0559] Edara, S., Kanugula, S., Goodtzova, K., & Pegg, A. E. (1996). Resistance of the human O⁶-alkylguanine-DNA alkyltransferase containing arginine at codon 160 to inactivation by O⁶-benzylguanine. Cancer Research, 56 (24), 5571-5575.
[0560] Encell, L. P., Coates, M. M., & Loeb, L. A. (1998). Engineering human DNA alkyltransferases for gene therapy using random sequence mutagenesis. Cancer Research, 58 (5), 1013-1020.
[0561] Fan, C. H., Liu, W. L., Cao, H., Wen, C., Chen, L., & Jiang, G. (2013). O⁶-methylguanine DNA methyltransferase as a promising target for the treatment of temozolomide-resistant gliomas. Cell Death and Disease, 4 (10).
[0562] Grünewald, J., Zhou, R., Lareau, C. A., Garcia, S. P., Iyer, S., Miller, B. R., Langner, L. M., Hsu, J. Y., Aryee, M. J., & Joung, J. K. (2020). A dual-deaminase CRISPR base editor enables concurrent adenine and cytosine editing. Nature Biotechnology, 38 (7), 861-864.
[0563] Hartner, J. C., Walkley, C. R., Lu, J., & Orkin, S. H. (2009). ADAR1 is essential for the maintenance of hematopoiesis and suppression of interferon signaling. Nature Immunology, 10 (1), 109-115.
[0564] Huang, T. P., Zhao, K. T., Miller, S. M., Gaudelli, N. M., Oakes, B. L., Fellmann, C., Savage, D. F., & Liu, D. R. (2019). Circularly permuted and PAM-modified Cas9 variants broaden the targeting scope of base editors. Nature Biotechnology, 37 (6), 626-631.
[0565] Kurt, I. C., Zhou, R., Iyer, S., Garcia, S. P., Miller, B. R., Langner, L. M., Grünewald, J., & Joung, J. K. (2020). CRISPR C-to-G base editors for inducing targeted DNA transversions in human cells. Nature Biotechnology, C.
[0566] Li, X., Wang, Y., Liu, Y., Yang, B., Wang, X., Wei, J., Lu, Z., Zhang, Y., Wu, J., Huang, X., Yang, L., & Chen, J. (2018). Base editing with a Cpf1-cytidine deaminase fusion. Nature Biotechnology, 36 (4), 324-327.
[0567] Liddicoat, B., Piskol, R., Chalk, A., Higuchi, M., Seeburg, P., Li, J. B., Hartner, J., & Walkley, C. R. (2013). A-To-I RNA editing by ADAR1 is essential for hematopoiesis. American Society of Hematology Washington, DC.
[0568] Montiel-Gonzalez, M. F., Vallecillo-Viejo, I., Yudowski, G. A., & Rosenthal, J. J. C. (2013). Correction of mutations within the cystic fibrosis transmembrane conductance regulator by site-directed RNA editing. Proceedings of the National Academy of Sciences of the United States of America, 110 (45), 18285-18290.
[0569] Montiel-Gonzalez, M. F., Vallecillo-Viejo, I. C., & Rosenthal, J. J. C. (2016). An efficient system for selectively altering genetic information within mRNAs. Nucleic Acids Research, 44 (21), 1-12.
[0570] Nagel, Z. D., Margulies, C. M., Chaim, I. A., McRee, S. K., Mazzucato, P., Ahmad, A., Abo, R. P., Butty, V. L., Forget, A. L., & Samson, L. D. (2014). Multiplexed DNA repair assays for multiple lesions and multiple doses via transcription inhibition and transcriptional mutagenesis. Proceedings of the National Academy of Sciences of the United States of America, 111 (18): E1823-32.
[0571] Pegg, A. E., Byers, T. L., Swenn, K., Boosalis, M., Samson, L., Moschel, R. C., & Dolan, M. E. (1993). Mechanism of Inactivation of Human O⁶-Alkylguanine-DNA Alkyltransferase by O⁶-Benzylguanine. Biochemistry, 32 (45), 11998-12006.
[0572] Pegg, A. E., Fang, Q., & Loktionova, N. A. (2007). Human variants of O⁶-alkylguanine-DNA alkyltransferase. DNA Repair, 6 (8), 1071-1078.
[0573] Margison, G. P., Povey, A. C., Kaina, B., & Santibáñez Koref, M. F. (2003). Variability and regulation of O⁶-alkylguanine-DNA alkyltransferase. Carcinogenesis, 24 (4), 625-635.
[0574] Milsom, M. D., Jerabek-Willemsen, M., Harris, C. E., Schambach, A., Broun, E., Bailey, J., Jansen, M., Schleimer, D., Nattamai, K., Wilhelm, J., Watson, A., Geiger, H., Margison, G. P., Moritz, T., Baum, C., Thomale, J., & Williams, D. A. (2008). Reciprocal relationship between O⁶-methylguanine-DNA methyltransferase P140K expression level and chemoprotection of hematopoietic stem cells. Cancer Research, 68 (15), 6171-6180.
[0575] Porto, E. M., Komor, A. C., Slaymaker, I. M., & Yeo, G. W. (2020). Base editing: advances and therapeutic opportunities. Nature Reviews Drug Discovery, 19 (12), 839-859.
[0576] Qu, L., Yi, Z., Zhu, S., Wang, C., Cao, Z., Zhou, Z., Yuan, P., Yu, Y., Tian, F., Liu, Z., Bao, Y., Zhao, Y., & Wei, W. (2019). Programmable RNA editing by recruiting endogenous ADAR using engineered RNAs. Nature Biotechnology, 37 (9), 1059-1069.
[0577] Reese, J., Lingas, K., Ksenich, P., Sweeney, C., Koc, O., & Gerson, S. (2004). 1006. Preliminary Results of a Phase I Trial Using Retroviral Gene Transfer of G156A MGMT To Protect Hematopoiesis during BG and BCNU Therapy of Advanced Malignancies. Molecular Therapy, 9 (May), S385.
[0578] Sakata, R. C., Ishiguro, S., Mori, H., Tanaka, M., Tatsuno, K., Ueda, H., Yamamoto, S., Seki, M., Masuyama, N., Nishida, K., Nishimasu, H., Arakawa, K., Kondo, A., Nureki, O., Tomita, M., Aburatani, H., & Yachie, N. (2020). Base editors for simultaneous introduction of C-to-T and A-to-G mutations. Nature Biotechnology, 38 (7), 865-869.
[0579] Schene, I. F., Joore, I. P., Oka, R., Mokry, M., van Vugt, A. H. M., van Boxtel, R., van der Doef, H. P. J., van der Laan, L. J. W., Verstegen, M. M. A., van Hasselt, P. M., Nieuwenhuis, E. E. S., & Fuchs, S. A. (2020). Prime editing for functional repair in patient-derived disease models. Nature Communications, 11 (1), 1-8.
[0580] Walton, R. T., Christie, K. A., Whittaker, M. N., & Kleinstiver, B. P. (2020). Unconstrained genome targeting with near-PAMless engineered CRISPR-Cas9 variants. Science, 368 (6488), 290-296.
[0581] Wang, H., Georgakopoulou, A., Li, C., Liu, Z., Gil, S., Bashyam, A., Yannaki, E., Anagnostopoulos, A., Pande, A., Izsvák, Z., Papayannopoulou, T., & Lieber, A. (2020). Curative in vivo hematopoietic stem cell gene therapy of murine thalassemia using large regulatory elements. JCI Insight, 5 (16), 1-17.
[0582] Watson, A. J., & Margison, G. P. (2000). O 6-Alkylguanine-DNA Alkytransferase Assay. In DNA Repair Protocols (pp. 49-61). Springer.
[0583] Wibley, J. E. A., Pegg, A. E., & Moody, P. C. E. (2000). Crystal structure of the human O⁶-alkylguanine-DNA alkyltransferase. Nucleic Acids Research, 28 (2), 393-401.
[0584] Woolford, L. B., Southgate, T. D., Margison, G. P., Milsom, M. D., & Fairbairn, L. J. (2006). The P140K mutant of human O⁶-methylguanine-DNA-methyltransferase (MGMT) confers resistance in vitro and in vivo to temozolomide in combination with the novel MGMT inactivator O⁶-(4-bromothenyl) guanine. The Journal of Gene Medicine: A Cross-disciplinary Journal for Research on the Science of Gene Transfer and Its Clinical Applications, 8 (1), 29-34.
[0585] Xu-Welliver, M., Kanugula, S., & Pegg, A. E. (1998). Isolation of human O⁶-alkylguanine-DNA alkyltransferase mutants highly resistant to inactivation by O⁶-benzylguanine. Cancer Research, 58 (9), 1936-1945.
[0586] Xu-Welliver, M., Leitão, J., Kanugula, S., & Pegg, A. E. (1999). Alteration of the conserved residue tyrosine-158 to histidine renders human O⁶-alkylguanine-DNA alkyltransferase insensitive to the inhibitor O⁶-benzylguanine. Cancer Research, 59 (7), 1514-1519.
[0587] Zhang X, Zhu B, Chen L, Xie L, Yu W, Wang Y, Li L, Yin S, Yang L, Hu H, Han H, Li Y, Wang L, Chen G, Ma X, Geng H, Huang W, Pang X, Yang Z, Wu Y, Siwko S, Kurita R, Nakamura Y, Yang L, Liu M, Li D. (2020). Dual base editor catalyzes both cytosine and adenine base conversions in human cells. Nature Biotechnology, 38 (7), 856-860.
[0588] Zhao, D., Li, J., Li, S., Xin, X., Hu, M., Price, M. A., Rosser, S. J., Bi, C., & Zhang, X. (2020). New base editors change C to A in bacteria and C to G in mammalian cells. Nature Biotechnology.

### Accession Sequences

[0589] Provided herein is a listing of nucleic acid sequences and amino acid sequences corresponding to publicly available sequence accession numbers, certain of which sequences and/or sequence accession numbers are included and/or utilized, in whole and/or in part, in the present disclosure, and/or certain of which sequences and/or sequence accession numbers are included herein as references. Sequences associated with accession numbers are available in publicly accessible databases, as is known to those of skill in the art, and such sequences are provided herein solely for easy of reference.

[0590] GenBank Accession No. NP 002403.3 MDKDCEMKRTTLDSPLGKLELSGCEQGLHEIKLLGKGTSAADAVEVPAPAAVLGGPEPLMQCTAWLNAYFHQPEAIE EFPVPALHHPVFQQES FTRQVLWKLLKVVKFGEVISYQQLAALAGNPKAARAVGGAMRGNPVPILI PCHRVVCSSGA VGNYSGGLAVKEWLLAHEGHRLGKPGLGGSSGLAGAWLKGAGATSGSPPAGRN

[0591] GenBank Accession No. NG 052673 GTTACAAATAAAGCCCTTCCCGAAAATGGATCAAAAACACTTTGTAATGAGTGAAGGAGCTGGTTTAAAAAGGGCCA ACATCAAACAAAATCCCAGTCCTGAGTCACAGACACTCAAATAGCCCCTTCCAGGGTGGGAATGTCCTCCAAAGCAC TTCCATTTGTGTGAGTAGTTCTTCAAGCCAACGTATCCAAATACATACATCTGATGAGCGGACTTTGCTTGTTTACA TACATTATGTACATTCCTTTGATAGTCAATTGTCTAAAGTTGGAACAGTTCGGAGGGAAGAGCTATATAAGGTTTGC AATGATCTTTGTCCACCAGTTACTGGACAACTGGATCCAAATTCCACAAATAGCTGTGGTTCTTTACCTGCATGGTT CTCCTCCCCTGAGACATCCAGTGCCATGCATTTTCTCTTGCAGGTCTTTCCTTGCATCACCCCTCCAACCCCAGCAG ATATCCTGGCTGAGCCTGTTTTCTCTGTGAGGGGCTACACTGCACACTGGGGCTCTTGAAAAGGGCTTGCTGGGCTG GGCACGGTGGCTCACGCCTGTAATCCTGACACTTTGGTAGGCCGAGGTGGGTGGATCACCTGAGGTCAGGTGTTCAA GATCAGCCTGGCCAATATGGTGAAACCCCGTCTCTACTAAAAATACAGAAAAATTAGCTGGGCATGGTGGTGTGCAC CTGTAATCCCAGCTACTCAGGAGGCTGAGGCAGGAGAATCACTTGAACCCGGGAGGCAGAGGTTCCAGTGAGCCAAG ATGGCACCATTGTACTTCAGCCTAGGCGACAGAGAGAGACTCCAATTCAAAAAAAGAAAAAGAGAAAAAAAAAAAAA AGAAAAAAAAGAAAGGGCTTCCTGCAGGGACAGTCAGTGCAGGAAAGGGCCTCTTTCGTACTCCCACTGCCCCTACG CATCTCCTGGGTAGAGGTCGCTGCTCCAGAGAGCAAACTATTTCCTCATCTGTGTGCCATTCCACTACAAGCCCCAC AGGGGCCTGCAACGAGTCCCATAAATCCATCTCCAGGCCCTGCACCCACAAACTGGCAAAGGAAGTTTCAGGAAAAG TCTTTCTAATAGGAGTCTGTGGGCTGCCTCTGGTTCGTTTCTTTAGGAATTCTCCTCCATGCCCTTCTTGACACAAA AGGGCCTGAAGGGTTCCAGTTCTCAACAGGAGCTCCCAGGGGCTCCTGGCAGGAGGATGTTCTGCCTCTTTGGAGGA AAGCAAGAGCTAAGGAGCCCCTCCTGTTTTAGTTGCACCTCCATCCCCTTTCTCCACCCTGCACCATTCCCTTACCC TCTATGTGAGGCAAAGCCTGAAGTCCCTCCTTCCCGCCCTCTCTCCTGCCCACTAGTAGATTACACTCCCTGCTGCA GTTACACCATGATGCCTCTGCCATGCTGACAACTAGTGTCACACAGGAGCGTAATCAGAAGCACCTGGCATTCAACC CCGGTACCGATGGCCCCCACCTTTTCATTTCAGGCTTCTTCCTCCAGAGTGCTTGAGGCTCCCTGGCCTCCTGGCCT CTCCCAGGTCCAAGGCGCTGACTCCAGCTCTTGGCTCCAACATTTACAGGAACACTGGGACTAAGAAAATCAATTGT GTTAATCAGCAAAACCCTCCACTTGAGATGCTATCCTAAAAGCAAACTATATGTAAAACACTTAACGTGGGGAGCTC TGTAATATGTTTCTTTTGTTACACGACCATCACACATTTGTCCGGAGTTTGGGGCTTTCAAACCACATAAGGTTTTA TGTGATCGTTATAAAATCCCTTCATTTCCCAAAGGTAGGGTAGTAAGGATTAAGTTTGACTACTGAAGGCAGCTTTG TTGTAAGTGGTCTCTAATGTCACAAAAGTAGCTTGGGAAGACAGGCTTATTAAACAAATTTCTTGGGTTGCAAATCA TTAGAAGCAATCGCATGTCATGTTCATTTGCTTAACCCGAAAGGTATCCATTTGGATGTTTAAAGAAACTATGCAGA TTAACATTGTTCCCAGTGCCCACAAGAAAGCTGGCTGATCTTAAAGGAAATCCAGGGAGCTCCTTGAGGAAGTCGGA CTGCAGTTGAGCATACCCTTTTGTGGTTTTCCCACCTCTTTTGTAAAAAGTTCTTCATAGGAATCTGTGTCTGGAGG AAAAGGGGTTGTGATTTGTTAATCTGAAGATGGGAGACCTCAAAGGAATCTCACCCAACCAGTCCTGCACTGTCATC CTATGAACAGAGAAGTCAGGTGGTTGCTCAGTGAGGGGCAGGGCTGGCACCACATCCGAGCCTCCCTGTCCTGTGTT CCTTACTCTTCAGTGGACCCGGCGACCTCCCGGCTTTGGAGCCATCCTGTGTTCCTTTAACAGTAGGACGAACACAC AGGCGATGATGAGATTGTAATGGGACAAGGGGGAGAGGCGTGGGGAGCTCTTGATGAAAACTTGGGTTTTTGAAATT ACCATGATGAAGGGAGGAGCTTGCACCAGCAGGTGTAAGGAGTGTGAGTTTGAGTTCTGCTCATCAGACAGCCTAAG CAGTCACATCCTTGAATCCTGGTCTTTTGCAGGCCAGTCCTTGGTCAGGTGGTGGCCTTTTTCCTCTTTCCCCTCTG CACTGAGACCCTTATTTGGCTCCTGATCCTGGAGCCCCTGACACAGTCCTTACCACTGAAGTAGCTGTGGCCCTTCA CATAGTTCTTCCCACCACGCCAGCAAGGGGACTGAGTTCTTTCAGTACAGCCAGGGCCAGGTCCACACATCTCCCTG GGAAGCCAGCACTTTCTCTCGTGGACCGCCTCCCCATTCCCACAGGGCCCTCCTAAAGGGCCTTTGGATGACCACAT TGGCCTTTCTTTCCTAGGGTGGGGAATTAGAGATGCTAAGACTGGCCAGTCTCTTTTTCTTAAGAGTTTAGGGATTC GTCTTAAAATATTATTCAGATAAACGTATGAGTCATGTGTTAACTGCAAAACTACTTAACAGCACACTTGTTAGAAT ATCAGTCGGCACTCTGATTCCATTTCGGCATTGTTTTTCCTTTGGTTCTATTAAGATCCCGGTTCTAACTGGGTCCT GGTAGTAACAGGCTGTAAGTGGCCAGGTGTATAGCATTATTTCTTAGTAGTGTGGTGTGGTGCTGGTGGTTTATTTT CCCTATGCACACATGCCCTAATATGGAAGGATAGTTTGTACACACGTAGGGTACGTTATCATGAGACTCCTTTACAG AGTATGAAACTGAGGATTAGAGAAGTCAGACGAGTTTCCCGAAGTCTTATAGAAGGCTAATGGAAAAAACCAGAGCC AAGGGCAAACATGTTTCATCTGTCCTTCCACATTAGTTTAAATGTGAATGGCTGCTTGGAACACAGTGTTGAGAAGG ATTCCGAGGCTGTGTCCAGGTTCAGTGGGGAAAAAGTGCCTTGATTTGACCATTATATCGTGTACTCAGGGCCTAGT TTATTTCCCACAAGCAGCTATTTAAAACATGTCTCATCCAAGGCAGGGTCGGGGTGGGGAACCTCAGAGGATCAATG ATGCAGCCTGTATTGTCACCAGGGCTCATCCCAAAGCAAATCCTGCTGAAGTTCTCCTCTGAACAACCCTTATCACT CATGCTAATATGTTGGATCCTGCAAGTCACAAATACGAAGGTATGAGCATTGGCCGAATCCCAACAGGGAAACTTCA CCGGGAAGGTGAAGACCCCTTTCCATTAAGATAACAAACAGAACCTAGAAGGCCCGTAGCATGGTGGCTTAGAACAT GTGGGCCTTGGATGGGATCCTGCCAAGGGGTGTGTGACCTCTCCGAAGCCTCCAGGGATGATACTACTCCCTGGGGT GCTTATGCCAACCACGTTAGAGACAATGGTTTCTGTACCCATTGCCTGGGGCTGCCATAATAAAGTGCCACACACTG AGTGGCTTAAAACAACAGAAACCTATTGTCTCACACTTCCGGGGGCCAGAAGTTTGAAACCCAGGTGTGTTAGGATC CTGCTCCCTCTGAAGGCTCCAGGGAAGAGTGTCCTCTGCTCCCTCCGAAGGCTCCAGGGAAGGGTCTGTCCTCTTAG GCTTCTGGTGGCTTGCAGGTGCAGCCCTCCAATCCTCCTCCCCAAGCGGCCTTCTGCCTATAAGGACACGAGTCATA CTGGATGAGGGGCCCACTAATTGATGGCTTCTGTAAAGTCCCCATCTCCAAATAAGGTCACATTGTGAGGTACTGGG AGTTAGGACTCCAACATAGCTTCTCTGGTGGACACAATTCAACTCCTAATAACGTCCACACAACCCCAAGCAGGGCC TGGCACCCTGTGTGCTCTCTGGAGAGCGGCTGAGTCAGGCTCTGGCAGTGTCTAGGCCATCGGTGACTGCAGCCCCT GGACGGCATCGCCCACCACAGGCCCTGGAGGCTGCCCCCACGGCCCCCTGACAGGGTCTCTGCTGGTCTGGGGGTCC CTGACTAGGGGAGCGGCACCAGGAGGGGAGAGACTCGCGCTCCGGGCTCAGCGTAGCCGCCCCGAGCAGGACCGGGA TTCTCACTAAGCGGGCGCCGTCCTACGACCCCCGCGCGCTTTCAGGACCACTCGGGCACGTGGCAGGTCGCTTGCAC GCCCGCGGACTATCCCTGTGACAGGAAAAGGTACGGGCCATTTGGCAAACTAAGGCACAGAGCCTCAGGCGGAAGCT GGGAAGGCGCCGCCCGGCTTGTACCGGCCGAAGGGCCATCCGGGTCAGGCGCACAGGGCAGCGGCGCTGCCGGAGGA CCAGGGCCGGCGTGCCGGCGTCCAGCGAGGATGCGCAGACTGCCTCAGGCCCGGCGCCGCCGCACAGGGCATGCGCC GACCCGGTCGGGGGGAACACCCCGCCCCTCCCGGGCTCCGCCCCAGCTCCGCCCCCGCGCGCCCCGGCCCCGCCCC CGCGCGCTCTCTTGCTTTTCTCAGGTCCTCGGCTCCGCCCCGCTCTAGACCCCGCCCCACGCCGCCATCCCCGTGCC CCTCGGCCCCGCCCCCGCGCCCCGGATATGCTGGGACAGCCCGCGCCCCTAGAACGCTTTGCGTCCCGACGCCCGCA GGTCCTCGCGGTGCGCACCGTTTGCGACTTGGTGAGTGTCTGGGTCGCCTCGCTCCCGGAAGAGTGCGGAGCTCTCC CTCGGGACGGTGGCAGCCTCGAGTGGTCCTGCAGGCGCCCTCACTTCGCCGTCGGGTGTGGGGCCGCCCTGACCCCC ACCCATCCCGGGCGAGCTCCAGGTGCGCCCCAAGTGCCTCCCAGGTGTTGCCCAGCCTTTCCCCGGGCCTGGGGTTC CTGGACTAGGCTGCGCTGCAGTGACTGTGGACTGGCGTGTGGCGGGGGTCGTGGCAGCCCCTGCCTTACCTCTAGGT GCCAGCCCCAGGCCCGGGCCCCGGGTTCTTCCTACCCTTCCATGCTGCCAGCTTTCCCTCCGCCAGCTGCTCCAGGA AGCTTCCAGAAGCCCCTGCGCGGGCCTTGGCTTGCAGCAACCCTTTAGCATACTTAGGCAGAGTCCCATATTTCCTT CCTGCTGGAGGCCAAGTTCTAGGGGCCTTCTGGTTACTATGGCTGGTGTTTGTGTACATCATACCCTAACTGTATTC ATCAACACTTAGAGTAAGCAAGGCTCGCTGGAGAGCCACACACACTGGGCACCGTAATGTCGGTTATAACACCGCAG AGGAGTTCTGAACTATGTATTTCGCACTCCTGGGTTCATCATCTCCTGAAATCTCAGGGTGGTGTTTGCTCTCAGTT GCTTCAGCTGAGTAGCTGGCTTTCTGTCCTGGAAAGCAGACTTTGTACATGTGTGTGCAACCTATGCCTGCTGAGAT CATCATCAGACAGGGAAGCGGCTTGGTCCAGAGAGCTGTTCTCAGTAGAATGTTAAGCACAGAGAGCTGAGAATTAG ACTGGTTATTTACATAGACATCCAAATAGAAACCTATAGAGTATCTGTTAAGTCAGGCTCTCCCGTCATCTCCCCCA TCCCTGGGCAGGTGTCTAGGAGATGGTTTTGTTATTTTCAGGGCCCTCTCAATGGCTAAAACACTCTGGGAGATGAA CAAGATTTTAAAAACCCAAAGCTTAGCGCACCTGGTGGGTGGGGGTGTGAAAACTTTGAAGGAAACCGCGTCAAGAG CCTGGCTGATTGTTAATATCACGTTAACTCAGAGGGCCAGGATACTTGCCCAGACCCGGAGTCTGCCTGCAAGTAGC AGAGGAGAGCTGGCCTTGCTCTGCCGCGTGTCTTTCTTCCTGGGCCCTCTGTCTCGGGTTGGAATTTGAATAGTGGA GTAGTGTCTGCCACAGTCAGGGGCCTGGATGAAGTAGACCACCAGTACGGAGCTATACTCAGGTACTTTTCAATGTA TATATCTTCATTAAAAAAAAAAAATCTGGGCCAGGCACAGTGGGTCACGCCTGTAATCTCAGCACTTTGGGAGGCCG AGGTGGGTGGATCACCTGAAGTCAGGAGTTTGAGACCAGCCTGGCCAACATGGTGAAACCCAGTTTCTACTAAAAAC ACAAAAATTATCCAGGCGTGGTGGTGCATGCTGGTAATCCCAGTTACTTGGGAGACTGAGGCAGGAGAATTGCTTGA ACCTGGGAGGCGGAGGTTGCAGTGAGCCGAGATTGCGCCATTGCACTCCAACCTGGGCGACGAGAGTGAAACTGTCC TGAAGGGGAAACAAAAAAATCTGTATCAAAATAAGGATTTAACTAATAGTATTAGGCACTACTTTAAAAAGGCTTTG CTGTTAGTAAGGTTGAAAGAAATAGAGCCCTAGGTATACATTGGGTAGCACCTTGTTCAGCTGCTCAGATTCTTGAA CCTTGTTGAGGTCTTACTTTGATATCACCTGGGCCTTACTTTTCGTTGTTTGGGTTTCCTCCCCAGGTGTCTCAATC AGGGCCTCCTCTGTCCTTTTGCAGGGAAGAAGGGGGTAGGAAGGGCCTGAAAAAGAACTTGCCTTCCCCATTGCCCC CTCAGAGTTTGTTCCTCTCCAGTCCTCTTCCCACCCTTTCTTAGGACACCAAAACCCTGACTCTTTCAGTATTTTAT AATAAAATAAAGTTACTAAATTGTCTGTTCTGTTTTGCAGAGGACACACATTTAGGAGCCAGTGATTCAGACCTTCC ATTTTTCTTTTTGGTGCTAATGCTCTTTTCAGTATATTCTCTTTGATAGAAAAAAAATGGAGGCAAAACTGAATTTT CTGCATTATCTTTTCCTTTAGCATTATTCTTGTTTCTGCACTTCATTCTGACCCCCTTCCCCAGCATAAAGTTCCAT GTCCAGATCCACTTGCCCTGAGATTTTTGACTTCCGTTTGGGACTCTAGTCCCTCCAGGGGACACATTGAGCCTCCC AGACCCTGCAGGGCCCTGTGCTCATTCGGCTCTTGGGCTGTTGCTACGGTCCTTCCTGACCCTCTGTTTCCTGGGAC AAGTAGTTTTTAATGCAGCTACTTTCTGAAAGAGCTGGGGTCTTACCGCAGAATATTATTTTATTATTTTTAGAGAC AAGGTCTTGGTCTTTCGCCCAGGCTGGAGTGCAGTGGTGAGATCATAGCTCCCTGCAGCCTCAAGCTCCTGGGCTCA AGCGAACCTCCTGCTTTGACCTCCCAAGTACCAGGGACTACAGGTGTGCGCCACCATACCTGGCTAATTGTTGTTGT TGTTGTTTTTAGAGGCCAGGGTCTCCGTATGTTGCCTAGGGTGGTCTCGAACTCCTGGACTCAAGTGATCTTCCCTC CTAGGCCTCCCAAAGTGCTGGAATTATAGGCATGAGCCACCATGCCTGGCCTCGCAGGATATTATTTAAACGAAACC TGAAGGATTTAAAATCAGAGAAGACACATAAACCATCACCTGACTGTGGGGTGAGAGTGGTCTTTATATAGACACTC ATGATGCACAAGCCAGCCCTTCGCCCCACTCTTGTTTTGAAGTGAAAGGATTTATATGGGAGGGAGGAGGTTTGAGC TGTGCAGGAGGGTCCTTGGTTGGCATGAGGATTTTGTGAACCTACGCTGTTAGCTCTGCAGGCCTGTCTTGGACATA GGTAAGTAGAAGTTGGAGACCTTGTGTTGTGGACCAAATGTTGCAAGATGTGTGTTCTGTGGCTTTTCATTAACTGC TGCATATCTGCTGGTTGGTGGACATAGTCTAGTTTTCTTTTGACTTAAAAAAATTAACAGTACAGCTTATATCGGAG GGCTGCATAGTTTGGGGGAAACTAATGAATATAGTATGGAATGTAATGAATGACTGACTTCTTCATAGAGCTATTGA AGTGATTTATGAAGAGGAAGAAATCATTTTTGTGACTTTGTTGATCTTTGAAGTATTAGAGTGGCTTTGGCAGGTGT GGATCACCCGGAAAGGAATCAAACACTGAGTCCTGCCAAGGTGCTCGGTCCCGGCAGCAAAGCCAGTCCTCAGCAGC CTGCGCTCCCGAAGCTCCTCCAGCTAAGTAACTGAATAGGCCGCCCTGGGAGCTGCCCATGCGGATGCTCTGAATGG TGAAACTTGGTTTTGACACCACAAGTTGTTTTCAGTTAAATCAGTGGCTCAGCAGCAGAGCAGGGTTCTCCAAGGAG GCCTCGTGTCCCCTTCACCCCACCTGGAGGTAGCTGTTCTAAAACCAGTAAAAAATTCTACAAAAACATTTTCTTAG GGTTGTTAAATTAGTCATAGTGTGTGTAACCATGAAAGGAATGGTGAGAGTGCAATAAATGCCTGGTGTGTTCACTC TCCTACTCCTAAAAGTTTCTTGGTAGAATAATTTCCTACCTGTGATGCTTGCGAAGTCAGCAGAGGCTCCCACCCAG CCCTGCCGCCCATTCCCAGAAGTCTGGGCTGGGGGACACCGAATGGATAGTCCACCAGCGGCGTGGCTTGTGAAAGG AGGTACTTGTTAAATCTATGTGTTTTTATTATAGACATCGTTCTGCCAGTCGCAATAATGTGTTTATGGACATTTTT CTGCAAGCACAGCGCGGGTGGCAGTTTTTACTGACAAATTGAGTCATATGCATAGAGGTTTAGAAAGCGCTTGCCTT ATTGACGGATCAGGCAATTCTGGCACGGGATGTTCAGAGATATTTAGGTGGGTGAAGAGAGTGAATGAATCTCAGGG CAGAGAAGGAGATGGGGCATTATATGTTGAAATGCAATAAATAATCGCTAGTTATTTATCATTTGTTTTTAAACTTT TAGCTACATTGTACTTCCCAGTCAAGAGGACTCCGGTGGGCAGCCGGGGATATCATGTTCAGGTGTCTCTCCTGCTT GTGTGGGGTAAGAGCCACTACTGGAATGCGATTCCAGCAAGGCCTGACGAGTCACAGCCCCTTGAACCTGTTGCTCT CCGTAAAGTGGGATCTTCACAGGCAACAGTGGAGGAGCGTTTGAGGGTGACCTGGGCCCTCTGCATCAGAATTACTG TGGGTGCTGGCTAGAGAGGTCTCTCGATTGCAGGGCCCCATGGGAGACCTACAGGACCAGAACCTGGGGATGCCAGG GGATTCTGGCAGACCCTAATGCTTGAGCACCTCTAGGGAAGGCCTTAGGATCCTCTGGGAAGTAGCACTCTCCAGCC CAGGCAAGATCCGAGTCCCCCTTCCAGAAGTATCCATCGGCAGTTGGCATTGCTGCAGGTTTTCTGTGCATATGGGT CTGAGTACGGTTTTGTAACTCCTGAGAGACGTGAATCTCTTCAAATTGCAAACCCAACATGTTATTATTGCTTTTGA GTTTTCAGTTTTGTGGTTATGACAAGATGCAGATGTTACCAAAACTTTGGCGTCAGTTTTACAAACACACGCGAAGC ACGGGCAACCCGTATCATATTTCACCCCTTCTTTCCTTTTGAGAGGGTTGTCTTGTTTTTAATCCCCCTCTGGGTCA AGGCATTTTCCTGGTCTCAGGTGAGGGTGCACTTTCAGAGGCACAGCTGAATACATTTTGTGGGACTGAATTGAGCT TTTCTACAGGAAGTGCCAGGCCGTGTGTGGGAGTGATGCTGTTTCCTAGCTGGGTCCCCCTGGGCAACTCTTAGCCC TCCAGGCACCTCCTCATCCATTGGGTGGGGACGATTATGCTTATTCGGTCTACCCGGGTAAGTATAGGCACACGAGA CAGTAAATACATATTTTTTTAAAAGTAAAATTTCTATCCACTACATGGATAGAAATTTTAATTTGGAGCTGAGTCTC ACGGAAGGATGAAACGAGAAGACGGCGAAGAACCATTTCGAGCCCTCGTTTTCCCCCCAGTCCAATCCGAATCTGTA TTTTGCAGATCTGCACACACCCAAGCCCTCACTGGGGGCATGTGCACGGTGGTCAGAAGTGCACCTTCTGGGAACAG ATGGGCTTCCGTTTGGACCTGCTTTACAAGTTACAATCCTGTGCCCTTGAGCAGAGTTACTTAACCTTCCAAGGCCA GATTTCTCCAAAAGCAGGGCCAGGGACAGTTCCCATCCAGAAGGAGGCCTGGCGCTGGGGAGGCCTGAATGAAGGCG GTTGGTGTTTGCGGATGCAGAGTCGCTCTGTTTTGGTGGAGGCAGGACTGGAGGTCGGGATCACTTGGCCACATTTG CCACCTCTGGTGCGTCTGAGGTCACAGTGCATTGTCTGTGTGCAGCATAAGGTAGTTCCCTATTCATTTACTAGGTC CCTGAAGTCCTTTTGTCTGTAAAGAGGCTACTGGCTCTGCCACCTGCTTCTGTCTTTTCACAGTAGACATTCTCGAC GTGGCAGCATTCTAAAGGTTCAGGTGTGCCACATCGGCCTAGAGTGGGCAGGTGGGCTTCATGTGTGCTCCTAGGGG CACTTGGCAGTTGCTGATAGCCCGAGACACTGGGAGCCTTGACATTATTCATCTGTTATATTGAAAGAACTTCCCAA AGGACGGACACAGGATCTGACACGATGGCAGTGGCCAGGAACCAGCAGTGACACCAGCATGTGACAGTATTTTCCCA TGTGTGACGGCCGTTTAGATCACAGCAGTGAGGGGTAACGCAGGTCCGCTGGGTAAACTTGGTCAAAAATGGGAAGT CTGCAGCATTTCGTGTGTTTGTGGAAATGGGCCTTATTTTTATTTGGGGTGTCTCCTTAATCTCCTGTCATGGTTCA GCTCACCCTGGTGGTTATTCTGGGCGTGCTGCGCTTGTTGCCTTGTACAGACCAACTTAGGAAAGGCTCACCACCAC CCCATGAAGGAGAAGGCGCTGTGAGTGTCTTTATTTTGCATATGAGGAACCCGGGCCTCGGAGAGTTTGAGTGACTT GCACAGGTCTCCTGGGATAGAGGTAGAGTTTTGTTTTCAACCCAGATTTATTTGATAACCAAGTGCAGGCTCATAAC CACTTGTGCCAGGCTGGCTTTGCAACGATGAGCCTGAGAAGCTGTTAGAAGTCCTTTAAGGGGCAAGACAGGGTGTA AACAGACACAGACCTGTTTATGTAGCTAATGTTTTCTGAACATCAATGTGACCAAGTGTTGTCTTTAGCATTGTGGG AAAAGCAATTCGCCCAAGTGTATTCCTGCTTGAAGGCGTTGAGCCGTAGCTGAGGCTGGGTGCAGTGAGGACTTGGG GATGGCAAAGCTGTCCCTGCGTGTGCCTTGTGCCTACCCCGCACCCCACTAGAGAGTGGAACGACCAGGGCAGTGGG GCCAGAGGAAAGATGGGAGGATGCAGAGGGCCAGCCATGTCCCGGGACTGTGCACACGCTTCACCATGTCCCTGCAG GCCAGGGACCCATGCCTGATTCCCTCTGAAACATTTGCGGGACTGTGGCTACCGGTCAGGTTTCTCCAAGTGGCCCA AGGGGTGGGCATTTTGAGCAGAGCAGTGGGACTATGGATGCGGGTACATTTGGGGACCTGGCCATAGTTGAATTTGA GCAGGGTGTGGCAAGCATGTGGGGCTGGACAGGAAGGCAGAGCTAGCCAGTGGGGCCAGGGCCTGCGGAGCCCAAAT GCTGCGCTGGGTGAAGGGCCTTGGGAGTCTTGTGAGTGGGGAACACTAGCCTGTCAGTGCTTCCCAGAGAAGATCAC GGGGCTGGCAGGGGACTGATTGGGGCAGAGGATGCAGGATGGTGGCAGCAGGCCTGGCAGGGCGGGGACAGTTCCAG GAGGTATAGCTGGGGTCAACCCTGGTGGCTTCTGGTGAGAGCGGAGCAGGTGGGAGTCGCAGAGTGTGGTTGTGAGG GACTAAGTTTAGAATCGCTTTTCTTATTGAGAGAGACGAAAGCCTTGGTGTGTGTGCTTTTTATGTGAGGGAAGCCA GATAAAGGATCTGGCTTTGGAAGGGTAGACAGGCCGCCCTCTGCCCTGCCTGGCATCTGGGTTCTGAGGCGGGAGAT TTCCCGACTGCAGCCGCGTTCAGGCGAGGATGGCAGCGGTGGACCCAGGCTCATTACCATTGCTCCCACCCCAGCCT GTCCCTGTTGGGGGCAACCTGTACGTCCTGCAGGAGTCACGGAATTTTAAAAACCAAACCGTCAGGTGTTAGAGGTA CAGTCACATCAGAATGCAAATTAGAAATAGTGTGTGCTGGGGCCTTAAACACCATGACGTGTTTCGTGGGCTGGTGC GGCTGAGTGTGCCCCTGGGCAGCAGAGATTGACGAGGGTGGCTGGGCTTCCTCCGGGCCCTGGGCTCGCAGTGGCCT TGTCTTCAAGGGGCTCCCCGTGTGGTAGGGAGACGTGCTTGTCACACCCATACATTTTGTAGGTACTGGTGAGGGCT GGCTAGACTGAATGAGGTGAAGAGCCTGGCCTTTGTTGGGGGGGGTGTTGGGGAGCTTGGTAAGTGGTTGAAGATGT TGAAGAAGTCCCCTCTGAGGAGGTGGCTTTCGAGTGGAGATTTGAACAGTGAGAGGTGGCAAGGTCTGGGGAGGAGG CTTCCAGGGGACGAGTGAGAGCTGCAGGTGCCTAGATGGCTGCAGGTCGGTGTGTTGGAAGCACAGATGGGAGGTCC TATGAGGGTCACGGGGTGGGGTGGGGAGCATTGAGGCCACTGTTGCAGGCCTGGATTCACTCTAGGAGTGTTAAAGC CAGGGTCTCAGCCTCCTGCAGTTGTCATCTAGTTAAAGTCATGCCAGCAGGGCAGGGCTGTGTGTGTCTGGGTGATG GGGGATCAGATGAGAAAGTGCGTGCCACCCTCAGCACAGTGCATGAGAGGCGTGAGGCACGGCGGATGCTGCGGGTC TTATAAGGCCTTTAACGCTCGAGGGGAAGTTCCTAGAATAATGGGCGAAGAAAAGGAATGATATATTTCTAAAAGTT ACTGAATTTAGCTAGCTAGCCCAAGAAAAGCCCATGTGTGCTATTCTTTATTGTGCAGAAAAATTCGTTTCTGTCAC CATTGTGTTATCATCAGATTAAGCTGTCGAGTCAGATGGATGCTGTGGTTGTGCGGGGTGCGGGCCGATCAGCACAC TCCCAGTGCCTCTGCAGGCCGTCAGCCTCCAGCCCAGGCCAGCCTGAGAGGCAGGCGACGTGGGAAGGGAGGGGCTT CCCACCAGGACACAGGAGGTTGCTGAGGAGGTTGCTTCCATGGTGCCACTTCTGAAATAAGAACTGTTCCTTGGAAG GAATGCACAGGTTCTGAAGTTAGTGTTCTTAAAGTTCAACGTTATCTACCCTCTTGGCCATAGTTGACCACCCTGTG GTCATCCTTGGCCCAGCAAGAGCACAGGCTCTTGGAAAGCCACAATCCATGACCATATTCACAGCTGACCAACCATT TGCCAGGAGGCAGGACTTTCTGTGCTAAAATGGGGATGTCCCAGGCAGACTGGGGTGGGTGGTCCCTGCCTCCCTCG GCTCTCATTCCAGGGTCCTCCTGGACATCACTGCTGTCACTTTGCCACTAGCTTGAGTCCACCTGGGCCTTGAGGCA GAAGCAGTCGTTGAATTTTCTTTTTTTTTGGTTCTCCGGAAGCATGGGCTTATAAGCCTTCCTGTTGTATTTTGCCA TGAGTGTAATTAGAACATCTCCCAGAGCCTGGGTCACTTCCCTTTAGCTGGACATGGCCCCCGCTGTCCTTGTCACA TTTTTTGGATTGTTTGTCACTCCAGAAAGCCTTCAGGGTCATGGTTCTCACTTCCTCAGACATTTTTCTCTTCTGGG TGTGAGGATCTTTTGCTCATAAGACTTGCCTTCTTTGGGCCTGAGACGCTTCTCCCCCAGCTGTGGAGATCATGACA GTTGCAGCAGACGGCTTCTTGGAAAGGTAGAAGGCTCTGGTGTTGGCTGAGGAGAAGCAGCTCCGTGGTCTCCAGGG GTGTCCTGGGTTCCCAGGAATCCCATGGCTCCTGGGGGAACCGCTGCCTGGGGCAGTGCTGGTTCCATGGTCTGTTG GGGTTCCTGGGTGCTCACACTGCCCCAGCTTAGCCGGCGTGACTCAGGATGCTAGGACCCATCGCCAGGCTGCTGGG AGTGGCTGGGTGGGGAGGTCAGCTCTGGCACCAAGGCCATGCTGGGGCTGCAGGGCTTGGCTGGAAGGGGTGCTGCC CTGTGTGTCCTGCTACAAGGGGCCGGGGACCCTCCCAACTCAGGGTGTCCTGCACGCCCACACTGCCTCCCTCTTCT ATCTTTAAGACACCTGGGAAGCTTCTGGACATGTCAAACCCACACCAGACTGAGTGGCAGGGTCCACCACAGGAGTA GCTTAGTGAAGACCAGAAATGGTTTTGAGCTGGGCACTGGCACAGACAGGGTGAGAGCCAGCCGCATGGTCCTCGCA GCCTCCCCGCCTGTGGACCCCTCTCTCAGGCCAGGCAAGTCTGTGGGCTCGTGGGACCCCGGCAGTGCTGGCCTCCT GTGTTTGGGCCTCTGCATCTGTGCTCTGCCCTGAGGTTGGGTGAGTGGGGGACTCGTGTCCCTCTCTTCCCAGAGCA GCCTCTGCTCTATCCTCAGGGAACCTCTTCTGACCCGATCCCCACGCAGACATGCTCTGCTGCCCTCTCTCTCAATC TTCCCCACTCTCACTTCTTCCAGAAGCTACTTCAGCCCCCACGATCTCTCTCTGTCTGGGGCCCTTCACACACCACT GTTTTCTACTAGACTTGTATTGTTTCCATCTCTTGATGGTGGGATGCTAGATTGGATGCTCTCCAAGGCCTGGTGTG TGGTTTCTACTGGATGGAAGGCCCAGCACAGAGTGCTGGACACAGGGTGCTGTGGACTGAACCGTGTCCCCAAGATT CACAGGCTGAAGTCCTGACCTCCAATTTGGCTGTATTTGGAGACAGGGCCTTTAGGAGGAAATTAAGGCTAACTGAG TCATAAGAGTGGGATCCTACTCTGCTAGGATTGATGGCCTTGGCAGAGAAAGAGAGGATCTTTTTTCTTAGAAGAGA AAGAGAGGATCTCTCCCTCCCATACCGTGTGAGGACACAGCGAGGAGGAGGCTGTGTGCAAGCCAGGAAAGGAGCCC TCACTGGAAACGGAATCAGCCAGGACCAGCAGCTCTCACTTGCCAGCCTCCAGAACCGTGAGAAGATAAATGTCTGT TGGTTAAGCCCCCAGTCTGGTATTTTGTTACGGCAGCCCAGGCAAACCAATATATAGGTGAATTACAGACTAAAGTT GTTTCAAAGGCACAAAACTCATCAAGGGATTGTGTATGAAGTTGGAATTTGGGGCTGAGGATAACTTTGTCATCAGA CAGTGCTCCAAAAAGGCACTGTTCTCAGGTTTAGCTCTTGGCATCCCAAAAGATATGAGTGTATTGCAGTAAAAAAC AAGTAACAAACAGAAACCCAGATTTCATGACCAGAAACATCAGTGGTTGTGGGAATAGGGGACAGCAGGCAAGACAG GAGACTCCAGAAGCCAGCAGACCATGGAAAGGCCTGGTGCTGTCCTGGCCCTGGGTGGGCTTGCTCTGGTAAGCGGT AGAGGAACCTGCGCCCTGATGGGAAGGAGAGACCAGCTCAAATGCTGCCAGACTGGGTTTTTAAAACCAGTCTCTAC AGGTTCATTGGGATTCTTTTTGTTGGTTGGTTGATTTTTTCCCCCCCTCCAGATTGGTCAGTATACACACACTAATC CAGCCTGGTTCAAAGGACAGCATGTGGTCGTCTGGTTGGACACCAGCTACATCTCTCAGAACCATACTCTTTGCTGC TTTTCAGGCTAAGATAGCTCTCTGAGACTGTTTGGAGGTCTCTGTTGATTTAGGGGCCTTGCAAGACATTTCTTGCT GAAAGCCCCGCTGGCCCACACCTCACCAAATTGGCTTATGTGGCTACTGATGGGGGGACATAGAAAAGGTAGATAGA AAAGGTTAAATTTACTTCTGTCTAACTCACCAATTCATGCTGTGGATTGTAGATCTGCAAAATATATCAAGTTCACA GGGATTTTATGATTGTTGCAAAGGAAACTCAAATTGTCAGCCTTTTCCTGAAGGATCTTGCCATTCCTAAGCTCTGG CTATGCCCCTACTTCTGGCTGGCTGTGGCCTTGCAGTGCAGGCTGGCACTGTGCCCCTGGCATCTGGCTTTGGGGGG CCCAGCTGTGCAGGGAGCAGATGCTGTGGTGAATACAGGTGAAGCCAGAGTCCTGGCTTGGGGAATGTGTTCTGCTT CCTGTAGTGCTCTATTTGAAGTGTGGATTTCAGTTCTTCGTTATCTTTTATTTATTTATTTACTTATTAGCACAGCT TGTTTGTTGTTCAGTTCCATAGTGAGAATCTCTAAGAATATGATTAACCTTGAGGGTCATCTTATCCTGTAATTATT AATGATTGATTCTGTTTATCCTTGAAATCAATAAGAGAGGCATAATGGTTTGGTCTGTAGTTGGGCGTGATTTCTTA CATTTCGTAAACACGGTTCTGTGACAGCAGTTGTATCAGTTTATTACCCAGAACATGTTTGATGAATCTGAAGTGTA TGATTAGTTTTATATAATTATTGTGATATGTAGTGTTCCTTACATGAGTTATGTTAATATGGCAAATAGTGTTAACA TCTCCTGCCACTAATAGTTAGGGTGGGGACATATAATAATTGATCTTCCTGGGAGTGCTGTAATGTAAAAACAATTC AGGCTGTTGGAAGTATATTTTACAAGTATGCGTTGGGCCTTGGGGATGTTATATTGAAAAACCCAATTGTACAGTTA CCATGGGAACCCAATTAAAATAGATTGGTTGATTTTTTTTTGTCTTTCATCTTGACCAAAAATCTAATGTATTTTAA ATGTTTTCATATGGAATTGTAGTCATATACTGACTTGCTGTGCCAAAGTATTCTGCTCGTTTTTTCCAACTTTAAGC TAAAATAGTGAAAAGTTCTCGAGTGGATCCTTATGAGAACGTCTCCCAAAGAGAATCAGTCATGTTTTTGTGGAAAA GTTTGTGTGAGTGATGATGGTAGAGTGGAGGTGGTGGAAAGCTTTTATGAAAAAAGGGAGAACAAGCATTTTCCTAC GAGGGCAGACAAGAACCCTCATGTTCTTCCTTTGGTGGAGGACATGAGTGTGTTTCTCCGTTCTCACGTTTGTAGAA GGTGAGATTAGGTCCCTAAAGGGCCCTCTCCGTGTTGTGGAGGGGTTGGGGTGGGGGTGGAGTGGTGGGGTGGGATC TGTGTTTGCCCTCCTTGCTGGGGGTCCTCACATTGTTTGGTCTCAGAGCCTTTTTGCACAGTTAAAACTTATGAGGG ATCCCAAAGAGATTACCTGAGTTATATATTAATACCCCATTAGAAATTAGCAGTGAGAAATTTTAAAATATTGATTC ATTTAGACAATAAACCTATTAGCTTTTTGCATAAATAACATTTTAAAATAAAAACTAGCTATATTTTCCATAAAAAC CAATTAGGGAGGAATGTTATCAGTTTCCATTTTTTAAAACTTCATAATGCCTGGATGAATAGAAGACAGCTAGCTTC TCCTGCTTCATTCAGTCTGTTGTGATATGTTTGGGTTGAAGCGCATCAAGAGAATCTGGCCTCACTCAGGTAAGTAA TTAAAAGGGAATAGTGTTTTAACAGCTTCCTCAGATAATTGAGGATGTTCTCCTTTGACACTACATCAGGACTCGGC AAGTGGTAATTTCCTGAGGGTTTGTAGCAGGGTGCAATCCGAGACCCGCTCTGTGAACTTTTTGCTCTCTATGACGT TAAAATCCACAGGTATGCCTTGCACTTTGAGTGATTTTGTAGCGTCTTTCATCGGCCCTGTGGAAAATGTTGCTTCA TTGAGTTATACAGATCTTTCAAATATTGATGTTTCCTAATACAGTCCTAAAAATAATATTTGTTAATATCACCACCT TTCTCCTTAGGAAAGTCATTTAGTATTGGGAAGCCATGGTGGTGGGTACCAGTATTCTAACATTTTAATCATCACTT GAAAGTTCTGGCTGGGCACACTGGCTCATGACTGTGATTCCAGCACTTTGGGAGGCTGAGGTGGGAGGATCACTTGA GGCCAGGAGTTGGAGACCAGCCTGGGCAATATAGCAAGATCCCGTCTCTACAAAAACATTTTTTAAAAAGAAAGTTC CCCTTTTATCATCAGCAGCAGATACTGTCAGTTGTGTTCATTACAGGTACAGACTATTCATTTTTGAGAAAACATCC GCCAGATATGCAAGTCTGAATAACTGTTGTTTGTGAGTCATTCACACTAGCAAAGCTTTTGTTCTAAAATGAAGTTG GTAAGTTCATCAGCAGTCTCTGCCATTTGCGGAGCCCTCCTGGTGGCAGCGTCATTCTGGTTTGTGGCAGAAGTGCT TTGCTGCGCTTCCCGTTAGGTCACAGAATGTTTAGAAGGTCAAGATTTAGTGAAGTTTGATTGCTTCCTCAGGGCAT TCTGAAGTGAACCTGCCTGTTGCCCTGACCGTGCCTTCCTCCTAGAGTTTGGTGTCAATATCTTGGCCCTTGCGGAG GCATCCACGGTTTTCCCCAGCATGGCTTCTGTGTTGTCTTTCACCGTGCGGTGTGTGGTCAGCCATAGTTTGTGCAG GTGCCCTTTAGCAGATGGGGGATGTTTTACTCTTTTCTGCAGTGAATATGGTGGATAACTCTCATTGGTTTCCATGT CTTCAACCAATTTTGTGTTCCTGGATAAATGCCCACCTGGACTTGGTGAATTACTGTTTTCATAGATTGCTGGATTT GACGTGTGGATATGTTTGAGGATTGTGTGTCTGTTCATGAGAGGTGTTGGTCAGCAGCATTCCTGGAGTGTCTGTCT GCTTTGTTAGGAGGGCAATCTTGCACTCATAAAATGAGGCCTCTTCTATATTTTGGATTAGTTTGTGTACCGTTAGC ATTGTCTCTTCTTTAAATGCTTCATAAGATTTACCAGTGAAGCCATTTGTGTTTGAAGTTTTCTTTGTGAAAATAAC ATTAACTATGAATTCAGTTTTTTTTAGTAGCTATAGGGCCATTCAGGTCATTTATTTCTTCTTGAGTGACTTTTTGG GATTTTGTATTTGTCAAGGAATTTGACCATTTCATCTAAGTTTGTTGAATTTATTGGCCTAAAGTTATTTTTATATT CCTTTATTATCCTTTTAATGTCTGTGGGATTTTGAGTCATGTCCTTATTTTTATTCCTGATATTGGTAATTTGCACT TTGTCCCCTTTTTTGCTAACTGGTCTGGCTAGAGGTTTATCTGTTTCTTTTCAGAGAGCCAACTTTCGTTACTTGAT TTTTCTCTCTTACTGATTTCTCCTGTTTATTATTGCTTTCTTGTGCTTACTTTCAGTTTAGTTTGCTTTCTTTTTTG TAGTTTCTTAGGGTAGAGGCTTAGATCATTTGGTTTTCCTTTCTTCTTTTCTCATATAAACATTTAATGCTAAAAAT TCTCTCTAAGCACTGCTTTAGGTGTGCTCACAGATAGACATGCTGTGTTTTCATTTTGATTCAGAGTGGCGTATTTC CCAATTTTCCTTGTGGTTTCTTCTTTAATGCTTGGGTTATTTATTAGTACATCATTTAATTTCCAAGAATTTGGGGA TTTAAAAAATATTTGGGTACTTTCCCAGTATTTTTCTGTTATTGATCTGCAGGGGTGAGTTACCTTGTAATCAGAGG ACATACCTGTTATGATTTTAATCCTCCTAGATTTGTTGAGAGTTGTTTTACAGCCCAGAATATGGTCTACCTTGGTG GATGTTTGAAAAGTGTATACTCTGTGGTTCTTGGGTGGAGTGCTCTTTAAATGTAGTTGGGTAAGGTTTGTTGATAA TGCTCTTCAAGCCTTCTATATCCTTATTGAATTTTGTTTCCCTATTCTAAAAATTATTAGGAGTATTGACATCTCCA GCTATGATTGGAGACTTATTACCCCTTTCAGTTCTGTTGGTTCTTGGTTCATCTGTTCTAAGTGATTTCATTAGGTG CATACATGTTTAGAATTTTAACATCCTCATGGGGAATTAACCTTTACTCTTATGAAATGGCCTTCTCTAGTTTTGTT GTCATATTCCTTTTTTGAAATTATTTGATATTAGGATAGCCACTCCAGCTTTCTTTTGATTAGTGTTTCTGTGGTAA CTGTTTTTCCATTCTTTTATGTTGAACCTGTTCTTGTCATTACATTTAATGTGTGTTTCTTGTAGAAAACACAGTTG GGTCTCTTGCTTTAAAAAATCTAATCTGACAATGTCTTTGTAAAATTGGAGTATTTAGACCATTTACATTTAATGTA ATTATTAATATGGTTGGGTTTAAGTATACCATCTGGCTGTTCATTTGTCATTCACCAATTTGTTCTTTTTGCCCTTC CTCCATCTTCCGTAGCTTCTTTTCAGTTATTTGGATATGTTTTTGAATGATTCCAATTTAACATTCTGTCTACACTG TTGGCTTGTTAGCTATCTCTCTTCTTTTTTAGTGGCTGCTTTAGGATGTGTAATGTACATACTTAGCTTATGCTTAT CATAATCTGCATTCATGTGATATAATACAACTTCACATGCAGAATAAGCACCTTAACAAAAGTATGCTTCAATTTCT CTCATCCCATTTTTTGTTATATTATTGCTACATATGTAATATTCTCCAATATATAGAGTTACTATTTTTATGTTGGG CAATCAGTTTTCTTTTAAAGAGATTTAAAAAATCCAGAATTTACATTTATTTGCATATTTACTGTTTTTTGAAATCC TCATTCCTTTGTGTAGATCCTAGTTTCCATTGAGTACCATTTTTTTTACACCTGAAAACCTTGTACCATCATTTCTC AAGTGCAGGTCTGCTGGTGTCTGAATTGTCATGCATTTGTTTTTGTTTTTTGAAAAAAGCCTTTGTCTCACCTGCAT TCTTGAAAAAATGTGAATTCTAGGTTGACCTGTTTTTTTGCTTTTTAATACTTTAAAGATGTTGTTCCATTGTGTTC TGCCTTGCATAGTTTCTGATGATCAGTTTGCCGTCATTCTTAAATTTGTTCTTCTGTATGTAATCTGGCATTTTTGC CACCTCTGGCCACTAAGGTTTTCTCTTTGTCACTTGTTTTCAGCTGTTTGATTATTTGTTTTTATGTTTCTTCTGCT TGGGTTTCACTGAGCTTCTTGCATCTGTGAGAATGGGTTACATATCCCTTATCTGAAATGGTTGGGACTAGAAGTGT TTCTGATTTTGGATTTTTTTTGGATTTTGGAATATTTGCATAGATAGATAGGTAGATAAATAGATATATAGATAGAT AGATATAGATATAGATACCTTGGGGATGTGACCCAAGTTTAAACATGGAATTTTTGTTTCACATATACCTTATCCAC ATAGCCTGCAGGAAATCTTATGTATTATTTTAAATAATTTTGTGCATGTTACAAAATTTTGACTGTATTTCAACTGA GACCTGTCATACAAGGTCAGGTGTGGAATTTTCCAATTGTGGCATTGTGTTGGTGCAGTTTTTGGGTTTTGGAGCAT TTTGGATTAGGTGTGCTCAACCTTGTTTTACCTCATATAGATTTTTCATCAGATTTGAGGAAATGTCACTGAATATT TCTTCAGATATTTTTCCTGCCTCCCCTTTTTCTGAGGCTCCAATTGCGCATGTGCTGCTTCATACTGTCCTGTGTCT CCCTGAGCCCTGCTCATTTCCTCAGTCTTTTTGTGTTTCTGTGCCTTGATAGTTTAAAAAACGTTATTTTCTCATTG TTGCTATTTTTTCCTTCTGCTGCATCTAATCTGTACATCCTATCGATTGTATTTTTTACTTTAGAGACTGCATTTTA CATCTCTATATGCTCCATATGGGCCTTTTAAAATATCTTCTATTTCTCATGTCATATGTGGGTTCTCCTCTATCTTC TCAAATATGGAGCATGTTTATAAGAACTGTTTTTATGTCCCAGTCCCCTTGTTTTACGCATCTCTACTTTTCTGGGT TTGGTTCTGTTGAATGATTTTTCTCCTGATTGTGGGTTATATCCCTCTGCTTCTCATGTGTGTGTGTTTTAAATGGG ATCCTAGACATTGAGAGTTTTGTTGTGGAGTGCTAGATTATGTTGTCTTTTAAAAAACAGTTTTGGACTTTGTTCTG CTGCAGGTTCAGTTTCTTGAAATTGTTTGTATCCTTTCAAGGTATCATGCTTTTTTTAAAAAAAGGTTTTGTTAGGG CAGGTCCAGACCAGGTTTTAGTCCAGGGATAGTTTAGTCCTACTATTTACATAATGTCTTTACTTTATAAGGGTGTG TGTATGTGTATATATGTATGTGTGTGTGTATTATATATATGTATGTGTGTATTTTATATATGTGTGTATTAAATATA TATGTATTACATATATATGTATATATATGAAAAATAAGGCAGCTCTGAGGTCTTTACCTGATGAATGTTGTATTAGG AGATCTTTCCACACTGGCTGGTGAGAACATGAAATATTCCCAGCTCTGTCTGTGATCAGGAATTATTTGGGCTGCTA CTTCTGGGCATCTTTCTTTGACCTCAGGGAGTTCCTTCTCAAGCAGTGTCTCAGTAGTTAGGCAGAGGCCACAGGGA CTCTTCTGGAGATGCCTGGCGTGTTCTCTGAGTAGGCCCTTCTTCCCTGGTACTCCATCCTGATGATTCTAGGTGTT TTGTTCTTTTTGAATTCTAATCTCTCTCCCCACTTTGGTGAGAGCACCCACTGGTTTTGTGCCAGATGACCCTCCTC CTCCTTGGCACAGCCTGGAGGCTGCATCCAGCCGTTCTCTGGCGGCTGGCTCACTTCACTTCCCTTTCCTTGGGGAG CATAGCCCCTGGCTGCTGTTGTCCTTGTTCTGAAGACCATTGTTTTATATAAAAGTTGAGCACCCCTAATTCAAAAT CTGAAATGCTACAGCATCTGAAAATTTTTGAACATTGACATGCTGCTCAAAGCTGATGCTCAAAGGAAATGCTTATT GGAGCATTTTGGATTTTTGGATTAGGGATGCTCCAACTGTAAGTATTTGCAAATATTCCCAAATCCAGAAAAATCTA AAACCTGAAGCACTTCTGGTTCCCAGAATTTCAGGCTACTCATCCTGGACTTTATTTCGTTTTAGCTGTTACATGTG GTTCTTGCTGCTCTGTCATGGCTAGAAGTGGGATCCCCACCAAGTTATTAGTGGACTCATAAAAATAAAAGAGAGGC CTGCTGGGCTGTTACCAGACTGAGATTGCTCAGATTACACAAAGCCCTCTGGCCCTGACCCCAGACTTTTTACCAGC CTGAAGTGGGTGAAAAGAAAGCTTCACTGACTGCTTTCTAGGCATGTTTAAGCCTGCTTATTCTGGCCCTCACAGAA TAAGAATTCAAAGGACAATAATTTTCAAGAAGACTTAATTTAAGTTCATCTACCTTATTAGACTTGATATAGATAGA TAGCCTTTTTAATTTTTTTTTCTCATGGAAACAGAGTTGAAGAAAACTAATTTACCTTCTAAATTTAGGCACAGCTA ACCAAGTCAAGGTGTGGTTCTGTTCTTCTCTGTTCTCTTCTCTTCTCTTTTTTTTTTTTTTTTTTTGGTGGGGGGTA GACAGAGTCTTGCTCTGTTGCTCAGGCTGGAGTGCGATGGCATGATCTTGGCTCGCTGCGACCTCTGTCTCCTGGGT TTAAGCAATTCTCCTGCCTTAGCCTCCCAAGTAGCTGGGATTACAGGTGCCCATCACCACGCCTGGCTAATTTTTTG CATTTTTAGTAGAGATGGGGTTTTGCCACGTTGGCCAGGCTATTCTCGAACTCTTGACCTCAGGTGATCCACCTGCC TCAGCCTCCAGAAGTGCTGGGATTACAGGTGTGAGCCACTGCGCCCAGCCGGTTATTGTATTTTCTGTATGCTTTTT GGTCGTTCAGCTCATACTCAGTCTTTCCCTGTACTGTTTGAGAAATTCACAAGTGAATCCCAGATCACAGGTGTTTG GTGAAATTGGTATAAACCTTAACTGACTTTCTGTTAAGAAACATAAAAAAATTTATTTGTATTTCTACTCTGAAGAA GGACTGTTCAAACTTTATATGGAGGGGACCCAAGATTGGGAAGGCAGAGGAAACAAAGGGCGTCTTTGATTCACATT ATTTTTCTCTTGTCATCATTGCAGGCTTAAGTGTGTGTCATCACTAGAAATGTATTCTGTTGATGTCTGTCATTTCA GCATTTTCATGTTGTCAAAAATGAGACCAGACAGAAGAAGAGTGTATTCTTTCCTGCTAGAACTCGCACAACACTGT CATTAATGCCTCTGGCAGTCAGGACTTTAATCAGTTAAATGTAATAGTGGTGATAACGTTAAAGCCTTGTATGGCAG TCTACCCGGGCAGCCTAGAGAGCCCTGTGCAACTCTGCATTTGAAAAATCAATCAACTAGGGCTGTCTTTTGTCCTG GGCTACTTGGATAGCTGGTATGAACCACCCAGCACTAGCCTCCTGCTTGTTGAGATGACACTTTTCCTGAAGCCATG CCCACTCTTGACAAAGAATAATTAGGTGCCCTGCATAAGTGTATGGGGACCTGCAGGTGGCTTGGATGGTTTGCCCT GCTCTCATGGGGGTCCACATGAGCATACAGAATGGAAGAAGTCATGATGGTTGCAGTGGTTCCTCAGAGGAACAGTG AGTTTTTCAAGTAGGACTCTGATTATCTGTAAAGGCCAAACTTGTTCCAGTGACATCACATCTCTGGGGTTGCTAGG AAGTAAAGGAGAAAATGGGTTCACTTGCACAGTTTTGGATTACATGTAAGTTTTAAAGAATAGGAATGTGTGTGTGT ATGTATGGTATATACACTATATTATCATTACCAAAAATGATGCCTCCTATAGACTTTTGGTAGAAAGGAAATTTCTT TCTCTTCTGGTTGTCTGAATTTTGTTTTCCTTTTTTTTTGCTTCCCTCCGGAAGGGAATCAAAAAATTGTATATATA TATGTACACACACTATATATGAAATGCCTGTTCATATCCTTTCTGCCTGTGTTTCTGTTGGGATTTCTTTTTCTTAT TGATTTATAGGATTATTTTATATAGTCTGGATTCTAATCCTTTGTCAGGTATATTGGCTGCAATTTTCTTCTCCCAG TTTGTGGCCTGCATTTTCATTTTCTTTATACACTGCTAACCATGTAGGTGTATGTATGTATATATTCTGATTGTGGG TTATATTTCTTTGCTTCTTATGTGTGTGTTTTAAGTTGGATCCTAGACATTGAGAGACTGTGTGTGTGTATATATAT ACCATATAGGGGTGTGTGTGTGTGTGTGTGTGTGTATATATATACACACACAAACACACATAGGTGTATACGCAGGT ATACACACACACACACACATAGGTATACACACACACACACACACACACACACACACACACACATGAATATACCTATA TGGTTAGTAGTGGGAAGCCAAGCTGTTTCTCACTGTCAGATGGTTAAGTTTTGAAATTTTCTCTCATTCTACTCAAG GGTAGAATGATTGGAGTGTCAGTGTTCAATGCTACAGGACAATAACTTTTGTAAAAATGGTTAAAGCAGATTAGACC CCAGTCAGTTAATCCACCTCCTCACCAAAACTTGGAGTTATCATGCTACTAACACTGCTAACCTACTGGGTAAAAAT CCTGTCTCATAGTGATCTTAATTAGCACTTCCGATTGAGAGCAACCTTCAGCATCTTTTCGTGTTGCCATTCATCTT TTGCGAAATGCCTGTTCATACCCTTTCTGCCCATATTTCTGTTGGATTTTCTTTTTGTTATTAACTTATAGGATTAT CTTATATAGTCTGAATTCTAATCCTTTGTCTGTTATATGTGCTGCAATTGTCTTCTCCCAGTTTGTGGCCATGTTTT CATTCTCTTTATAGTGCCTTTTGATGGACAGGAGTTTCTAATTTTAATATAGTTGCATGTAATTGAATTTATGATTC TTTTCCTTTATAGTTTGCACATTTTGTGTCTCGTTTCAAAGTGCTTCCTTATCCCCAGTCATAACAATTCCACTATT TTCCTATGAAAGTATCAGTTTTCCTTTTCATATACAAGTCTGCAGCTCATTTGAAATTAACTTCTGCTGTGGTATGG AGTGGAAGTTCAGTTCTTTTTTAATATGAATAATCAGTGGCTCCAGCCCCATGTATAGAGTAACCCCACCTTTCTCC AGGGCTCTGCAGCGGCTTCACTGCAAATATATGACAAACATGTGACATGTGGATATAGAGCAAGAGAGGCACTGCAG AGCCCTAGAGAAATGAGGAGAGACACAGTAAATGGTGCTGGAGCTGCTGACTATTCCAAGTGGACGCATGCCTTTTT CTAGGCTCTCCTGTTCCATTGATCTTTTTGTCTTTCTGTACTAACGCCACAATGCATTAATTACTATAGCTTTAGGC TAACTCTTAAAATTGATGAGTCAGCCAGGCACAGTGGCTCATGCCTGTAATCCCAGCACTTTGGGAGACTGAGGTGG GCAGATCATGAGTTCAGGAGTTTGAGACCAGTCTAGCCAACATAGTGAAACCCCATCTTTACTAAAAATAGAAAAAA TTAGCTGGGTGTGGTGGTGTGTGCCTGTAATCCCAGTTACTCGGGAGGCTGAGACAGGGGAATTGCATGAACCCGGG AAGCGGAGGTTGCAGTGAGCTGAGATAGCGCCATTGCACTCCAGCCTGGGTGACAGTGCAGGACTCTGTCTCAAAAA AAAAAAAAAAAAAAAAAAAAAATTGGTGAGTAAATCCTCATATCTTGATTTTCCATTTTCCTCTTCAGGAGTTTCTT GATTCTTTTGGGGCCTTTGCTCATCCATTCGCATTTCACAATGAGCTTGTCACATTCTTAGACTAACCTGTTTGGTA TTTTGATTGACGTCCTTGGGTCTGTAGACTAATGTGGGGAGAATAAGATCTTTAGGATATGAATCTGCCTCTTCAGG AATATGCGCTCTTGCACTCTCTGTCTCTCTTGGATTTCCTTAATGTCTCTCACATTTTAATAAGTTTTTTCATAAAC AGCTTGTGCACCTTTTGAAATACTCCCCGTGTCCTTATTTTTTGTTGTTGCCATTAATATTATAAATGGTATCTTTT TCTAGGATTAGATTTTTCTTTATGACTGATATGCGGAAATGCTATTAATTTTCATGTCATCTTTAATTTACTTTCTA ATTTTTTAAAATGAATATACCACATATATATTCTTTGTTTTTTCTACATAGACAGAGTTTTGCTTCTTCTACTCTGT AAACCATTTCTTTCTTTTACTTGTCATATTGCACTAGGATCTCCAGTTCCATTTTAAGTCGATGTGGGGATAATACA CTCATCTTGTTGCTTATTTTAAAGGGAAAACTGCTAACTCTTCATTAACAAAAATGATGCTTGCTATAGACTTTTGG TAGAAAGAACTTTCCTTCTCTTCTGGTTATCTGAATTTTGTTTTCTTTTTTTTCTTTTTTCTTATTTTGCTTCCCTC CAGGAGGGAAACAAAAAATTGTCAGAAACTATTTCAGAGCTGAAGAAAACTTCTTAATCTCCTTCTCCTCTACTGTT CCTTGAAAACTTTTTAAAAATTATGAACAGGCTTCAAATTTTATTAAGTGATTTTTCTGCATCTATTTAACTGTTTA TGTGGTTCCCATCCCCATATCTGTTAGTGTGGATCATGACTTCTAGGGAATTATTAATGTTAAGCTATCTTTGCATT CCTGGGATGAACATTACTTGGCCACTAAGAATCATCCTTTAAACACCTGCTCTAGACCAAGCTTATTAATTTATTGC TTTTAACTTTGGCCAAACTAGTGGTTTAATTGTTTTTAAGGTTATTTATTCTTTATTGTTATTAAGATTATTCTTTT TTAAAAACTGGTTAGGTTAATTATATGAAGCTATATTTTTGCACAGTCTATCTTTTTCTACCCTTTAGCTTTCAGCC TTTGTTCTTATATTTAAAATATGTGTAAAGTAATATAGTTTTAAAAATATCCAGTTTGGTAGTCTTTATTTTTTAAT TATTTAGTCCAGTCACATTAAAATAATTATAGTTGAGCTTACTTTTACCATCTTGCTATCTGTCTTCTATTTGTCCC ATCTTTATTTGTTCCTGTATTTCTAATTTATTTTGCTTTCTTTATGATTAATAGTTTTTAAAACCATTTTTCTCCCC TTTCTGGTTATACAGATTTGTATGTTTCATTTAGTGATTAGCCTAGAGATTATAATATACACCCTGGACTTACTATA GTTCACCTAAATTGCTACTTTGCCACTTCCTGAATAGTAAAATACTTTACAAAATGTTAGTCATTTCCCTTTCTCCC AGCTTGGATGCTGTTGTATTTTAATTATATATACACATTTAAAATGCAGTAGTCACTTTTGTCACTGTTTAAACGTT TGGTGTTTGTGTCACCGTGCCCCATGCTTGCCCTCCAGTGCTCTCCATTGGTTCTCCATCATCATGCCTTCGTCTGG GGTGACTTCTGCTTGAAGGACTTGTTTGTTTACTTAGTTTTTAATGCTAGTCAACTGGCAGTGAATTGGTCCATTTT TAAACACTAATAGTTATTGATTGTTGAGTTAGCAATTCTTTACCTTATAAAATATGACATTCCATCGTCTTCTGGTT TCTGAAGTTTGCTGAAAAGTCAGCTGTCAGTCTTATTGTTGCACTTTTGAAGATAATGCAAATGTTTTTACTCTGGC TGCTTTTAAGATTTTTTCTTTGGTTTGAAGCTAATTGTGTTATGGTTCTTTGAGGTTTTCTTCATATTTATTCTGCT TAGGGTTTGCTGAACTTCTTGAATTTCTGGATTGCTCTCTGTCATCTATTGGCAAATTCTTGACCCTGATCCCTTCA AATATTGCTCTGCCTCATCCAATCTGTCCTTTCCTCTCGGAGTTGAATTATAGGTAGGTTAGTCCTTTTGACTGTCC CTCGGATCTCTATTCTTGTTTTCTTTCCATTCCTTTCCCCTTTCTTGACCACAGTTTGGATATTTTCTGCTGAGCTC TCTGGCAGATCACGGACCTTGTTTTCTGATGTGTCCAGTCTGTTACTAAACCCATCCAATGAATCCTGAATTACAAA TTTTGTATTTTTCAGTTCTAGAATGCCCGTTTTGTACTTTAATATATATTTTAATTCTATATTTAAAATTCTTCTCT TTCCCACTTATGTTGTCTGTCTTTTCCTCTTATTATTAAGTGTATCCATTGTAATTATTTTACACTTCTTATCTGCT AGCACCAGTATTGTGGACATCTATTCCTCTGCTTGTATTTTCTTCTTTTTTCCCTTCTCTTTATTATTATTAAATAC ATGTTTTTGCTTTTTGCATGCTTTTAAAATTGTGAGTGTTTGCTGGACTTGTGCATAAAGGACTGTAAAACCTCTGG ATTGTCGTGTTTTTCATCAAAGCAAAAGCTCTCTTTGCCCTTGGTTAGGCATATGGAGTGAGGGGTGAAGGACCTTG GTTTCATGAGGGATTGATCTGGGTCAGGGCTGGCCTGTTATTTTACTAAAACTCAGTCCCTAGTTGGACCTTCCCTT TGAGCATGGTCTTTTGATTGGAAGCCCATGGTCTCTTTCTCCTCAGCCTGTAAATGCTTTGGGAGATCCCTTGGTTC TCCCCTTAGAAGGTTTTGAGCTGAGCTCTTTAGCTTCCCACGTCCCCTGTTTCAAAGTCTCCTAAATGTCCTGATGG GAGATGTGACTATGTGTGAAGCAGGCCCTTCTCTCTCTGTCTTTCCGCCTACCTTTCCTCCCACCCCAGTCTCGTAA GTGCTATTAGATTAAGGGATAGTGTGCTTTTCCTTTTAGGAGCCCTCACTTGACCCAGCTCTCTAGGCTCATGAACG CAGCCCCATAGGATAGCAAATTGATTGCACTTTTGGGGTTCTGATTCTGATCTTTCATGCCATCCCCAATGGGCCAC CCAGAGCTTCCCTGGTTTCCCTTCCCAGGTGGAGTGGCTTTGTGTGGACTGCCACGGTGCTCCCCATCTGCACCCAG GATCAGCAAGTGTTTCTGGGCAGCAAAGGGCAGTCTCCACTGTACAGTCCCAGTCCCCCTAGTCCTGGTTGCTTCCA CAGCTCTATAACATTTTAAAAGACGAGTTTTGTAATTTTTCTGACTTTTTCCAGTTCCTGTGGGAACATTGGGCTGC CTCCATTAGTTCGTTTTGCTTGGAAATGAAAGTCCATTCTGAGCACTTGCTTGAAATCTTGATTGAAGTCTTTGATT TCTGCTTTCTCCTTGGTCATGCTTTCTCCTGTCATCTATCTTCCTTTGCCCACACATTTCATAAATGCTTATTTCGT ATTCTACACAGGTTGCTTTAAATATCTGCAATCCTGTGGGTGGAGTGTGGGCTTTGTGGTTTTCATCTTTCTGTGAT TTCTTGTAACTCTTACGATGACACGGGACCTTGTTTGATGACTTGGTTGATTATTAATTTATATGGGCTGAGCCTGA TCTGTTTGACTCCTGAGTGCCTAAATTAGGGATGCTTTTCCCTAAGGGTGGGTGTTTGGGTTTCTGTTGCCTGGAAC CAGGGGGTCTCAAGGCAGCACCACTCAGATCTAGGACTTTCTAAGGCTTCTCACTCAATCAGGGCCCTCGGGTTGTC AGGGAGGCCCCAGTGGAGCGTCTGGAGGTCATGAGGTGTGCACCTTCTCTGCTGATGCTGCCCACTTTCCCTCTGCT TCCTCCAGCCCTGGCTTACTCTCCTTTTTCCAAGTGCCCCGATTCTCTTTGGATTGCCCCTGCTTACTAGAGAGGCC ATTCAGGAAACTTTGAAACATTGCCATTTATTCAATATCTAGTGCATCGTAGTCCCTTAATCCAAAACAACTGGTTT GGTTTTTGCATAAAGCTACCAGAAGATAAATATAGATAAAAATCTTGAAGATTTAGAAAAAGTAATATTAAAATAGA TCCTTAGATATGTTCTTATCAACATCTGCAAGTGTTCATCCCAATATGGATTCCATCAGTTAGAGGGGTTTTAAGAG GGGTCACTGTGCGCCAGGCCCAGTGTGGGATCTGGGGGAGGTTGTCAAAGTTGTCTTCTAATCCAGAACAACTTGCT CACTAATATTTATATTTCTGCCTTCAATCTGGGAAGCAGCCCTTTTCAGAAAGGTTTGCTGCAATACTCTCTAGGGG ACAAAGCTGAGTGAAACTCTAGAGGCTTGTCTTATACGCATAGACATCACGTGCACACTTACACCCCAGTCATTTCC GCATGTGGGATCATCACAGTTGTGTGTTTGACTTTTTCACCTGACCTTGTAAGTGCTTAGCCATATATTGAACTCTT TAATATCATTTTTGGAGATGGCATAGTGTCCTACTGTAAAGATATAACCTTCTTCCATTGTTAGGAATTTAGGGCAA TTTCATATCTGAGACTCTGTCTTAAAGAATTAATTAAAATTTTGTGCACAAAGATGTTTAATATAGTGTTTTGAGAA GTCAAAACACAGGGAAGACTTCTTGTGTCTTACACTGAGAAATTCTTAGCCAGCCTCTTAGTTTCCTGAATTCAGGA CTGTGTTGTGTAATTTTGAAGCCCCAATAGTGATATGGTCATTTTTTTCATATCTTCATTCAAAAAACCTCAGTCAC CTGGGGAGTGGGTGGGGTGTGTGCTGGACCCTGACCTTGAACTGTCCAGACAAGTTCCTAACCACGTGGAGCTCAAG CTTCCCTGGGGCTTACCTGAATGACCTGCTCAGTGGCCAGCCACTTGCTGCGTGTCAGCCGGTGAACTCTGGGTTCC TGGCTTATCAGAGACTTCAAGTCCTCATTACCTTCTGGGTCTCAGTTTCCCTAATATGTGCAATGACAGGATTGGCC AGGGCTTTCCAACAGAAGTTTTTGCAATGATGGAAATGTTCTGTGTCTCTGCTGCCCAATGTGGTAGCCACTAGTCA CATTGGCTGCTGGGCACTTGAAATTGACTCCTGTGGCTTAGAAACTGAATTTTAAATTTTATTACATTCCAATTAAT TTAAATTTAAATAAGTAGCCACATGTGGCTAACAGCTGCGTATGGACACTGCCAGTCTAGACGGATATGATGCTTGT TTAATGGTCTTAAGAGGTCTTTAGAGTCTATTCTAATCCTGACATCTGGTTTTCTTTGCTTGTTTGTATTTATTTGT TCCTTTATTTTTACCACGACTGCTCTGAGTACCAGGAACTCCTTTTTGGGATGTCACAGATCACCAACTTCCTTCTC TGTGCTGTGTCAATAGGGACGTCACCCCTGTGGGGAAAGGAATTTGCCTGAACAAGACACTAAAAAGATAAAATAGG CTGAAGCGGAGAAGAATAAAAGATTGTGCTGGCATGAGCTAGTTTTGCAAAACCCATTTAAATAAACTCAGGATATT ACCGACCCCATGCACACATTCTTTCCTTGACTCTGCAATGTTCCGTTAAACCAGATTGTGAATTTTTTTCAGGATTA ACAATTTACATTTATGATTCTATTTTCTTTTATAAGTAACTGCTATTTGTAAATGAGACTAATTATTTGAATTCATG GTACAAATAACGTAATTTAGAGTTACAGAACTCTTGATCCTCTGGGTCTAAGCAAAATAAACGTAGTACCTAATGCT GGAATAGAGCAAGAGTTTTCTTTGAATCTCAAAATATCTGCATTGTGAAACTGGGTTAAGTTATTTTGGAAACTATA AATAGTCACTTGGTAATTAGGTGTTTGGTTTTATTTGTTCTAATGGAGTGCTTATTACAGTCGGTGCATTTTTACCC CACGGATCAGAAGCTTTTATAGGCCAAGTGATGAGAGACCATCTTCTACATTTCATTTGCTGATTGTGACTCATCAC TGATGATCGATGGACTGCTGAACTTTTTAATTCCTGTTTGCTTGTAGAGAAAGAAAATTCTCATCTCTTTTGATAGG TCCTACTCCAAAATTCTGCAGCCGTTTTGTACAATCATAACCTTACACGATATCACACAAAGGCAGAGAAACGATTG CATGGACATGCCTTCCTGTCAAACGTGTATGGAATCTGGCCCGTCCTAGGCTTATCTCTTTCCACCAGGATTCTTCT TCCCATTTTTCTCAGCAGAGCATCTTCACGTAGTTCACATGACATCAGAACTTCATCAGGATGTAAGTTCCTGCAGA AATAGGCCTGTGTCTGGTCAGTAAACAGAGAATGTAATGACATTCCCAGAGCATTCACAGGCCAGAGTCTGGTGTCC TCCCCAGCGTCCAGCAGGCTGCGGATGGATGGCATGCAGCTGACAAGATTGATACTGCATTAGACATTCCTGGAGGT CCCTGCGGCTGGGGACTGGCACTCGCAGGCCTCCCCCTGCACACAGCTGTCTTTGGAGAGCACAGAGCAATGGGAGG CGGTTTTGTTTTACTATTTGCCATTTAGAGTCTCACTTTTAATTTATCCTCACTCTTTAAGAAATAATTGGTAATTT ATTTCTTAGAGATCAAATGTTGCTACAAGCTGAAAACTGTTTTATAAATATTTCAGGAAACTTGAATGCCTGGAATT TTCATCGTCACGCTTAAGTCTTCCTCCAAAAGGGGATGGACTTCGTTCCATCCCGCTCCAAAAGCTGGTCCGATTCT TGCCTGGGTGTTGTATGCTATTTGCCTTTTCCATAGGCTCCAATAACAATAAGTACATCTTAAAATTGATGAAAGTT TAATGAATGGCTAGCAAGCAGAGAGACTACTTTTATAACAAGATTAATACCTTGGCTCAGGGGACATAACATTTTAG TAAAATCAAAATTTGTATAGTTATCCTAGCGGTGCTTGCAACCTCTGGCTTCCATATAAAAATGTCTAAATAAAATA CTGGCAGCCGTCTCTAGCCATTATTTCCATCTGCTCTAGGTGGCCTGACCCGGAACCCACTCAGGGTGGTGCACTCT GGGCCGGGGTCTCTGGGATTTCTGTCGCATCAGCTTGTGCAGCCGTGGAATGGGGATGGGGCACTGAGGCTAGCTGT CCCGTGCTCTAGAGGTTCCTGGGAAAAAAATACAGAGAGAAATAACTCACAAGGGAGCCAGCATTTGGTGTTGTTTT AAATAAATTCATTCATCATCTATACCTTTTCCCCTTTTAATTACTACACTTTAAAAGGGATCTTGGTATATATTTAT TTTTGTTTTGTTAATTTTTTTCTTTTTTAAAAAATTAATTGTAGAGATGGGGTCTCTCTACATTGCACAGGCTCGCC TTGAACTCCTGGCCTCAAGTGATCCGCCTACCTCAGCCTCCCAAAGTGCTGGGGTTACAGGCATGACCCACTGTGCC TGGCCAGTTTTTTTTCCCCCTTTTTGGCAAGGGAAGGCTATCGGGGTAGAAGTTCTGAAGCAAGTACTCTGAATGGT TTCTGATTTTAATAGGGGGAGCATCATTTCCTGATCTAATTTATAATGTGATATAAAGCTGCTGGCCAGCTGACACT AATCTTAATTTATGATCTATTTAACCTTTATATTTCCTAGCCACAGCTCGTACCACTCCCCCGTCTCTGCACCAGCA TGTTTCAGAGGCAGGCAAGCAGCATCAGTTCTGGATCCTGGAGGCAAGGGGAGGGTTTTCACGGAGGGGCGGTGCAC AGCTCTGTGCCTCCCCGGTCAGCTGGTCCGGCACTGCAGTCAGCAGCAAGGGCGTGGTGAGGGCCCTGCAGATTCTT CACACTGTCCTGGTCCTCTCTCCTGTTTCTGAATGGCAGGACTTTGGGGTCAGATTAGACCCTGCATGTACATAGAT GACAACGGAATGGCTTTTTGGGGGGACTTTTTATTTTGAGATAAATTTTAGACTTGCTGAAAAGTTGCACAAATAGC ACAAAGTTTCTGTATGCAGCCACCATCTGGTTTCTGCCAGCACTAACACCTCACACTTACCACAACCAGGGCGCTAA CACGGGTGCACTACTGTAAACCTTGCCATCTCTCCTTTGTCTCCTCTAGTGCAATGGTCTGAATTTATGCTTCCTCC AAATTCCTGTGTTGAAACTCTACCCCCATGGTGATGGCCTTTGGAGGTGGGGCCTTTGGGCAATGACTAGGTCAGGC TGGAGCCCTCAGAATGGGATTAGTGTGCCTATAAAAGAGGACTGAGGGAGCTCACTGTCCTCTTCCACCACGTGAGG ACGCGGCGAGAAGGTGCTCTCTGTGAACCAGGAAGAGGGCCCTTATCAGACACGGGCTCTGGCGGCACCTTGATCTT GGACTTCACAGCCTCCAGAATGTGCGAGATGAATTTCTGTTGTTTACAAAGCACCCAGTCTAAGGTATTTTATTCCA GCAACCAGAAGGAACTAAGACGTCTAACTTGTGACAGTTCCTCTTGCCTTGTTTTTTGTGACCCTGGACCCTTTCGA AGAATACTGGTCAGGTATTTTGTAGGATGCCTCTCGTTTGGGTTTGCTGATGTTGTCTCACAGAGAGACAGAGGTTA CGTGTTTTTGGTAAGAAGGCTCAGAAGTGATGTGCCCCCTTGGGCCATCCTGTCCTGGGGACATATGTCTGTCAGTT ACTGTGATGTTAGCTTGGTCACTGGGTATGGTGAATCTCTTGTGCATTTCCTCTTGGTAATTGAAGTTTTCCCATTG GTAATTAATACCTTGGGGGAGATATTTTGAGACCATTTTGGTTCTGCTCAGGCTTTCACCCACTCATCTTAGTGACC GTGGGTGTGTCTTGCCTGTGGCAGTTATTACTGTACTGTTTCCCTAATGTTTGTATTTCCCTCCTTCCCTTTTCATT TACCAACGGGAACTGTTCTGTAAGGAAGAGCTGTCTTTTCTTTCCCTTTTATTTATTAGTCATTGAATTATTCACAT CAGCGTAGACTCATGGATATTTATTTTAATTTCTGGGGTATAGTCCAGTGCTGTCTTTACTTAATTTTGTTACTCAA ATAGCCCCCAGTTTGGCTTTTTGGAAACTCTTGGGTTTGGCTCCTATGTCTTTTGGACCTGCCCATCGTTTTTCTAG CGCTTTCCTACTTTCTGGGATCATAGTATGATCCAGGTGTATCTTGTGTTTTCCCTGCCCCAGCCCTGGATTCAGTC ACTTCTCCAAGGAGCCTCTCTTCCTTTTAGCTGGAGGATGATGTTTAGCAGCCAAGATCTGGGTGCTGAGTGTGCTT GCTGCTGCTGAGTCACTGCTCTTCCTGCCCTTCTCAGTAGGGGGAGCTAGGGGCTGTATGTGTGTCTACTGACCCGT GCATCTGCATTTATTTCTGTGTCTGCTGTCTGCATGCATGTTAAAAACTGCAAGTTCATCTGATGCCTCTAACTTGA ATTCATCACAGCAGGTTTTATTCTAATCTCTGCCTTTCCTCTTTGTAGCTGCCTTCTCCAACATTGAGAAACCTGGC CCTCTTTATCTGCAACATGTTTGCTTATATGGTGGCTTCCTTTAAAAAGAATCTGGTAAAACCTGTGTCATTGTGTT TCAGCCACTAGATGCAGATGAGGCTTAGTAGGAAAAGCCCTACTTGTGAAGAACAGTATTTCCTATGCTTGCTTGGT GGAAAAAGTCACAGAATTTTCTATAGAATTCTCTGTAAACATGGTTAGGAATATAGGGTTGACATTTGGACTCAAAT AGAAAATGAAATCCTTTTGTTTCATTACTTATTTCGTTACTCAGCTTTCACCTTGACTCTTGGAAAACTGATGGCAT GTTTCCAAATGGATATGCCAGCTAATTAGCTTATTTCTCAAATATCCATGTTGGATGTGGAAAACAAATAAAAATAA AGCAAGGAAGACCCTCTACTGTTGTTATGTGAAGAATAACAATTACCTTTAATAGCATTTTCTGCTAATTTAGAGAT TTTTCTTTTTCTTACACTTATTTTCTAACTCCTATGATTTGTGTAATTCATATCTTATACCTACATCTGATTCATTA TGATTCTTAATTCTCTTTGTTGTAAACAGAAATATTGAAAATTCATTCGATGAACCTAAAACCCTTTAAAAGGTCTG GTTAAATTTTAACATTAAGGGTGATACAGTATTCATGCTATAGAACACAGACAGTCAGAAATCTTATGAAGTGTTGG AGACTTTAATGGATACTGTACTATGTAGAATCTGATCACGAGACTCCTGCTTCATCACGTTTTTACTCGAATTGGGT TTCCTGGTGACAAAAGACTGTGAAGTAGCTGACGGAAATACATCCTTATGTCAGTTTTCACCCGATGACTGAAAATT GTTGGATATATGCGTGAAATAATTAGGTCTTATTTTTGGAAGGGAGAGAATATAACCGACTGAAAAATAATTTGGAG TTAATTGTCCTGAAAATTCACCTACTGTATATTAATAGGTTAGGTGTTTCCTAATTCTTTCTTTCTTAAGCATATCT TCCTTTTCCTTACACTCTTTTTGACACAAACTTTTGAATATGGACTCACATTATAAATCTTGGGATTGGAAAGGCCA TAAAGATTGGATTTTTAAAACTTCAACAATGTAGAGGAATACCAGTGTTGTATTTGTTCAGAAAGTCCTCATTGGCG CTGATTTGGGCACCGCCTGGTTTCCTACCGTAGAAGCGTGTGCTGTGGTGGGGTGAACTGGGGGGGGATTCACACC AGCCTGGGCCCTGGGCCATGGGGGGCTGCCTCCCAGGGCTGCTTCAGCCGACAGGAGGGTGCGGTGGTGAAGAGGCA GGGCTCTGGGGATTGGAATCTCCACGCTTGACTTTAGGCTTCTACTGCTCACTCGAAATGGGACCTGAGGCAAATTA TTCACCTGCATTGTGCTGGGTTCCTCACCTGTGATACATGGATTATAATATCATCTCTCTTCATGGGTTATTGTAAG GATTGATTTTATTAATATTTCGAATGTTAACGTTATTATTTATTTATTTTGAGATAGAGTCTGGCTCTGTTGCCCAG GTGCAGTGGTGCGATCTCAGCTCACTGTAACCTCCACCTCCTGAGCAATCCTCGCACCTCAGCCTCCTGAGTATCTG GGATTACAGGTACCCACCACCACACCTTCCTGATTTTTGTATGTTTTTGTAGAGACAGTGCTTCACCATGTTGCCCA GACTGGTCTTAAACTTCTGAGCTCAAACTATCCGCCCGCCTTAGCCTCCCACAGTGCTGGGATTACAGACATGAGCC ACCGCACGCAGCCCAAATGTTAAGTGTATGACATAAAATTCAGGGTTACTTTGCCTAAACAGTTCAGTGTCTCTGAT TAATGTGATTTCTGTTTCACTGACAGCTTTCATGTAAATTTAAAACTAGATAGAATTACAGAGCTTCAGAGTTGTAC AGACTTGTAGAGGTAAAGTAAAGCCAAAACATTGAGCTCAGTGACGGGGTCAGTCACTTCCTGGTGTCAGAGTCCAC TGACAGGCTCTGGCAACTCTTGCATCAAAATCCTTTGCACACAGGTCCTTTCTTGCTCTTAGCCAGTAGCAGCTGTC CTGGGCAGAGTTCCCTCAGTGAACCTGGAAACGGCAGTGGCTGGAGGTGAGAGGTGTCCATGTACTCACTTGTTCAA AGTTGCCCCCTCTTCCCTCTCTGGGCTTGGGCCCTGATACCTCTCAGAGCTACCCTGCCTCCTGCGGGGGTGGGGGA GGATGCCTTTATTATCTCTAGGCCAAAGGTTGGACCTCCACATATGTCCATGATGAGGGACAGCAGTCATCCCTTTC AAGACCGAGAAAGTATTTAACTCCTTGGAAAATTGAGGGTTTATTTTGCAGTGGTTTGGAAAATGTGCTGAGGGTGG CTGTAGAGTTAACTAAATAGAATGTTTCAGAGTCACAGAGATTTGTAATTGGTGGGCTTGGTTTGTTTTTATAGTGC TTACTCCTTTTTATCTGCCTTGTGGATTTATGCATTTATTTGATAAGTCAGTCATTTACCTCCCCATTCTTTGGTTT TCATGTTTCTGTTTATCATCAAGATAAGCAACTGTGGGTTTTCTTCCATCGAAGCACCTGCCGCAGGTGATGATTTT AATGGTATGACTGCCATGGTCACCACGACCATTCCGAGGACTCTAAACATGTTTCTTGTCCAACACTACTTTAATTT GAAACAAAGCCTGAATTGAGCAGCATTCGTGTCTGTGGTAGACCAGGGAGGCAGGGCTCACCTCTGTTTTCAGTTCC CCTTTGCTGGATGTGCAGGAGGACTGCCCCGTTCCACTCCTTCAAGGGTGGCTTGGTCATGGACTTGGTTTGGCTAA TGAGCGTGGCCTGGAGTGGCATGTGGTGCTTCTTGGTAGATGTGTGTGCACACCAGCTCTTGGTTCTCCCCATGTGA TACTGGGACAGCTGTGGGATGGGATGGGCGCAGCCTGTGGCATCAAGCTTGCATGAATCAAGGCCGCTGCTGGGGCT AGCCCAGACCCGTAGTGGGTTTGGTGGTGGTTGTTACTGCAGAGCGTCCCAGCCATCCTGACTAGTACAGCGTGGAG TGTGTCTATGTCCTGGAGCTTGGGGAGAGTCCTGGCCGCAGTCCAGGCTTTGAAGAATGTTGACTTGACCTGGAATA CCCACCTGTCCCTGGAGTGCTGTGTTCTTAGGCTAGTTCCGTAACCTCCCTGTCTGCTTCTTCATCTACACACCATT TGATCTTCCTTAGGTTTGCTGTAAGGAGTAAATGAGATAACGCATGTAAAGCACCTGGCCCGGTGCCAGGCATATTT AGTTAATACGTTGCGTTCCTACCCAGCTAGACCTTTTAACAGTCCATTGGCATCAGGTCACCTACAAAAAGGTACAG AAGCTGCCTTTCTCTGTGGTATTTGCTTTTTGATTAAAAAAAGGAAATAAATGATCACATAATTGTTTTATTTTGCC TTAAAAAATGAGTAAAAAAAAAATGTGGCTCACATATGCCAGAGGTGTGATATGTGAGTCGTCTCTCCCTGAGGAAG GCTGCAGCTGAGGTTGGGGGTGAATTTTTTCCCCTGCATGAAGAGGGGTGACTGGGGATGGGGCCGCCTCCCTTCCT AAATTTCCGTGCTCCCTGTTGGTGTAATTAACTTAGGGGAAACCACACGTGGGGATTCAGGGGCTTCTCCCTTTATT CTTTTCCTTAAAATCAAGTTACATTTTTTTTTGAGCAATAAACTTTAGAACAAAATGAGGAATAGAAAACAAGATGT CGAGACAAACAAGCCTTAGCGAGGCAGCTGTTAAAAGCAGCCGGACCCAAACAGAGCATAAAAATGCATGTAGTCCA GAGAAGCACTTTTTCTTTTTACGGCTCTACCCCGTATTTCATTTATATTTAAAACTGAGTTGACGAATATGAATACA GATATTTAGAGTTATTGTAAAGTCGTATTTGTTTATGTGCGTGGTCCAGTTTCCAGGCCATATCTTACAGTTTAAAA GGGAGAGCAGTTAATGGTTTCGCCCACACTGCTTGGATTTTTTTTTTTATTATTATCCTCCAGCTCCTATTCTTCAG GTGTGCAGCTATTTTAGTATTATGAAGAATGATGGATGATGCAGGAAAGTTTCTTTGGAAGCACTTCTGATATTGTG CAATGCACTTGGGGGTCAGCTACACTTGACTGATGCATGATTTATCCAATGTCCCTGCCACTTCCCGAGATAAAGCT GCTGCTTTATCGAAAATGCCAGCAACTGTGATTTAGAATTTATAAACCTCCGTTTTCAAATAATTGTTCTGATTACT TTCTGCCTTGGCAATAAAATGATAAAGGTAATTGCACACAAATGTGAGATAGCACCAAAATACAATAAAATTAACCT GAATTAGCTTGACTTGTCGATGAGAAGTATTTATGAAATGTGGTGTTGCAATAAGGGAGGGAGAGTGATATTATGGC TGGAAGGTGAGTTATTGCTTTAATGTGATACTCTTTGAAATTTAAAAAAGAGACTGTTTCTGTTGAGGGTGATTGTG CTTTTGAAATTAAGTTGAAGTGATTCTTATAATTGGCAACGAGAATGCATTTTGAAGGTAATATCTTTTATTGTGTT ATGCCTAGTTGCATCACCTTTTATTTAGCTGTTTCTGGCTTCAGCTTTTCTAATACTCAGGTAGAAGCAGACTTGGA ATTCTGTCGGATCCAGGGGCTGAAATGTTGTATTCTCTTTGTAGCAATGCCCCTGGTCTTAATGTTACAGACTTTTT CCTCCTACATTTGATTAAATTGTTTAGATATCAAAGGTTAAATATTATAGCTAGTTAATGTTTTTTTAAGTTTAAAG GCGGTTTTAGAAATGTGTTTTGTTTCCCTGTCTTTGTGTGCACTGGGAACATCTCATTGTAGCCTGATGGTTTCAAC AGTATCAGATCAGGGTTCCATGTCTGATACCCATAGTTCGTAATCTGCCTTTTACATTCCTGAAATGAAATTCCTGG ATAATATCCATCTACATGTACTATTTAAATGAAACACTTTAGGAGCAGTAATTTATAATAAAATAACATGCCTTCAG AACAGGAATGCTTGGGCAGGACTCTGCTAGCAGACATAACGTGGCAATCAGGTGTATGTACCTGGAACACAGCAGCT GCAAATGGAGATTGAGACAGTTTTGTTTATTGGACATTCATCATCTGGTCAACGTTGACATTGGTGATATAATTTTT CCAAAATGGTGGACAGCTTTTGTAAAGTTTCAAAGAAAATGAAGTTCACCTTTCCATTGAGTTACAGGATAGTTGTG TTCTTAGAAAACTTTGTGTAGAGAAAAACTGTGCAGAAAATTTTGTGTTTGCAGTAAACAGAATTCTAGTTTAGGGT CTTATGAATTTTAGATTTGAATGTGTTGCAGGACAGTTGAAAGTGACACAGGTTGCAGGACGACACTGTTGTTTGGG ATGGGAGAACATTCTACATTCTTGATTCCCCCCTTTTAAATGTCGATAGCTCCCACAACCATTGTGACAACTAAAAA GTGCTTTCAAATTCTCAATAACCCCCTCTTGAGAAGGACTAGAGAGGATGCCCTCCAGAACATCCTCCCCTGGCCAG ATTGTGATTAGATCAGGAGCTTCCCAGCACCCTCCTGCTCAGAGAGCCTGTGCCACCTCACATGCCACCATGGGAAG CCTGAGATTTTGGTTCCCACTGTTGCCTGGGAATCCATTTCCAAATGAGTGGGGAGAGAGATGTCATCAAAGCTGAG AGTCCTTGGCAATTGATTGTACTGTAGTGCCCTCCACCACCTTTAGGACCTGATTTTGTCTAGCCTAGGTTTGTGTG AATGTGGTAGGGTTTTTTTTTCTGACTTGGTAATAAAGTTTGTAGTATTAGTGACTTGTAGGATATCTAACAAAGAT GAAGTTTTGGAAACTAAGGCCAACTTTGGAAAGTGTTATAGACTTAAAATTGCAGCGTGTGTTTCCCCCTGTTGACT TTGGGAGTACAGCACTGGTATGCTGTTTTTCCAAGGAGAATGAAGTATTGGGAAAGAATTGCTCAGGAAAAATATAA CTAGTAGGATTTTTTCCAGAAATAATAAATGGAATTGAGAAAATTGAAGTGAAACAAGATTCTGTGGTAGATAAATA TCTCTTTTAGTCCCCCAACCCCACTTTTATTTTCTAGTCTATTGATAAACTGTATATTATTATGATAGCCTACTTTG ACTCTTGGTTTGTAAAAATGAAAGTATAATACAGGCTTTATGATTAGGCTAGTGTGAAGTTACATGTTAAAATAGGG GGCTGACAACATATCAAATACCTGTGTAATTTAATATTATGTGATAAATATGTAAAGTAAAAACTGAGATTCCATTT TTTCCAACATTTTGACTTAAGGCTGAATTTTAGGGGTCATTAAATTATCATGGAGCTCAGATAGATACACGGTGGTT CTTTGTCTTACTCTGGGTGTGAGCAAGCTGGTCTTTTCCTTCTTTAAAAATGGTTGAGTTACTTTCTGTCTGCATCT GATACATCCAGTATCTCAAGTCTTTGCTTGCTTATTGTACATTCATCATCTGGTCAGCATGGATATTGGTGACATCA TTTTCCTAAGATGGTAGACAGCTTTTGTAAAGTTTCAAAGGAAATTAAAGTTCAAGAACAAGCTAATAAAGTTTTTT GGCTTGTTCTTGCTCATGGTGTCTTATTTCCATGTTTTCCTGTTTCTTTGATTATACTGGGCATCATATTTGAGAGA TTGCTCATTATTCATGAGAGCAGTGTGAAGCCTGAGGGGTTGTGCTTGTCCCTGGGGTAGTTTGATCCCTTCGGTCA GGTGCTGAGCACACCAACAGGCTTTGTGAATTGCTCAGATGGCCACGAGCTGAGACCTGCAGAGTGGTCTCTCGTCT GCAGTTGCTATTTTTTTTTTTTTTTTTGCAGCATTTCCTCACTAGGCCAGTGGTTTTCAACTGGGGGCAGTTTTGTC CCTCAGGGGAACTTTGTCATGGTAGACATTTGTGGTTGTTACAACTGAGGGGGTGCTGCCGGCATCCAGTGGGTGGA GGCCAGGGATGCCAGTGAACATCCCACAACACATGGGCTAGCCCCACAACAAAGAGGAATTCTCTCTCCTGCAATGT CGGTACTGTCGTGGTTGAGACAGTTCATTGGTCTCTGTAGAACTTGTTTAAAGCCCAGCTTGTCCCTGGCCCCACCC CGGATTTCCCTGCCTACCCTCGGTTCATCCATGGCATCCCATCCTCTTGGGCAGGATTCTCTTGGTGCCATCTTGGA CCCCTTCTTCTGTTGTGTCTTTCCCATCACCCTATGGCAAAAGAGTTTTCCATTTCTGTGGTTTTCCAAGCATCCCA CACCTCCCCTTGCAGCCACATACTTAGGGCTGGTGAAGTAGCCGTTCAGTCATCTCACTGGCTCCAGATTGTTCTCC AGGCATCCAGGGGGCATTTATGCTCATGCCCAGCGCTGGTGGCTGCCTCGATGCTATTGTAGATGTCCAAGTCCTGA GCCCTCGGACTGCTTTCAAAGCCCCAGCTGCCCTACCCTGTCCTCCCATCTCTCGTTCCTATAATCCGCTCTATCCG AAAGAGTCGACTTGCCATTTGTACAACTCCATACTTCACATTTTTCTTTTCTCTGCCTTTGTACACTCTGTTTATTC AACGTACATAGTACAAATACCTTCTTAATCTACCCCCTTTAAACTCCTAACCATTGTTCAAAACTCCTCCTCCTATG AAACTTTTCTTAGTCCTTGGATTTGGATGTTGTCATCTTCAGGGCATCTTCTCTGGGTTTCTTTGAGATCAACACAA TATAGTCAGGGCTGTGGGCCCTGAGCCCATCTGAATAGGATCCCAGTCTTCACTCTGCCACTTAGGGGCCATGTGTC CATCACCAGGTTACTTGAGATCCCCAAACCTCAGTTTCCCTGTGTCTAAAGTGGGGGTTCCAGTGCTATGTTATGAT GCTTTGCCAGGCTACAGTGGAGAGCTAGGTGAAAATGTTCCTGCGACGACCAGTTCCTGTGAGGACCGGGTGAAACA GGACTGATCTAGTGTTGAAAGGTCTCTGTGAGCCGTCAGGCAGGTGACGTTGGAGCCAGCCTCTCCAGGGTGGTGTG CGTGGTGCTGCAGTCTCTGCATTTATCCCATGTCCTTGGGTTTGGCTTCCAGACGGATGTGAATCTCCCCTCTGGAG CATGTAGATGGAGGACAAGGCCTCTGGGGCAGGGGTGGCCTGGAGACATCGCAGTGGTCTTGTCTGGTGGCACACAG ACATTTCCCAGTTTGGTGCGGGCCGCCCTGTGCACAGCTGTCCTACAGCATCAGAGCAGGCTGTGGAGGCAGGGCCA GGCTCACTGGGAGCAATGGCCCTGCTGGAGGAGATCTGGCTTTCAGTCCCTGTTCACAGAGGGTCCTGCTGAATTGG GGACAGGGGTGCCCCAGGAGTGAGCTCTGCAGTATGTAGGAAGTCCTAGTTCCGGTGCTGGGGGAGGAACGTCCTGA GAGTGGGCCGGAGGAGATGGGGATTTATGAGCTGAGCTGTGGGAAGCAGGCTTGCAGAGCCTCTGGTGAGTGGGCCA AAATGACAAATGGATTCTGTGCAACTTTTTATTGTCCAGCCTCACACTGTATTTCTTCGCGCACTGCTGTGTTTGCC AGGGTTTTGATTGTATTAGTTACTTGTGAGATGGAGAAACCTTTCCGTCTCCCAAAATAAATATGGATCTGCTTTCA AAATGTTTTAGCTGTTAAACTTCAGCAGCTAGCAAACAAGCCGAAAGCTTTTGTTCTCATTCCACCACAGGTTTGTA GAGTTTGAATCCCAGATAAAACATGTACCAAGCCACTGGATTCTGGGTGGGATACTAAGTCCTTTGCAGGGAGGTGA CGCCCTTTGTTCTGTGACATTTTTGTTTTTGAGGAGTCTCCCATTTCCTTCTCTCACCAAGTTAGTTTTCTGTCTTG GGTGGGGCTCCCTAATTCTTAGGGACCTCTGGTACAGCCCAGTAGCAGTTCTCAGCCTGTAGGTCCTAGCCCGTAGG TAGACAGATGCTGTGGGGCAGGGCCAGCCCTTTTGTGGAGTAAAAAGCCCTTTTGCGGGTGGTTCTGATGGCCACAC CACTCCAGCCCGCCTGGAAGCCGCCATAGAGATAGCTTTCACATACCTGGTGATACGTGGCAGGTCCTAGAAGGTAT GGGTGAAGGTGGTGTGTACCAGGGGTTGGCAGGGGAAGGAGGAAGAGAGGAGTCGTAGGGCTGGAAAAGGAGAAAAA AGTTGATCTTCACCTAAAACAGTGTGTTTGTCAGTTGAGAAAACTGGTTTTACACTTAGAAGTTAAAGGTGGAGTAT ATCGAGGTAAATGGGTGCTGACCTCTCTGGTATACAACAGATTTAATTTTTCTTTCTTTCTTTTTTTTTTTTTTGTT TTTTGTTTGTTTTTTTATTTCTTTTGAGATGGAGTTTTGCTCTTGTTGCCCAGGCTGGAGTGCAGTGGTGCGATCTT GGCTCACTGCAACCTCTGCCTCCCGGGTTCAAGTGATTCTCCTGCCTCAGCCTCCCAAGTGGCTGGGATTATAGGCG CCTGCCACATGCCCGGCTGACTTTTTGTATTTTTAGTAGAGACGGGGTTTTCACCATGTTGGCCAGGCTGGTCTTGA GCTCCTGATCGCAGGTGATCCACCCGTCTCGGCCTCCCAAAGTGCTGGGATTACAGGCATGAGCCACCAGGCCTGGC CAGATTTAGTTAATTTGGAAAACCCCATTAAATAGCTCAGATCAGATTGCTTACTTGGTTGAAAAAAAGGCAAAGGT AATATTTTCTGTCATGAACAAGGTTTGTGGATATTGCTAATTACTTATTTGAAAGAAATAATAAAATGAAATTCAGT AAAATCAAATAACTTGGCAGTTATTTGAAGGAAGCGGCTCTTTTCTGCTGGGCTGCGACTTTGAGGAGCAGTTGCGT CATTTCCGGGTGAAGCCAAGAGCCCTTGCCATCACCTGGCTCCACCAGGGTTCTCTGTGTGTTTTCCTTTTGGGTTG AAATTTTCCCTTTTAGCTGCATGAGATGTTTATTATTGCTACTCAGAAGTGCCTGGAATCTATATTGCTTTAAGGTG TGGGATGAAGTTTCCTTTCATGATGGTTTAATTTTTATTGCGTTCGCATAGAGCGTTGCCGCCGTTCACAGGATGCC CATGATAGTCCCGCCCCTCGAGACGACATGCAGGATTGCACCTTCCACGCCCAGCACACACCAGGCCCTGCACACGG TTCCTGTGTGCATTAGTGTGGTTGGGCTCCTTCTCTGTGTGTGTGCCTGGCACATTCGGATTTCCTTGTGTCCTTGT GCGATTTCTATAGAAAAAGGTGTGTTTTATCAAGTGGAAAATAGCTTACAGTAATGGTAGTTAATTATTTTGGAGTT CCAAGTTGTTTAGAATTGATCGAATTCCTAAATCTTGAGTTAAAATTCTACTCTAGGATGACTAAGAAAGACATGCT GTGTTTACGTGTATTTTCCAGTTTAACCAGAGGTGACTTTAGACAAGTAATTCTGTTCTGCCAATTTATTTCTCTAA GTATTGTCAATTTAGCTTTTTCATGGGATTCTGGGATACAGAGTTGCTTGGTCCATTGAAATCTATATATGTAATTT TGTTTTTAATCAAACCTAACTTCTGGGTTTTAGAAAGCATCTCCTGTCCACAGCTTTTGAGAAAGGTCCCGTAAATT GGATGACACCAAATGGCTCCAGCACCAGAATGAAAAGGAAGAGCAGCAGAGACTTGGGGCACCCACCTGGGGGCTGT TTCCTAGTGCTGGGCAGAATCCTGGGGTCAGGGTTGGAGGGCCTTAAGGCCAGATTGGAGGTGGGAGCATGGCAAGG TTGCCGTGCCAGGATGCACAGTGTCCATCTGGGGTCCTGGAGCGGCCTGGGTTCTTCCCGCAGGGTGCTGTCCTCTG CCTGACAAGTCCTGTTCCCTGTCTCCTCGGGAGAACACCAGTACCAGGACTCCAGGAGTTGCCAGGTGGGGGCATCT AAGGAAAGGAAATGTTCATGGGATGCGCCACAGAGATGATCCCTCGGAGAATATTTTCCGGTCTTTCATAGAGGCTA AAATATAACATAGTTGTTAGAAATATGTGGTTTTGTAGGAAGTTACATACCTTGGGGAAAACGCTGGAATTGACACC TGAGAATGGGTGAAATGTTGGAAGATGTTGAACAGGTGAGAGGACTGAATCGGTGCAGAGCCACACCTGGTGGTGGG AGCACGTTGAGGGCCTGCGGGTGCCCTTGAGGAAGGGTTTTGGTGGATGACAAATATGATAGGAACCACGTGTCTTG GGGAAAACACTGGAATTGATGAGTGAGAATGGATACATTATTGGCTCTATTGGAAATTATGGCTGACAGATCTGAAG CTCTGTCATGCATTGGGGGCTTGCTGGTTATTTCAGTTTAGTAATTTCATTGATCTGTAACAGATATGTGTCAAAGA GTTTTAGGAAGTTGATAGAAGTGTACATATTGATGAAAATAAAAATTCGTAAGAAATAGATGATGGGTTCAGGTACA GAATAAGGGCAGGAAAATAAATGAAACCAGTATACCAGATGCAGGCATGTGCTTCCCATGATGGGAACCCCAGATAC CAGACGCAGCCAGATGCAGCCACGTGCTTCCTGTGATGGGAACCCGGTATACTAGACGCAGGCACGTGCTTCATGCA GTAGGAACCCCATATATCGGATGCAGCCACATGCTTCCTGTGATGGGAACCCCGTATACCAGACACAGGCACATTCT TCCTGTGATGGGAACCTGGTATACCAGATGCAGCCACGTGCTTTCCGTGATGAGAACCCTGTATACCGTCCGCAGCC AGACACAGACACGTGCTTCCTGTAATGGGAACCCGTATACCAGATGCAGCCTGGTGCTTCCCATGATGGGAACCCCA TATACCAGACTCAGCCACGTGCTTCATGTGATGGGAACCCAGTATACTAGATGCAGGCACGTGCTTCATGTGATGGG AACCCGGTATATTAGATGCAGGCACGTGCTTCATGCAGTAGGAACCCTGTATATCAGATGCAGCCACGTGCTTCCTG TGATGGGAACCCCGTATACCAGACACAGGCACATTCTTCCTGTGATGGGAACCTGGTATACCAGATGCAGCCACGTG CTTTCTGTGATGAGAACCCCGTATACCATCTGCAGCCAGACACAGACATGTGCTTCCTGTAATGGGAACCCGTATAC CAGATGCAGCCTGGTGCTTCCCATGATGAGAACCCCATATACCAGACGCAGCCACATGCTTCATGTGATGGGAACCC CGTATACCAGACGCAGCCACGTGCTTCTTGTAATGGGAAACATCTTTGAATATGCCAGGAATTAAGCAGTGAGCTTC TTGATGGTCAGAACACTGATGGCACCCAAAGTAGTTGCGTTAAGCCAGCACCAAGGTTCTGGGTTGTGTGTTTTGTT TAACACAGCCATATTCACCTGGCCATCAGTTTTTTAGTGAGGAGACCTTCCCAGGGCTATTGGGGATCAGATGAGGG GCCTAGCATATACTAAGGGCAGAGCTCTGAATAGGTTAACAAGAGCCCTAGATCCCATTAGAGCTGGGACTAGTTTT ATCTGTGCAGGCCTAGAGCCCCCCTATGCAAAGTGGCGTCTGGGCTGGCAGCATCACCTGGGCCTACCCACTCCTGC TGTATCGGAATCCGCATTGCACAAGCTCCCAGCACTGGCCGCTGTGGAGGGAATGGCGCTGTCTCGTGGTACCTTCT CCCCAAGGCTGGCTGCTGCTCTTCCTTAGGTCTGAGTCTGGCTGTCCTCTTTCCAGGTCGAGGATTTAAAGCCGCCT AGCTCAGGGCTCAGTCCTGGGTGTGTGGCTGGCCAGGAAAGGGCAGTGAATTCAATTTGCTAAGTGTCTGCTCTGCA GATGCAGGATGCTGGAGATGGGGGGCGCAGAAAGAAACAGGCCCTGATTCTGCCCTCGCACGTGGTGGGGTAGAGGC GGCGAGGTGTTGGCAGCCATCCCTGCTTTAATTGACCTGAGTTGTCATTCCCTCAGCGATCAGTTTCACCTGTTTGC GGACTGCCTGTAGTACTGCTTGCTTCTTGTTTTCTTTATATCAACTTATTTTTAAACACCCGCTTTAACTTCTTCCT AAGGAATTGCAGTGAGAACAAGTGTTTGCTATGCTCATTTTGTTTATTCTGTTACACGTTAATTTAAATCTATAGTT AATAAACTAGTGTCTCAACTAATCTCACCACCTGAGGCGTGTTCAACACCCTAGAGTCAGACCACAGCCTCCCTGTG ACTTCCCCACACCAGGTCTCTGGAAGGGTCGTTCTCATGCCTTTGAGCTTCGGGTCTTTCATCATCAGAGGAATGGA CTGTGTCTCATTTGCAGGGCTCTTGTAAGGATTAGAGAAGAGGAAAGTGAGTGCCTGGCATGAAGGAAGTACCATCA ATGTCACTAAACAACTCTTACTATTAAGTGTTTCTGAGTTGAGTTGTGGCTTAGCGATGCGTGAAGCAGTTGTTGAA TTGTAGTCTGTGCCGTTCAGTGCCTTGAATATAAGTATATTTGATAACGTTTATGATAAGTGTTGGTGAGGATGTGG AGAAATTGGAACCCTGTGTGTTGCTGGTGGGAATGTGAAATGGAGCAGCTGCTGTGGGACACTTCTGGAGGTTCCTG AAAACATGAAGCATAGAATTCCCATGTGGCCCAGCAATTCTACCCCTAAGGACATACCCCCCAAAATTGAAAGCAGG GTCTTGAGTAGATATTTGTACACTGGTGTTCATAGCAGCATCATTCACAGTGGCCAAAAGGAGAACACACACAAACG TCTATCTGTGAGTGAACAGATACATTAAATGTGGCCTATCCATGCAATGGAACATTATTCAGCCTTAGAAAGGGTGG GAATTCTGGCACATGCTGCAACATGGACAAACTTTAAAGACATTACGCTGAGTGATATAAGCCAGTCACAAAAGGAC AAGTACTATATGGGTCCACAGACATGAGGCACCCAGAACAGGCAGATTCAGAGATCAAGTAGAATAGTGGGTGCTGG GGGGTGGGGAGAGCTATTGTTAAATGGGGACATAGCTTTTGCTGAGGTTAATGAGAAAATTTTGGCTATAGATAGAG GTGATGGATACACAACTTTGTGAATGTATTTAATGCCACTGAATTACACACTTACAAAATAGTTAACATAAATATTG CATTTTGCCACAATAAAAATATATTTCCTAACATTTAAACAAAAGGAGTGTCTGGGACGTTACCTCTGACACACCTG GTTATTTGGCACCACCGGCGACCCCTGGCTGCTGGCAGGTGTCTGGAGCAGCAGCTCAGAGCAGGAGGCCCAGAATC CACAGTGCCAGGTCTAGGAGTGCAGGGGTGTGGCAGGAAACGTGACCCCGCGGCTCCTCTTCAGAGCCTCGGGGACC ACCAAGGCAGTTCTTGACACTTTATCCTGGCCTTGGTGTTCAGCATCGGAAAACAAGGAGAACTAGAATGTCTTGAC TTTCTAAAGGTTGTTGTAAAACAAGGGAAGGCCATGATGCAGTGAGTTTTATCACACTCTTGCTGTGACCTTCATGA GGATGTTGGAGCGTCTTTTCTTCATTGCGGACAGAGGCTTCCAAACTCCACGGCTGAGCCCCAGTTACAGTCAGTGT GCAGTAAGTCCTGTGGGTAGTCGTAGAAGTGGAGAAAATGGCAGTATCTTTTCTCTAAAAAACGTTTACAAACAGAT ACTTAATGTGAGTTTGCTTGCTAATAGGTTAGGTTCTTAGAGTTTAAAGAAGTAGTTAATTATCAAAGCTTTTTCAT TCTTGACAACCAGCATTTTTCCTCTAATTCAGGCTACCTTTGAAATGAACACTGCAGATCTCTGAGATTTTCATCTG TGAATGTTGTTTGAAGAATTCATTCTGCTGCAATTTAGATAAAATGTACCTGCTGAATTTTGTAATAACATTCACAA AGTTTTATATTTTTGTTCGTGTTTGAAATATACAATAGAGGTTTTCCTCGTGATAGTGAGAATATATCAATATGAGA GAGATACAATTATATCAATCAATTATTTGAACAAAGATTGGGTATTGTTTACATATAATTTTGTAATAATTCCTATT TCCAAGGAAGAACAATGCACAATACTTTGTCATTGTGTCATTTATTTTTATTGTAGTCTTTTGTTTTTATTGAAACA TAGATTCCATGTATAAATGTGGATTTTATGTATATCTTTCCCCGTGTATATTAGAAGTATTTCAAATCAAATAATTT GGCCAAATGATTTTTCTATATTAAACATTATATTTTCATTTAAACCACTATAATTTCTCCTAGTTCAGTCTGATTCC TTCTTGCTTTTTTGCATACAGTGAGTACTATGGTCCAAATGTTTGTTCTCCCACAAAATTCATGTTGAAACCTCGCC CGTAAGTTGTTGGTATTAAGAGTTGGGGCCTTTGGGGGGAGATTAGGTTAGTGCCCTTATGAAAGAGACTCCAAAGA GGTAGAGCCCTCGACGATTGAGGATGCAGCAGGAAGGCGCCATCTGCGAGGAAGTGGGGCCTCACCAGGCACTGAAT CTGCCGGCGCCTTGGTCTTAGACTTCCTGGCCTCCACAACTGTGAGAAAGAAATGTCTGTTGTTTATGAGCCACGCA GTCTATAGGATTTTGTTATGGCAGCTCAGATGGCCTAACACAGTGAGCATGCCCCACCCGGAGATGGCCTTGCCCCT CTTGCTGTCAGCATCAGGACTGACAGAAGCTGGGCCCATGCAGATTTTCCGGAAGCTGTGTCAGGTATTGGGGGTCA TTGGACTCTAACCAGTACCCAGCAGACAGATGGGACCTGAGAGAAAGGGTTGGGGTCTGCCCCTTCTCCGCTCCTCA GCTTCCTGCAGTGGCTGGGGGCAGGAAGGAGGGCACAGTTCAGGGGATTGAGAGACGTGTGCTGACTGTCCAGCAGC AGCAGATCCACCTGCAGGCACAGTGCAGCCTGGTGTCTCGTCTGAGAGGACACGTGTGCAGGACAGGGGGACCCAC AGCTGCTGCTTCCCCACTCGCCAAGGCCCCGTCAGGAGCAGCAGCTGCGGCCCTGGGAGCCCACAGTCCAGCCAGGA GGTGGTGAGCACAGGGCGGAGTGTGGGGTTGGGGACTCCACTTGTGGTGTTCCCAGATTTGGGGGATTTCCGCAAGG CCCCGTTGAAGGGCAGTGCTCCTTAGATACAGTGCAGAGTCCTTGGGGTGAGGGTCCTGTCTCATTACTTGATAGCA CGTGTCCTGTCTCATTACTTGATAGCACATGTTTCAGCTGGCTCTTTAATGGGAAAGTTGGTGCTTTAGTGGAAGCT CCAGTCCCCTAGATACAGAGTGTATTGCGGATATTTATCCCTTCCTGGCTGAGCGCGGGGCAGTTTCTGCCTGCAGA TTTGGGCTCTGGCTCTGGGTTATGGACCTTTGAATGTGGCCATGCCAGAGTTTGTGACCTTGACGTCTTGAGGCATC CTGTAAGTGGTATGACCTCAAGGGAAGAAAGCTAGCGTGGCCTGCATACAGGTGGGCCTGTGGACTGTAAAAGCAGG TTTACTTAGCGGGAGTAATTACCCATGTTGATGACAGCCTCTAACAGAGGTGCAGTCTTCAAATTCACATTTAAATG TCTCTGCCTGCTACTGAGAAATCCACAGCAAGGGAAAAGAGCAAAACAGTCTTTCTGTGAAGGGTCTGTTTTATTTT TTATTTTATTTTATTTTAATTAATGAGACGGTGATCATCCAGGGAACAGGATCTAAACGCAGTCTTTGAACTTGAAC TCTGTATGTGGTGTCTACAGGTTTGGGTGTGAGCAGCCTCACTCTGTGCTGGTTCCCAGCTTAAACGTCCAAGGAAG AGCTCATGACAGTTTTTATATTAGTTCTTTAAATATTTTATTGTAAGTTCGTCTCTTCCCAGCCCCTCTTGCTATTT TTATTGCTCCATTTGAAGTTCCAGCCAATAGCCCAGGCCCTTTCTGTCTTTGATGTCTGTATGGTGGGCAAGATCTC ATCACGACCCACATCAGCTTTGCTGTTAGAAACGTGTTGCCACAGAGGAGCACATTCATAATTGAAATCACCAAATA GGGAATTCTTTCTAGAGGCAGTGGCTGCCTCAGTGAAACGTGCATGGCTGAGCAGAGCAAGGAAGAGTTAGTGGGGC CGGGGGCGTGCTGATATCACAGTGGCGTGGGGGGGGTGAAGGGATACAGGTGTGTCCCTCCTCTTACCCGGCATGG TGTTTCCAGAAAGCAGATGGGAGAGCTGTGTGATGAACAGGTGAGACACTGGCTGGACCCAGGTGAGCTGCTATAGA AGCAGAATCAAAACCGTGTAGCACGTTGCCTTCCCTTTCCCAATACTGTAAAGAATTCCTCTTCAATGGAAATCTAC TTCAAACTTTTATCAGATTAATTTTAATAAAAAGCTGAATCAATACGAAGCAGCTTGGGAAAACAGCTTTCCCCCAC CCCAGCCCCCACCACCAATAACATTTTACAGATTCAGGCCCAGTATTTCTTGTTTCTAATGAGATGGAAGGAGCGGT ATTCTTGGCACCTGCTCATCTCCTTCCCTTTGGAAACTCAGCCAGGTTTTTGTCGTTAGCTTATGGGTCGCTAATGT TATGTGCACTCATAGCAGAAATGGAAATCCGCCATCGGTGAAAGTGGAGACCTTTGAGAATTTATGCAGCATCAAAA TGTAAATACCAACTCTTATAGAATATTGGGGTTAGCAATGTCGACAGTTCTACCCCGAGTGCGGTTGGTGGTGGGGC TCCAATGGAAACAAACTGGTGTCCAGCAGTCAGCTGTCTGCGCATCCGTCCCTCCCACTCCAGCTTCTCCAGGTAAG ACTGGCCATGTGAGCACAGAGGGTAGAAGAAGGCCTTAGGGACACCTTAGAATGGGAGGAGAGGTCATAGCTGGAGC TCCGCTTGGGGGTTTCTGGTGCTCCGCCCATGGCTCCTGGACAGCGAGGGGCAGTCTTCTGAATGGACCTCAGAGGT CCTGTGGTCCTCTTTGGCCAGAGGGCACGGGCCCCCTTAGCTCATTTCTAGTAATGGGATGGGTGGGTGTTAGGAGG AAACACGCAGCCCAGCACAGGCTCCCCAGAGCACATCGTGAATCTTTCTGTCGCCTCCCTGCCCCACCTCACCTCTG TTCTGTGGCCTCCCTGCACTGTGCCCCTCCTGTGTCCTCAGTTGCCACATGACTGACACGTGCTTGGGGCTCATTTG ATGGCTCTGGCAACTTTCTCTACCTCGGTTTACCTTTTGGCTGCCCAGTGCTGGATCGCCAGTCTGCTTTACTGTTC ACGGGAGGAAGGGTGTCACGGCGTCACACATGGGCATGGCACCTGCGCTGGGGCTCACCTGTCTCATGAGGCCGTAT GTCGCACAAGGCTTCTTGAGGGTGGGGTGGCCATGAGCGAGAGCGCTCGCCTCTGTCCTTTTCCTGTTGCAGAGGAG GAAAAAGTCTGGGGCCCTGTTTGCTCAGGGTGGGCTGAGGCCCAGACCAGCTTCCTGTCTCCACACCCTGACTCCAA ACCCTCACTGTGACCCCACGGGAAAGCATATTCCCAAATGTAACTGCGACGCCGCAGCCCGGGACTGCTGATTGAAT GAATGAGTATTCTCCTTTGGGTTTCCCACAGAAGTTTTCCCCCAGTTCCCTACCATGATGGGTTGTGGCTTTGTCAC CCGCAGTGAGAATATGCGAATGCTTTAGCAGATGTTGTGTGGCTCGGGCCTGCCTGCCTTATTTGGAGATATTTCGC ACCTCTGTGGGCTCCCAGTGGCAGGCATCTCTGGGGAGGGAGCGCTGTCTCCATCGTCCTTTGGGAGGATGTGGGAT GGCTGCACCGGGCACCACTCTCACATGGTCTCCACATCAGGAAGCGTATCTCACCGTGTCCAGCATTGGTGTCCTGG CCAGATGCTCTGTTTATAATGATAGAAAAAAAATTTTTCATCTCTGAAATTTGCCACCTTCTTTCAGCAGCATTTCA CTTGGTTTACTTCCTTAATTCACGAAATATGTGAAAAAACTTTATAAATCTTAAAGATGAGAAAATTCTAAATGATG TGTGTACAGATACACACACATACACACACACACACACACACACACACACACACACACATTTGGCCCTTGGACAAGAC AGGTCTGAACTGTGTGGATCCACTTACACTTAGATGTTCTTCTACCTCAGCCACCGCAGAGACAGCAAGACTGCCCC TGCCCCTCCTCCCCTCCCTTCCCCCTGCCCCTCCTCCCCTCCCTTCCCCCTGCCCCTCCTCCCCTCCCTTCCCCCTC CCCCTCCTCCCCTCCCTTCCCCCTCCCCCTCCCCAGCCTACTCACCATGGAGATGATGAAGACCTTCATGATAATCC ACTTCCACTTAATGAATAGTAAATAGATTTTCACGTCCTTAGGATTGTCTTAATAACTTTTTCTAGTTTATTTTACT GTAAGAATACAGTGTATAATATGGGTAACATACACAATATGTGTTAGTTGAATGTTTATGTTATCATTAAGACTTCC ATTCAACAGTAGGGTATTAGCAGTTAAGTTTTGGGGGAGTCAAAAGGTTATGTGGATTTTTGACTGTGTGGGGCTTC AACAGCCCAACCCCTGCACTGTCCGAGCATCAGCTGTATACATACATATTTTGCCGTTTGTATTATAGTAGCTCTGT GCATGGGGCATGTCTCCGCAGGAAGAGGGACTGTCCTGACTCTTGGGCCTGGTGGTGATTGTCTGGGGCACTCCTCC CAGAGCCCTGACTACTGACAGGTCACTTCAAGAATCAAAGAACCTCGACTATGATGTCATTTTTCTGTAAGCCCTGG ACTACTATAAATTATGTTTTATCTGTCATAATTAAGACTCGGAGACTACCAAGCTGTCTTCGAGGGGAAAGGCCTGT CCCTTTCTCCAGAGAAATAATTAATTGTTAGAGTATATGGTTTTTGAAGAATTTACTGTAAGATAAAAGACTGGTAT TTTATTCTTGCATTTATTAGTATTTAATCAAATGGAAAGTGCACTTTCAGCCTGGAAATCTTGGCTTCAGCTGCAGG ATTAGACTGAATTATTGTTTAAAGAGTAAAAGGTATAGAATTATATGTTCAAGTTATCAAGCCACTGATAGGTTTTG GGTATAATGTAACTAATTTAGAACATAAAATTTCCTGCCTTGTGGACTAGAGCATCGGATTAATCATTTGGAAGCGG GGCGCACTTCCTCTGCTGCGTGGCCTTGCGGTGAGATGGAGCCTGTCGCTCCAGGAGCACGAGACCTTTACGGAGTT CAGTGCCGTCAAGGCCCACTTGTCCACAGCCACCGGAGCATGTTGGGAACACCGGGAGCCGCTGGAACGTGTCTGGA ACACCAGGCTCTTCCATTCGGGACACTGAGTCATAAATCATCCCATGTGTCTCATGCAAGAATTCTTCCCTGCAGAA ATTTCATGAAACTTAGTCTTTGCTAAGGGTAAAGAGGATTTAATTCTCTTTGTTCTCAGTGGTGTGCAGGCTTAATG CTCATGGGTGTTGACTGGTGGCCGGCACATCAGTGGCTCGTGGGTGTTGACTTGTGGCTCCTGGCATTGCTTTGCAT TAGAGGATAGCCGGCCTCTCTACACCATGACTTAGAAAATTCCAGCCAGGCACAGTGGCTTACACCTGTAATCTCAG TGCTATGGGAGGATTGCGTGAAGCCAGAAGTTTGAGTTCAGCCTGGGCAACATAGCAAGACCCTATCTCTACCAAAA AAGAAAAAGAATAAAGAAAATTCCAGAAAACGTTTGTGACAGCATCACTGTTGAGGTTGTAGTGCCACAGGCAGTGC AGCAAGCATCTGGTTTATCTGCGTGAGCTCATGACGTGTTCATCAGTGGGCAGAAAAAGATGGGATCAGACAAAACA GATGCTTTCAGGATCCTTCAGATCAGGATGGCAAATGTTTCCTGAAATGGGCCAGGCCAGAAATATTTCTGGCTCTG TGATGTACAGCCGCTGGCACAGCTACCTGACCCTGCTGTTAGAGCTGCTGCAGACAGGACCCAGAGGAGGAGTGGGG CTGCTACCCATGATGCTAGACCGAGGTTGCCGAAACTGGAGTGTCCCATTGTATGCACGTGTCCTAAAGCATCTCCT TCCATCTCCTTGTCTACTCCTACCGTGCGCATACAGAGCCCCTATGGTGCGAGTACAGAGCCCCTGTGGTGCATGTA CAGAGCCCCTATGGTGCAGGTGCAGAGCCCCTACGGTGCAGGTGCAGAGCCTCTACAGTGCATGTACAGAGCCCCTA CCGTGCAGGTGCAGAGCCTCTATGGTGCGGTGCAGAGCCCCTATGGTATGCTTTCAGAGCCCCTAAGGTGCACCTAC AGAACCCCTAAAGTGCAGGTGCAGAATCCCTACAGTGTATGTGCAGAGCCCCTACGGTGCGGGTACAGAACCCCTAC GGTGAGGGTGCAGACCCCCTATGGTGCGGGTACAGAACCCCTACGGTGAGGGTGCAGAACCCCTAAGGTGTGCCTGC AGAGCCCCTATGGTGCGGGTGCAGAGCCCCTACGGTGCGGGTACAGAACCCCTATGGTGCATGTACAGACCCCATAT GGTGCGGGTACAGAGCCCCTACAGTGCGGGTGCAGAGCCCCTATGGTGTGCATACAGAACCCCTACGGTGCGGGTAC ACAGCCCCTAAGGTGTGCCTACAGAGCCCCTACGGTGAGGGTGCAGAGCCCCTACGGTGCGCGTACGGGGCCCCTAC GGCACGCAGGCTTGCCCCGCCACCTGCTGTCCCCGGATTCCTGTCAGATGTCCGGGTGCCCAGCCTGACTGGGCATG GCCCTCCTGGAAGCAGTTTCAGGGCCAGTTCTGATCTCAGGTGGGGATGGAGAGCTGGTGTCTGGGCCTCTCAGAGC TCAGGCCCCGCACATCGTCAGAGTGACCTCACCAGCTCCAAGTGCCCCTTTTCCCTCAGTTTCATTATTTGGGAAGT GAGGAGGTCACACCAGGCTGGACACGGGATTTCAATCCGTGTGTCCCCCTGTTGCCCGGGGTGGCTGCATGCAGGGT GAGTTCAGGGAAGCTCTGGATGCAGTGAGCGAGGCCCCGCCCAGCCTCTTGGTGGGAGTCACTGGCCTCACAGCTCA CTGCAATTCAGAGACCTGCAGTGTGAAGATTCTTCCAGATTACTGGATGGAAGGGACTTCAGTGACCTCATGTAAGA AAGGAAGTCACCCACTGGTAGCCTCAGAGAGGGAACCTCTGGCAGTCTGGCTCACAGCCGGGGCTAGATTCAAACTG TATCCAAGAGCAGCTGCTGAGAGACCCACCTCAGTCCTGCAGGAGTCCAGGCTCTCTCCCAGGCCCCCAGGGAGGGT GTTTCCACCTGGTACCTTGGGGAGATGTGACCAGAGCTGCTGGAGGGAGCGTCTACCTGCTGGGGTCAGGGGGTCTC CATCCGCCCACAGTGTCGGCTCAAGAAGTGTGTGCTGTCCACCCCAGGCCCAGGGCAAGTCCCACGAGGCCGAGGCT GCACCTTGCTGTCCAGGGGGCCGCAGCTGAGGCCTGTGCAGCCTCCCCGGTGCTAGTGCCAGCATGGTACAGGAGTC GCAGCTCCAGGAGGACATGCAGGCTGCCTGCCATGAGAACATCCCTCTGCTGTTTGCAGACCGAGGCCCATGGGTGC AGAAGGAAGCGTGCCGGTGCAGGGCACGCAGGGCCGATGGGAGATGGACTGACCAGTGGTCTGGACCGAGCAGGCAG CAAAGGGCCCTGTGTGCTGAACTGAGCTGCTGGGACTTAATGCACACAGAACCACAGAACCACAGAACGTAATGGAG AAGAATTGGGTAAGGGTGAGTGGGAGATAAAGAAGCCATCAGAATGCTGCTGAGTCTGGTGGGGGTTGGAGGTCACC GGAAATAGCTCCTCCCAAGTTTTACTCAGATCTTCTTGGCAGGGTGCATCTTAGCATTTGTAGAATGCACCAAGGAA TGCCTGGGAAGGGCATGGGGGCCCTGCAGGGGTCACAGGCTGGGAGAGGAGGGGCTTACTGCCTTGGGCCCCTGGAC ACAGGTAATGCCTTTGCCTCAGGTGGCCAGAAGTGCCTGTAGGCTTTGCAGAAAGCTACTGTTCCTTTCCTGTGTGG GTGTGTGACTCCTGGACGGTTGCCGGAGATTGCCCTGAGGCTGGGGTGGGTGCCCGTCCTGGAGCCCCCATCCCACA GTGCTCTTTGTCCGTAGGATCTGCGCACACAAGGGTTTGGTTGTTGAACCTGGAGACACACATTATGGTGAATCCCA GTGTTGACTGATTATATCATTAAGTGGGTCACATGACACAAAAACCACACGTTCTGAATGTACAAATTCCATCCCAG TGCAGGTGGAAATTTGTATTAACCATGGCTTTCTTCACATGGCTTCTTTGCAAACAAACACTTGGTACTTTGCTAGT ACAAGGTCCTTCCTTGGTGGGGAGGGGTGTAATCCCATGTCGATGTCTGGACGAGGAGAAAGAGGAACTTCCCCTCA GCCAGTGGACGAGACTGTCCAGGCTGCTCCACAGTGGCCACAGAGAGCCCCCGGCACCTGCTCGGGGCAGGAATTGG TGGCTTTGGCCACCTTGCTTAATTGAGAAAGTTGATGTTTCCGTCAGATCTTCTTGTGTTCGCACATGTTACCTATT CTCTAAGAAGTCAGTGAAACTTCACCCAACTTTAGAGGCTATAAAGAATGAGGTTATTTTCTGCCATGACATATTTA AGCTGAAGCTTCCCAAGCCATAACAGTTTTAAGAAGTGACATTTCATTTTGAACACCAGCCTGCCACCTCTTTACTC CTCATGACAGACTGTCACTGTGCAGCGCAGCAGTTAGTTGGTTCCTGAAGTGCCAGAAAATTCCCAGGTTGTGAGGA GTGTGCTGCTGGTGGGGTGAGATGTGCGACCCGGCGGGGGCCTCGGCGGGCACAGGCGGGAGACCCGGGCCAGAGCC CTGTGGGGTGAGCGCCATCCTGGCCAGGCCACACGGCCGGGGCAGCTTCTTTCCCTTCTGCAAGGCAGTTGGCATTA TCGCGGATGTTAGCATAGGAAGTTCTAGCGGGACTAGTTAAAAATGAGGGAAAACATGGTGTTCTCTCATTGTCTTT TTCCTAGTAAACTAAAGGAATCATGCTTGATGAAGGCTCAAGTGTAGTATGATTCAATCGGGCATGAGACTGTGCTG AGGTCTCGGATGTCTCGGGCCTGGGGTCAGCTTGAAGAGATTCATAGGCGGGTCTCGAAGCCCATGCTGCTGGGAGG GCCGGGCTGCCGACGTGGACGGGTACAGCTCCCTGGTTCACACAAGACTTGGGGTTCCCTCCACCGTGGAATCCGTC TTGCTTTCACGGGATTTGGGGACTGTGAAATCTCTTCTCTTCTAATGCATTCCCGTTGTCTAGAGGCTGGGGAGCAC CATTTGATTTTAAAGGACAGCCACAGTCCTGCCAGCTCCATAGAGAGAGCAGAGGTGGCCTCATGTTCTGAGCAGAG GGTGCCATGGTATTTCTGACCAGGCGGGACCCTGGCTGGACTCACGAGATTGTGTGAGTCCACAATGTGCTTGTCAG AAGCCAGGCGTCCTGGAGTTAGGGTCAGATTCCCATGGTGGGTTTCATTACCCTCCTAGAGACTGGCGGGGTCCCAG CCTCTTGGAAGTGTCCGCTCAGACACTGCCAGGTGCCTTGGAGGTAGCAGAAGCATCTCTTGATGGCAAGTGTCCAT TGTGACCTGTGTTGAAGACAAGGTCTGTGTGAGAAGGTGCACTGGTACCTACTGTGTCCTGATGACCTGGGAGTGTC GTGAAGACAGAGCAGCCAGTGACCTTCTGAAACCAAAAGAGTGGCTGCCCACTCTGCCTCCTGGCTCTGGCACGGGG ACGGCTCCAGGGTTCTAAGGCCTAAGCTGGCTGCACTACCTCCCGCCCTCAAGGACGATTGGCATCTCTGGCGTGCT CAGGCCCCTGCAGCCTTGCCAAACAAACAAACAAACAAAAACAACTTGTAATTTTTCATTTTATCTGTATTTTGCCA TTAAAATGTTGTTCTCTACACAATTAGCTGCAGGACGCACAGTGTTTAGCCTGTGGACGTGTCTCCCAGCTCTGCCA TGCACCGTGCGTGTACACCTGAGTGTACTCAGGTTTGCATACCCCCGACACTGGGACATTGATGTCATGGAATCTCT TCATATAGATTTTTCTTTGGTCTGCAGTGACATGGCAAGTGGTAAAGCCTTTTATGAAACCTCTTAAAGAAACAGAT GATAGTTACTAAGAAGCTTCCAAAAAGACTTTTTTTTTTTTTTTTTTTTTTTTTTTGAGACAGAGTCTCGCTCTGTC GCCCAGGCTGGAGTGCAGTGGCGTGATCTCAGCTCACTGCAACCTCCGCCTCCCGGGTTCACGCCATTCTCCTGCCT CAGCCTCCCGAGTAGCTGGGACTACAGACGCCTGCCACCATGCCCGGCTTATTTTTTTATTTTTAGTAGAGACGGGG TTTCACCGTGTTAGCCAGGATGGTCTGGATCTCCTGACCTCGTGATCCACACGCCTCGGCCTCCCAAAGTGCTGGGA TTACAGTTGTGAGCCACCGCACCCGGCCCCAGAAAGACGTTTATAGGCTCATCTTGACAGTGTTCTGGTATCACAAA CCAATTGTCAGTTAGAGCTAGAGTTGGTTTAGCTAAACTGTCGGAATGGATATGGGAGTGGCAGTTATAATCTGGAA ACATTGTTCCAAAGTGCTTTAAGTTCCAGGGAATTTTTGGAGCAATTTGTTAAAACTGTACACATTTACGTTTTCTG CCCTTTTCTCTAGGTGTGATCTATTTCTTTCACACACACACACAGCAGTTTGTATGTTAACTGCTTGCTGACTGATT TCCTGCTTGATTGCACAGATTCAAAGCAGTGCATGAGCTTCAGAACAGCGTTTATCTTCCTGCATTACTCATATTTA GTTCCATATATGTACCAAAGAGAAGAGTTCAGAAAAGAAAACCAGATTTTATTTTAAGTATGATTTTTAAATGTAGA CAGGTGCCAGTTTATATCTCAAAATGGGTGATTTAAAGACCAGTGAACAGATTTCCTTAGATGTCCGTCTGCTTCTG GGATCTGATGTGTAGGCATCTTCACGTTGGTTTTATAATGTGCCACGCGTCAGGTGTTATTTCGATGACTATGCTGA GCCCTTTAATAAGACGCACGTGCCTGGGGTGCTTCTGGAACCTTGCCACCAGGGCTCATTCTTTGACCATCCCTAAT TCCCCAGGGCTCTTGTTGTTAGAGTATTCTTTACAACCAAAGCATCATTAATCAGAAAGGTGCTGTGCGGTGCGGGG CCGGCTCCGATGACAGTAATAAAAACCGGCACACCTCCTGTTCCAGGACCCAGACCCTGGAAGTCTGTGCCTAAGCC AAGACATGAGCAGCGTTTGTGGAATGCGGCTTCAGATAGAAACCTTCTTTCAATTTGCAGGCCTGGTTATGTAATTC TAATGCAGAATCTCCCCCTTCGTGTTTGCATGCGTGTAGCCGGGTTCACAGAACTTTAGCCACAAACAGGAGTGTTT CCCTTTTTCCAGGGCTCCCGTGTTAGGCCCCCACCAGGAGGCTTTGGGGTGGCGTTTGGGAACGCCGTTTGGATCCC TTCTCAGTTTGACATCCTAGGTGGCAGCTCCAGTTTTGTTTGGTGAAACGATTTCAATGTAACAGAACCCCTTTCGG TTGTGAGAGCAGAATGAACTGAGCCGCACTTGACTGTCTTGTGCTGGATGTGACCCAGCCGAATCCACGGGGAGACC CCTGGTTACAGCGGGGACCACGGGTGGGGTCTCAGCCGTGGCCCTTTATACTTGGTGAGCATCAGCCACACCACGTG GCCAGGTTTATGATCAGGTGATAGGGATGAAGTGTTTTTGACACATGCTTTTCTTTTTTTAAATTAAAATACTATCT CATGCCTGATTTTGAGGTGGGCTGAGCATGAGTCCTGAGGATGAGAGGGGCTTCCCCAATGCCCCTTATTCCCTGTT CAGAAGGGAGATTGCAAAGCTAGTTTTCATCTTGTGATGTCTTTGTGGGAGGTTGTGAGGCAGTCAGACACGGTCCT CTTCCTCCCCCAGGTGAGCCAATCTCCCCCTTCACACAGACCCGAAGCCCAGGCCACAAGGGACCTGGGCTACCTTG TTTGTAAACAGCTTACAAGGAGGCTGGTGATTTCTCCCTTTTAACATGTTCGTTTTTATGTTTTTGAGGTGTGGTCT CACTGTGCTGCCCAGGCTGGTCTGCAACTCCAGGACTCAGGCGATTCTCCCACCTCCGCCTCTGGATAGGTCGGACC GCAGGTGCACGTCACCACACCCGGCTAGTCTGTTTCTGTGTGTTTTCATTGCACAGGATACCAGCAGTGGAAATGGT TAAGAGGGAAAGACACAGAGCTGCAAAGATGGTCCTGGAAGGACGGTTTTTAGACCTGACAGTTTTTAGTGCAGCAG GCCTGGAAAACGACTACCAGTAGGGGAAAAAGAAGAGTTTCTGTTTCTGGGTCTCTTCCTTTTAATATGGCAGGAAC TGGCCTCTGGCGCCAACTGCTTAATTCAGAACATTGTTATTTAAACGCCATTCATGTTAAAAGGGAGATGAAACGAA ATTCATTTTTCCAGAGGTCTCCAAATAGCCATGAAAAATAAATTTTTTTCTGCCACCAAGTACCATCAGCCACTCAT GTGGTTTAGGTGGATGCCGTGGTGGTGCCGGGAGCACTACCAGCCTGTGGGGCCGTGGGCTTGTGCTTCGCCGGAGT GGGAAGTGGGGACATTAGGAAGCCCGACTGTTGAATCGCCTGGGCGTCCTAAATGTGGGCTGTGTTGTCGTCCCTGT GCAAGCCTGAGAGGCAGACAGCACTGAGTCCACTGGATGCCTGCTTGTCTGGTTGCCCCTTAGACTATGGTACTCTC AGCAACACGGCTGTCCCATTATGTGCACATGCCCTGTTACAGCTTTTGGAGCCCCCCTTAGGACCGATGGTTCGAAT TCTGGAAGTCCTAAACATTTGGGTCTTCCACGTCGCTGTTTATTCTGCAGATTTGAGGCTGGCGTGTTTGAGTTAGA CGGGACACTGGGGCTGCCCGCTTTCCTTTGATGGTACGCCGAGGGCCTCTCTGCCCCGTGTGTTCCCTGAGGTTCCA GTGGGCTGCTTCAGGGAAGGCGGGCCGGGAATTCCTCTCTGTAAGACAGGCCCCGTTTTATGCAGCTGTGAACCTTG TGCTTGGGTGTAGTAGGTGGTCGGCTCTTTTCTTTTCTCCTGTTCACAGCACGCTTATAGCCAGAGCAGACTCTATG GTTTGCCTGGAGAGAGCTTGCACACACATCGTCACCCTGTCTCTGGTGGTTGTGGCTGCAGCCTCCCAGACGCCTCT CCCTGTCCCCACCCTTGACACGCCTGGAATCCGTGTTCTCCCTCGTTTCTCCGACTTCATCCCAGGACTTGGCCCTC ACGGCTCCAGGAGCTGCTGAGGCAGCTTCATCTCAAAGCCAGGTCCTCTCCCTCCTGGTGACCTGGCCACCACCTTC TGCTCCTTAATGCTCTGTGCTGCTTCCAGCGCCAGTGCCTTTGCCTGTGCGCACCTGCCTGCCTCAGTCTCTCCTCT CCTCCTCCTCTCCACCCAGAAAACTACAACACTATCCCTTCTCTCTCAGCACCTCCTCCAGGAAGCCTTCCTGGACT CCCCAGGACATCCAACCCCTTGATACAGGCTCTCATTAATCCTGGAGTTCTCCTTCTGAATTCCTATCTCAATTATC ATTGCATGATTCATATAATTAGATATTTTGTTCAACATATATTTGCTGAGAAATCGTGGGTGCCAGGCACTGTTATT CTAAATGCTGGGGATACAGCAGTAGATCAGCTAAGACTACTCTGGTTTGAAGAAAAAACAGGAATTCCTCAGAACAC AGACTTGAAACCAGCCCAACGTTCCTGTTCTCACACAAGGAGAAGCCTAGCCAGCCATGGAGAGCTGCAGTGGTATA GTGGCCATGGAGAGCTGCAGTGTAGTGGCTGTGGAGAGCTGCGGTGGTGTAGTTGTGCTTCTCTGAGAAAGTGACGT CTGAGCATGGTTGTGAGTGGGATGACAGTGGCCACTGTGCAGGCTGGGAAGGAGACAGCAGTAGCACGGAGGCTGTG AAGCGAGAGCGAGGCTGGAGTGTGAGGGGCAGTGGCGGGGGGAGCGGGGGCGTGGGTGCGATGGGGTCATGGGGGAC TGAGGCCAGAGAAGGAAGTGTGGCCCTGCCGAATTTGGGACCATTTGGGCTAGGGGGCCCCCAAAGAGACCTGCCGT GTGGAGACTAGCCATGGAGAACCGTGGTGGCGGAGTGGCCGTGGAGAGCTGCGGTGGTGGAGTAGCTCACAGTGTTG GGCCCTGATCTGTCAAGGCTTTTGGCCTTTTCCTCATGATCACTAGGTGGTTGCCACAGCTCCAGCCATCACATCTG CCATGTCAAGGAAGGAAGGGTAGGGGATGGTGCCATCTGACTTTAGAAAAAGTATATGAAAACAAGAACTCTCTGCA GGCTTCTCCTCGCTCTTTGGCTACAGTTGTGACACATTTGCTGCCTGTATTGGAGCTTACATTCTAGTGAAGGTGAC ACAACAAGTAAGCAAATCACGTCACTGTGATTCCAGGTCATGTAAGGAAAATAAGGCAGAGAAAGAAGGGGTGGAGG TGGTGACTGTTTTCGGCGGCTTCTCTGAGAAAGTGACGTCTGAGCATGGTTGTGAGTGAGATGACAGTGGCCACTGT GCAGGCTGGGAAGGAGACAGAGCGGTAGAGCGGAGGCTGTGAAGCGAGAGCGAGGCTGGAGTGTGAGGGGCAGTGGC AGGGGGAGCGGGGGCGTGGGTGCGATGGGGTCATGGGGGACTGAGGCCAGAGAAGGAAGTGTGGGCCTGCCGAATTT GGGACCATTTGGGCTAGGGGGTCCCCAATTTTTTTGGCACCAGGGACCAGTTTTGTGGAAGACTAACTTTTCCACAG ATGGGAGTGGGGGGATGGTTTGGGGATGAAACTGTTCCACCTCAGATCACCAGGCACTAGATTCTCATAAGAAGCGT CCAGCCTAGATCCCTCCCATGCACAGTTCACAATAGGCTTCACACTCCTATGAGAATTTAATGCTGCCGCTGACCTG ACAGTAACGCTGGCTCACCCGCTGCTTACCTCCTCCTCTGTGGCCCGTTTCCTAACAGGCCACGGACTGGACCCCTG GTTTAAGCCATATCCACAGGAAGTGTTTTCTCATCGTGATGGAAATGAAGGGAAGATGTGATCTGATTTACTTGTGT GTGTTTTCATTTTATTCTAATCTTTATTTTTTTAACTCAGAATTATTTTACACCTCAGTTTTTATTCAGAAAAGCAT TAACCATCATTTGTTTTGCATATAAGACATGGTGAGATCACAATAAGTGGAGAATGTTTGCCATCGTTTTTCTACTT GACATCAACAGTGTAACATTAGCTTTTTTTTGTATGTTATATTTACCCATGTATTCATAATTTGGGGTACTCTTTAT TTCTTTGTATAGCTCTCATTTTTCTTTTTCCTTTTTTTTCTTTCTTTTTGTGGGGACAGGGTCTTGCTCTGTTACCC AGGCTGGAGTGCAGTGGCACTACCGTGGCTCACTGCAGCCTCGACCTCCTGGGCTCAAGCAATCCTCCTGCCTCAGC CTCCCGAGTAGCTGGAACTACAGGCACATGCCACCAGCCTGGCTAATGTTTTTATGTTTTTTAGTAGAGCTGGGGTT TCGCCACATTGCCCAGACTGGTCTTGAACTCGTGGGCTGAAGTGATCCTCCTGCCTCGGCCTGCCAAAGTTCTGGGA TTACGGGTGTGAGCCACCATGACTGGCCCAGATTGGATATTAATACAGTTTTTTTCTCCTTGAAAAGTTGACTCGTA CTAACTGTAGAAAGCTGAGAGAATGCAGATAAAAAAGGAATAGTTTAAATCATCCTACCTTATTTGATTTTTTAAAA ATAAACTGATTTTGGAATAATCTTAGATTTTTGGAAAAGTTGCAAGCAACGTATGGTGTGGTTTACTTTTTGTGGGT AATTTTTCTCCCCCCAGGAGATCACATTTGTCTCCTTCCAGTTTCTGGCACCTTAGCCCAGTAGCTCCTGTGTAGGG GTGCTAAGGCATTGGTTAAACGTCTCTTGATCGTTCCTGGTTTGTTTCCCGTTATTTTGTCTCCCTTTTGCTTCTCC CCTGGTTGGGTTTCTCCTCACTTCTCAGTGGGTTATTTCCACAATCGACCTTGGTTCTGGACCAGTCTTGACAGAGC TGCCAGAGGGAGCCTCGAAATGCAAACCAGCTGCATCTCCTCTTGTTGAAAACTCTGTGGCTTTTCAGGGAAAAGGC AGCCAGCAGGACCGGCCTGGCCATGGCGGCCTCAGGGCCCGAGGGTGGCTGTGTCCCCCACGCCTCTCCAGGCACAC CAGGCCTCATCCCCCAGCTCTCGTGGCGGGTGCCTTCACCCTGGCCTGCGTGGCTCCTCGCCCGGGGGCCCCTCCCC ATAGTTCAGTTCTCTGTGTAGGTGTCAGTTTCTCCATAAGCTCTCAGCTGCCCACACTCTCCCCCCGAAGTGTGGCC CCAGCCCTGCGGAGTGGTTCCCTAACCGCCACTCTGCCCACCTCGTGCTAGCCTGGGTGTGGGCTTGCCTGCTGGCT CTGGGCTCAGGCTGGGGTGCTGTCAGGGTTGCAGGGGTCACAGTGAATCTTCATCTTCCGTGGGCCAGTCCCCTTCC CAGCGTCCCTCCTGGGGCTGTGGGTCTGGCCTCCCCCGTTGAATGGCCCTCTCTTGAGGTTGTTGGGCATTGGTGAA GATCCTGATGGGGTCTCATCACTGGAGTCAGACGTCTTTCTTCCTGGGTCTGGGGCATGGCGGTATTACTGTGCGGG CTGTTGGGAGAGGGTCTGTTACCCTCATGGCTGCTTGTGACCTGTCCAGGCCACCACTGTGCCAGCCTTTGTGTGGC TGGTATTGTGGCTTCTAAGTTGAGCCTCCGCCTGGCTGGGTTGCGATGGTTTCACTCCTGTCAGGTTTTCATGCTAT TGAAACTCACTTTTCTCACTGCCTGATTTCTGCCTTTTGTGGGTCCCTCCTGGTGTCCGTGATGCCCTCATTTAGTC TGCAGGCATCCCCCCACCTCTCTGCTCGCCCGGTGTGCACACCTGCTAGGTCAGCCCTGGGCATCGCATCAGAGACG CTGCCGTGCTCGGTGGCCTGGGGCTTCTGTCCTGTAGAGGCCTCAGCCATTGCATTTTAGGAATCGGCACTAAACTA ACTTCTACTGCTGCCCACAGAAGAACTGTGCCAAATGCTCTGGTTGTCTACCGGAAAAAAAGGTAGTATGCAGGTTT CAGTGGCATATCAAATTCCATTTCTGTGGGCCTTTGTGGGAGGCTTGCTCTTAGCGGGGGCTGGTGGGGGTGGGGGG GGGTGGGGGTTTGTGGGGGGGGTTCCAGCTCATTGTTGTGTTCAGGTGAAATGAGGCAGGGCTTTATTTTGATCCT ATTTAGGTTGTAAGCAGGTCTGAGGAATTCACTTCCTCATGCTTCACATACCTAAATAATTAGCCAGTTGGATATGG ACAGGAGCTGGAATCTGTTGCTCATTTGTAAGCCAGATTCTGAACTCATTCATTGTTGCAGTTATAAACTGGTTGCC TTTTTTCGGTTCTTGGAATGATTTGGATGGAGCTCACCTGGTCCCCCCAGCTCCCTGCTTTGTGATTGATTCAGTGT GTTCCCATGGCTTCAGGCCACCTTTGCTGGTCAGGGGAGCTGGTTCAGAGGGCTTGAGGCCAGCCTGCCCTTTGGAT GAGAGGCCCATGCCATGATGCTGGTCATGGGGATAGCACCACAGGGCTCAGTCGGGGATATGCCAGAGCTTTAGGGT CCCTTGGGCCAGCAGCTGGGGTCCTTGGGCATTTCCTGGGTGGCGGTGCTCTCTGGGGTGCAGAGTTGGTCATTCCA GGGCAGGCAGTTCACTTGGCCACACCAGGTTTGGCTGGAAGCCTTCTCCACCGCATTCCCAACCGCTGGCCTCCCAA GTTTGGCTTCTTGTGGTCAGGGCCCAGACCATGATAACCTTGAGGACTCCTCTCTCCGGGAGACTGTCGGGGCTAAG CTGCCTGTGGCCCTCCACCGCCCTGCTCCTTCCTCCGGGTGGGGGACACCCCATCCCCCATGCCCCTACTTCAGCTT GCTGGGATTCACCCCCAGTGGCCTTCCAAGGCTCCTACCTTTCTCCCTGGCCCTGTCTCTGCACACTCCAATGTCTT CCCCTTTGGCTGACGCTTGGATTGGGGGTGAACTCGAGGTGTGGTCTGTGCAGAATGGCGTGACAGCCCTTCCAGCC CGTCACGGTGTGTAGTGCCCAAAGCCCTGGCCGTGGCCATCTCAGGTTAGACCCTCAGAGTGGCACTGTCAGGTAGA GGAGTCAGGGGTCTTATTGATGAGGAAATAGAGGCTTGAGAGAGGAGTGCGCAGCTAGTGTCTGACCAGCCCCCACA TGGGGCACTCCCCAGTCCGAATGTCTGCAGTGCAGCTTCAGGCGCTGATGTGGGCAAACCCTTCCTCTCCCAGGCCG TCCCTTCCTGCAGCTGCTCGGACACTGGCACATGTTGGCAGGCGTCAGCACCAGGGCTGGGCTCCTGCCTGGGACTC GAATCGGGAGCAGGTCCCACGGAGGCAGAGCAGCCGAGAATCAACGGTGGCCATAGCCACCACATCCTGTTTCCAGG GGCAATGGTGGCAACAGTGCCAGCTGCCCTGCCTGCTGTGCCTGGTTGCCCCACAGATGTTTCCTGAAGCTTGATTT TGGCTGTGATTGGAGCGTGGCCAGTTCTGGTTCCTGCTATTTTCTGAGCCTGCTCCTCCAGCCTTCCCAGAAGTTCT TTGAGTTGTGGAGTAGCCTTTCAGTAAACGGCATTTGTGCTTAAATTAGCCCGTGTCAGTTTCTGACACCTGCTGTT AAGAGTGCTACCTGATGCAGGTGCTCGGGGCTGGCCAGGATCCCCACCTGAGTCTGGAGCCCTGAGCCCAGGCCTCC TGACTCCGACAGCCTGCAGCCCTGCCCGAACTGGGATGATAGAGCAGCAAACATGGCTCCATGGAGAGCGAAACCCA AGCTGGGCTGTTTACTGCCAGTCTGCTGGGAGCTTTGACCCACCATCGTGCAGGGCGAGTTTCCAAGAAATGGCGAG AGAGCATCCAGATTTCTCACGTTGCCTCTAGAGCCCTGTTGTCTGACCAGTATCTTCTGTGAACATACTTTGGGAAA TGATCTCATGGACGCTTGGCCTGGATGGTGGTCACACTGGTAATTCAGTTCCACAAGTATTTTATGAGCCCCTTGTG TGTGTGATGTGTGCTGTTCTTCAGGGAGCCCTGAGCAGAGCTGCCAGCATCCTGCCTGAGAAGCAGTGGCCCGGGAT GGTGGGAGATGTCTGCAGGCGCAGGGCGGAGGCTGTGGGCCAAGATTGTGGCTCTGAGAAATGGAGATGGGAGAAGG GGAGGCAGTCACTTTGGAAGAATGGGCGGGATGGTGATGATTTGAATGAGACTTGGGGGAGTTGGGGCAGCGTACTC CAGGGGATAAGATCAGAGGTGAAGGGGGTTGGGCTAAAATGTTGATCATGGTGGGAACAGTAGTGATCCCCAAATCC TACAGAGCCTTTGGGAAGCCTGGTCTTTGCATACGTTCCCTCTAAACTCGTGCCGACGTTGTGATTTGGTCTGATTT ATCCTACAGACAAAGACAGTTGAAGCACCAAGAGTGATTTTCTCACAGCAAAGGGACAGAGGGGGGAGGCCGTGAT TTGCACCCCCTGCCTTTATCTGGCCCCTGCCACATGGTAAGTGGAAGGCAGGTGGCTCCTTCCACAGGGCTCTCTTT GCCCTCTCGGGAAGCCTGGTTTTTACCCTTGAGGCAGCAGGGAGGCTGCAGGGTGAGATGTTGAAGGAGTGTGATGT GGGCAGAGCCTCTGTGATGGGGCATGGTTTCTGGCACATCCCATTTCCATATTCTGGGGTGATCGAATGGGATCCGG TTCAAATCCCTGTCAGTCTGCACAGAAAAGGGGAGGTTTTGCAGGCGGCTCTGGAGTGTGACAGTTGAGGATTGAAT CTTGAGAGTAATGCTTCTACAAAACACTTGTGTAGTTTGCGGTCCGCTGCCCGACCCTGGTCCCTTTAAGGGACATA AATGCACCTCTCTCTCCTCGTTCTTGGAAAGACAGATGAGAGAACCAAAGAGTGGCCTTAGAAGCATATGTAAGACA CAGAAAGGAAAGATCAGCTGGAGTGCTGGTGAAGGGTTTCACAGGATAGGAGACCAGGCAGCAAGGTGCCCAGCGGA CAAGCAGGGAGGGGGCCTTCAGTGAAGGCGCAGAGATTTGGGATGCATGTGGGATTCAGACCTGCTTCATTGTGGGA ACAGAGCAGGAAGGTGCCAGTGAGCTGCCCTTCCAGGGGTCAGCAGACCTTTCTGTAGAGGGTTCCAGGGGTCCGCA GGCCTTTTCTGTAGAGGGCCAGAGAGTCAGTGTTCTGCGCTTGCAGGGCCACACTGCCTCTGTCACAACTGCTCACC TCTGCCACTGTAGCACGGAAGCAGCAGGAGATTGTGTGTAAATAAATGAACACAATTGTGTCTCAATAAAACTTTAT TTACAAAGACAGGTGCAGTGAGTGAGCTTTGCCCCACAGGCTCTAATTTGTTGCCCCTGCTCCAGCCCCTTGATGTA GGGAGCCTTTGCTTTGTTGTTCTCAGTGAACTTTGAGGGCTGATGGTTGGGTTGGAGTGGAAAGAGCCCAGGTGTGA TGGGAGCCGTGAGGATGGCCTTCCTTGAGTAGCCACGAGCTGCTGTGGGTCTTCCTGAGAAGCTGTGGCAATGGGAG GACAGAGGTAAAATAGCAAGACCCAGTGCCTAAGGAGGCTGAAGAGGGAGGATCGCTAGAGCCCAGGAGTTCAAGAC TGCAGTGAGCTAGGATTGCACCGCTGCTCTCCAGCCTGGGTGGCAGAGCAAGACCTCGTCTCTAAAAAAAAAGAAAG AAATGTACAAGTGTAAAGGTAGCCTATAGATGTGTTCCCCTGTATTCCCCAGGCTCTATTCTTCAGCCTCCTGAGCA GCTGGAACTACAGGTGTGTGCTATCATACCCAGCTAATTTTAATTCTTTTGGGGCAGGGTCTTGCTACGTTGCCCAG TCTGGTTTCAACTCCTGAGTTCAAGTGATCTTCCTGTCTCAGCCTTCCAAAGTGCTGGGATTACAGGCATGAGCCAC TGCACCCAGACTTGTACATCTCTTTAAATGTAAATTAAATGTGCTTTCCACAGCATTAGTGGAACACCCCAGCATTG CTCATCCTCTCCGGGCTGGCTCCTAACACAGGTGCCGTGGCATAGGTGCTGAGTTGAATCTCTGTTTTTGTAAGTCA TTGCATACATGCTTCATTCTAAAATGTACTTTATTCCAAATATTGAACAGTTTGTCTTCGGGATTTATTGTCTGTGG TAGTTGTTTTATTAATTGTTTTAGTAAAACAAAGTTAGCTTAGTTGTGGGAATTATTTAAAAGGAGCTCTTACCAGG TCAGCTTCCTTCGGTGTTGCGTTGGTTAAAGATAAACGAGAAGAATCGGGATACAGTAATTTTAGGAAATAAAAGGA GACTGTAGTATTGGTTGGCTGCTCTAGGTAATGGTGGTAATTTTCTGTCTTCAGAGTAATCATATTGTGAAAATGAT GCATCGTATAATTCCAAAAATGAGGAAGAGCTTTGGAATATATTTTGTGTCTTAAATAACCAGTACTTCTGTTGTGT GTTTTATATACGACCAGCCTCTTACCTATACACTTTGTCTTAAAAATTATTTCTGTTTAGGTACTTGGAAAAATGGA CAAGGATTGTGAAATGAAACGCACCACACTGGACAGCCCTTTGGGGAAGCTGGAGCTGTCTGGTTGTGAGCAGGGTC TGCACGAAATAAAGCTCCTGGGCAAGGGGACGTCTGCAGCTGAGTAAGTATGAGCCCACGTGATCCTGTATACCGCA CATGCTGAAGCAACCGAGGAGTATATGTGATAACGGCATGTTTTCCATTGATGGCAGGGTAACGCATAGCCTTACCC CCACAACCGCAACCACGAGTCCGTCTCTCAAAACAGTGTGCTGCGACGGCTCCTGCATTTGCAGCTTCCCTGTGTGT TGCCCAGGAGCTCTCCACCTCCGATGAACCCAGGGCCGTTCCCTTCATACCCTTTCATTAGTAGCTCTAAGATGTTT GATTAAGGTGTACGTTTACAGAGGAGTTGGTTGGTGATGAGCATTGAACATTTGGGTTCTTCGGCATATGTCTCTGG AAATTTAGAGACAGGGAGATGCAGGATTAATCTTGATTAAAAAAAAAAGCCCAGATCAGCGTTCCCTGTTCCTCCAG AGTCTGCCAGGTGAGTTTCATACTAGGACTGCTTGATGTTCTGGAATCCCTTAACCAGGAGTCCCAGTTGCCTTTTG AGAGCCGTGGTCAGACCCTTGGCGAGGGTGTGGCTGAGGATGGCCCTGCCAGGGGGAAGGGCCCGAAAGCCCCTTTT CAGCATGACTTTAAGTTCTTGTCATTTCTAAGAGCGTACATGTTTCTCTTTTTGTGAACAGCTCCCACTATATTTCT CTAATTGCAAAAACGTAAGAAATGTAAAGCATTCCTTAGTGTTTTGCTTTGAAATGTAACATTTAATTTCCTCCGTT CATTCTATTAAAATTGTAGCTCTTGTTATTTCTGACCAAAGAAGAAGAAGAAAAAAAAAACACCCACTCCTATGCTT GGTGTTTCTCTTAACTGGCTAATAAACACAATGCCAAGAACATTAGATAAAGAAAATACATAAGAAACATAAAAATT GATTTTAATGGGCCCCTGTCCGAGACAGCCATAATGAGCACAAGCGCAGTCATAAATATCAGCACTCGCCTCCGCTG TCGAGATTTTTCCTGTAGAGCTGCACGTTACAATCAATATAGTCTTTTTGAGACCAAAAAATAAGCAAACCTTTGAA CCATGTGAATATACTCTTTTCAGTTTCTATGAGAACCATCTGGCTGTAGTGTTCAGAAAGTCACAGGCACCAAATAA TTTGTAGGGGAAAATGTCATTTTGTCTTTTAGCATGTTCAGTTGCACAATAAATCATAGAAATTATGTGTTGGTTTT TTTTTTCTTTTGGGAAAAAGGTACAAAGTGAATTTGGGGAAGAAAAAGGAAAACAAAACAAAACAAACATTATAAGA TATGTTTAGTTAAATGCCCATTGTGGATTAGGCAAATAGGATGAAGACGCTTAATTTTGAATTTCTACTTTATGAAC TTTCTGAATCAAGTTAGGATCAGGTTCAGGTGTAAAAACAGCCGTGAAATAATGCTAAATCCTGAATAGGATCTGGC TGATTGCTCTCATGAAAACACACCTGTGGACAAACCATGGGAGCTGGGGCTGGTGCCTTCATGGCCCCTGGGAACTT GGGCTCCTCTGAGCTTGGGGTCTCCAGATGGTGGTCCCTGCCCTGGTGCTTCAAGACAGCTCCTGGGCCTCTGCCAC AGGTAGGGGAGAAAGAAAGGAGGGCGTGTCATATATGGGCTAAAATTAGGTGTCTTGTGAGTAAGGAAGGAGTGGGA TTTGGGGGGCAGCCAGCAGTATTTGTGTGTAGTTAATTTTAGTGGGGGGAGCATTTAAAAGTTTGAGAATAGTATAT AAAAGTATATGAATAGTCAATTAAGTTTAACATTTTATCATTTTTAAAATTTAGGTAAAAATTACATAGAAGTCAGA TTTCAAGTGTACAATTCATTTGACAAAAGTGTACAACCGTATAACTACCGCCGAAGATATAGAACATTCAAGATATG GAACATTCCAGAAAATTCCCTTGTGCCCCCTAAAGTTAGTCCTCTTTGTGAATTTTTGTTTCCATTTCTCCAGAGTA AATTCCTGAGTGTGGAATTGCTGGGCTGGATGGCAAATGTATGTTTAACTTGACAAGAAATTGCCAAAACTTTCTTC AGAGCGGGATGGAATTTCCACTAGCAGTGTGTGAGTTTCAGTTACTCCACGTTCTTGGCAGCACTTGGTGGTGTCAG TTTTTCAGATTTTAGCCATTCTGGCTGGTATGAAGTATATCTCATTGTGGTTCTAATTTGCACTTTGCTGATGACTT ATCCTGATGAAGTCTTGGCCATTCCTATGTTTTCTTTGTGAAATATCTACTCAAGTCTTTTGCCCATTTTTTTTTTT TATTTCTTTGAGATGGAGGCTTGCTCTGTCACCTAGGCTGGAGTGCAGTGGTGCAATCTCGGCTCACTGCAACCTCC GCCTCCTGGGTTCAAGCAATTCTCCTGCCTCAGCCTCTGGAGTAGCTGGGATTACAGGCACGCACCGCCACACCTGG CTAATTTTTGTATTTTTAGTAGAGACAGGGTTTCACCATGTTGGTCAGGCTGGTCTCTAACTCCTGACCTTGTGATC TGCCTGCCTCGGCCTCCCAAAGTACTGGGATTACAGGCGTGAGCCACTGCGCCTGGCCACCTTTTGCTCATTTTAAA ATTAGAGGTTTCTTGTTTGTGTTTTTGTTGATGTTATTGATTTGTGGTTCTGGATGTAAGACTTTTGTCAGATGTCT GTATTGTGATGATTTTCTCACAAGTTGGAGGCCTGCTTTTTTGTTTTTCCAATAGTGTCTTTTGATGAGTAGAGGTT TTAAATTTTGAACAAGTCCATATGTCTTTTTTTCCCTTTATGTTTAACACTTTTTGTGTTCCCTGTAAGAAATATTT GTCTACTGTAATGTCTGAAATAAATTCTCCCGTAATTTCTTTTAAAAGCTTTGTAGTTTTTTTTATGTTTAGATATA TGTGATCCATTTTGAATTACCTTTTTGTGAGGTACAGAGTTTATTTTTTCCCTGTAGCTATTTAGTTGTTTTAGCAT CATTTGTTGGAAAATAAAAATTGTCTCCTTTCTTCATTGAATTACCATCAGTTGACCAAGGGTGTGTGAGCCTGTTC CTGTTTTGCTCTGTTTGGTTCAGCCTACCTTTGCCTGTTCTATGCCCGTTCCATGCTGGCTTGGTTAGGTAGCTTTG TGATACATCTTTTGTTTTGTTTTGTTTTGTTTTGAGACGGAGTCTTGCTCTGTCGCCCAGGCTGGAGTGCAGTGGTG TGATCTCGACTCACTGCAAGCTGTGCCTCCTGGGTTCACGCCATTCTCCTGCCTCAGCCTCCCGAGTAGCTGAGACT ACAGGCGCCTGCTGCCACGCCCGGCTAAATTTTTGTATATTTAGTAGAGACAGGGTTTCACTGTGTTAGCCAGGATG GTCTCCATCTCCTGACCTCGTGATCCACCCACCTCGGCCTCCCAAAGTGCTGGGATTACAGGCGTGAGCCACCGCGC CCGGCCTGTGATACATCTTGATGCTAGGTAATGTGAGTCCATGAATCCTCTAAATTTATTTATTTTTGAAAGGTTTG GCTTCTATGTCTCTTAAGTTTGCCTATTACTTTTAGAATTCAGGTGTAAATTTCTGCAATGATTCTTTTTTGGATTT CGACTGGGAGTTCATTGAACCTGGTTGTCAATTTTGGGAGGGTTGACATCTTGATACTGAAGTGTTCAGTTCTTGGC TTTGACTGGCGTCTGCATTTGTTTGGGTTCTTTCATTGTCCTCGGCAGCGTTGAGTGGTTTTTCAGCCTGGAGGCTT TGCTTATCTGGCAGACTCCATTTCTAAATACTTTGTTCTTGATGGTATTCTAAATTAGGTTGAAACTTTTTAACCTT TTAATTTATTGCTGCTTGTGTTTAACAACTGACTTGTATGTTGATCTTATATTCTGGGATCTTGACTTAATTCATGT ATTTTTTCCAGGGTTGTTTTGAGATTGCTTAGGATTCTGTATAAAAATTCATGATGTCTATGAATAAAGACAATAGG CTTCTTCCTTTCTGATTGTTATGCTTTAATTTCTTCTATTGAGCTGTCCAGAACCCTCCAGGATGACTTCAGTAAGT GTGGTGACAACAGACGTCCTTCCCTGTTTCCTGGTTTGGGGGAGCTTGCAGGATTTCACCAGTGAGGACTTGCTCCC CATGTTGGGTTTCAGAGGCGTCTTCCTCACTGTGTGGAATTTTTGTCAAATGATATTTCATGTATGTGTTGACATAG TCATGTGCTCTTGCTCCTTTATTCTTTAAATTTGGTAGAATAAATTTTTAGAATTTTAAACCAGGTGTATACTTTTC TTTTTTTGGTACTGTCTTTGTCTTGTTTTGGAATTAGTCTCATTCTGATGACAGATCAATTTGGAAGCATTCCCTCT TCTATTTTCTGAAAGAGTTAAGTGTTGGATTGATATTACTTTATCTCCAAATTTTGGGATGAATGCACCTTGGATGC CATCTGGGTCTGGTGTCAGAAGCCTTTTGTGAAGCTTCCTGGTTTAGTAGAATTGGGTGCTGCCTTCCCTCATCTCG GGGTGCTCCCACCTGGAGCCATCTGTGCTCTGTGTGGCTGCTGTCCTCTGGTTGCTGAGTGACAGTGGCTGCTGGGA TTTGGGGCAGCATCCTGCTGGCTCTGGCCCCTGCCCTCACCCTTCTCCGAGTGCCTATGAGTCCCAGGGTGGTCCTT GCTTCCTCTGAATGGGTGTTTCTTTAGTAGATAAATTACAGGTTGACCACTGGGCCTTCTTCAGTGACATTGCATCT GTGCTTGTGTACAAAGTGTGATTCCCGCTCCCCAGGTGAATCCACTTACCTGTGTGTGGCTTCGCACGGGGACCAAT GACTTCCTTGCATAGTTACCTTTCCCTCCCTAAAAACGTGTGAGAAGCACATCAGTTGGGAAAGTGGTATATTTTCC AAAAGGGAAGCAACATAAGCTGCTTTTAAGTTAGTTTCATAACTGCCTGACAGTATCAGGTTTCTGTGAATGCCATC ACGTCCAGGAGCACTTGGCCTCTGCAAGAGCGGAGCAGCTCCCCCGCGCCATCTTCCCGCAGCTGCAGAGCTCTGAC CTCGTCAGATTCCCTGCAGTGCCCACAGTCTAATGAGAGGGGCCAGGCTGTATGTGTTTACTTTTCTAATGTTATTT TGGGGCTTGTTTAGTTTTCCATAATGTTGATTGCCGTATTTGATTACTTGAAAAAATGGACCGTATCACCCTGGGTC ATACTTAGATTACAAAAATAGTAGCAGTAGGACTTGTAGATCTTGGAAGCTGGGGAGCTAAGGGGGCTCATCTTTCA CTTACCAAGGGCTTACCCTTGTTTTTCATTCTTTTATTTTTTTCACATAAGCCTTTTCAGAAAAATATAGGAAAAGC TGATAGAGTCCAATTGAACTAAACCACTTTAAAACTTTTTGTATTTTGGAAAATGTGGGGACTACACACAGACTGTC TTCTACTGCAGAGGCTCTTTTTCTGTCTTCATGGTAGGGATCCATTTACAGGGTTTGTGGGTCTGCTTTTGGCATCT GGCCCAGCCAGCCCTTGGATTGAGGCTGGGTGGGGCATGCAGGTTGGCCCTGACCCTCTTCTGAGCACCTGGCTGGC TGGACAGATAGGGCCTTCAGTCACCAGCTAGGCTGGCCTGACCCTAGACCCTCTGGAACGTGAGAACGTATCCTGCC GGGCCTCTGTGTTGAACCTGGGAGGAGAGTTGTCTGATGTCATTGGATGCCCTATGAGTTTCTGCCCTCGAAACGTG CCCCATGGAAAGCGTGAAGATGCCTTTGAGCTTCCCGAAGGGCAGCTGCAGCAGGAGGTGACCTGCGTTTTGCCTCT CTCCTGCTCATCTCTAAATGTGTTCAGGAACTCAGTCGACCCTCAGCCGTGCATGGGGTCCCGGCTGGCTTGGTATG TGCACCTGCCGAGTCTGTGCTGCCAGTTATCCCCACGGCCTCTCCGTGCAGGTCGGTCTGACCAGTGCCAGTCGGAT GGTTCCTCAAGGTCCACGGGCCATGAGAACCTTCCTGGGAACTTCACGAATTCGTTTTTTTCTGACAGATTGGGAAA TTAATACAGACACTTGCCGCATTCACGTTACTATAATTGATCTTTCAAGGAGGAGAAGAAACTGTTCTTAAGGACAA ACACTTAGAGAAGCACTGCCAGTAAAAATAACATCCAAAAAAACGCGCTCTGTAGGACTTTTACCTGCGGCAAGTTC GGCTGTCTCATTGCTTTTCCTCAGTGCCGTGAAATAATGATTTGTGTTGTATGTGCTTAAAAAATGTGATTATTTTA CTTTATAGAGTGTTCCTTAAGGAGGTCTCTTGAGTCAAATAAGCATGTTTCTGTGAGGAAAACTTGCCAGGCGCTCC TTGGCTTTATAGAAATCGTCTGTTTTTCAAAAACGAATGGCTGAATGCCCTGGCGAGCCTGGAACCCCTTGTTCTTG CCCCTGCTGGCTCTGCGATTCCATGTCGGTGAGGCCTGTCCACGCTGACGGATGTTGCCTCCCGTTTCTGCCTGAGA GGGGTAAATGATCAGTGGTGGATAGGGAGTTCCTCTTGTGACTTATGTTATCAATAACACAAATTGTGCATATACTT CACCCCATGCTAAACATTTATAGTGCAGTGTCCTTTAGAAGCCAGACAATGGCCTCGTCTTTCAGGTTGATGGCTAA AAAGACAAGACAGGAAGCCAAGGTGTTTCTTTTCAGCTCCACAGATCCTTGTGATGAATTATGTTCCGTGACGAGAG GGTACGATGGGGGCCGACTGCTGGCCCCCGGACACACAGTGCTGCACATGGGGCCTGCAGAGGTGTTAGCGTAGCCC GTGATGGTGGCAGCTCTTGGACCTTAGTAAAATAAAGGGAAGCAGCATAACATATGCTTTTAAGTGAGGGTATGGCG TGAAAACCCTGCCGTTGTGTGATAGGAGACGGGCTCTGCAGGCTGAGCCTTCCAAGTCGTGAATGATGAGGTTTGCT GTGCTCCTCTGATTGGCAGCTGAAAGGGCAGGTCAGAGCTCCTCTCTACAGCACTGCGGAGAATCCCAGGCTGTGGA GCACTGGCCCATCCACCCCAGGACAGAGCTGCCTCGCCACAGAAGAGCGAGGTTCTGGGATTCACTGTGAAATTGTT GTATGGTTTCTGATCTAGAAAATCAAACCTAAACAATGCGCAACCTCACCAGCTTCGGTGCTCTTGATGTTTTCTCC CTGCAGCTGGTTCTTTGCTGACCTGGGGGCAGAGTAGACAGTGGTGGCAGCCAGGTGGATAGTATTTAAACAAGTGT CACTGAGATTTAGGGTCCTTATGTGCTGGACTCATCTAAGAAAAAAAAAAGCAATGCAAAAGTTTTATTTCTGTCAA TTTTGTAACTGTGTTACAAGGAGACAGAGATGGCAAACGTGTGTGCCTGTGTCTGTGAGTCAGAAGCAAACTTGTTC ATTTCATTTAATTTTAAGTCTGCCAGGAACTTCTTGGAAGGAAGAAAAGAATGGTTGAATGACAGCTACAAATAGGT GAGTTCAGAATATGATCCAAAGTGTCAGAGCAAAAGATTTTTTAAGTTTCCAACATTTGGAGTAAAAGAGCACTTTA GAGTAACAGGTAAATGGGTTAACTTCAGGCAGAGAGAGGTGGATGTTTCTGCCTCTCTGGTATGTTAAAATAAAACC CCTTAAATCCCCTGCTCTTAACAATAAGTTTCCATTTAAGAGTCATTGGGCTTCACCTCTGTTCGGCTCTGTTTGTG AAGGGAGGGCAGCTTTTCTGGGGAGATCATGCCCCTCTCTCCTTTATGTGGCCACAGAGATCCTTTCCCTGTTTTCA TGAGGAGGAAACATGGAACCTTGGCACAATCCAGTTCTCATCTAGAATTACATTGTATGCTGTGCAGGCCAGGGGAG GAAAGATCCCGGAAGTGGCAGCCACCGGATAGGCACGTTGCCGCCACAGCCAGCATCGGCGTCTGTTCAGGTTTCAG GAAGGTCACTTCTTGGCTCAAATCCCTGGTATTTCCAGGTTGTCTTCAGACTGCGGCTTTCACCCTCAGGAAGCCCC AGCATGGCCTTGGGCCCAGCTTAGAGGCTTGTGGGGGTTTGGGTGTAGCCCCGTGCACAGTATCCTGTCTAGGATTC ATAATCTTGCAACAGCCATCCCTGATGGGATTGGGTAAGATGACAGTGTCCTTTCTCGATGGCCCTGGTGCCCTGTG GAGTTGGGTCCTGGCCCTCACTACCCTGTTGCGTGGGTGGGCCACGCCCCTCCTGCTGATCAGCCTCTGTTGCAGAG AGTCTGGCCCTGTGGACCCCTGCCCCCGGCCCCAGGCCCTGTGTCTGCGCTGGGCTTGCATTGCCTGCCTCTCGGTC CCCTCGCCTCATTGCAGTTTGGTGCTTCTAATTAGTTGTGGTCTTGAAAAGCTGGTGAACAGGCTTGTCCACATTGT ATGGGAAATAAGGTTCAATGAACCCCTGTGAGAAACGCCAAGTGTGGGATTTCTGACAGTATCCCACAGAAACATCT CAGAGCCCATTTCTGTTTCCTCCTGGAGTCTCTGTTTCTCCCAGAAGAGGCGGCGTGGCCAGGGGTCAGGCAGATGT CAAGGAAGTGAGGACTCGGAGGGACTGGCACCTGTGGAATAGCCCCTGCTTCGTCTGTCTGGCCTGGTGGGAGGAGG TGTCCTTCCGTCACTGCACTTCGTCCTTGGGACCCCTCTGTGAAGTTGTTGGCATCAATGTGCGTTTACCAATAAGA GAAATGGAGATGGGGTGAGGGATGGTGGGTTACAAGTCCTGGGGAAGACTTCAGGGAAGAAGTGGGTATTCCCTCTA CTTAGCTGAACTTGCAGTAGAGACTGCCACTCTGGGAGTGACTTCTGTTCTCCTGTGAAATCCTCTGTGACTCTTGC CTGCAGTTGAGGGAGCCTCTGAGACCATCCTGATTGGGATTTGGTCAGTGGGAACTCAAGTCAGTATTGTCCTGGGG GCCTGAGTGCCAGTGTCTTAAAAATAGAGTGTCCTCCAGGTAATGTTGGATTTGGAAGTTCAGGCTCAGCACTGGAT TTGTCCTCGTGATATCACTCGCCTACTGTACACATGAGTCATTGTAAAGTTACGACATGAGCTCGCATACGTGCTGG TATTAGAGCTCCTTGGACGGTGATGTGCTGTTTTAGAGGAGAAAAAGCTGAGATGAAACAAAAATGGTGGTGGCAGT TACCCAGGGCCACGTCTGTGGATGCCATCCTCAGGATGCCATTGCATCTCGGGCCAGCCTCCCTCTGCTTTTGCAAA AGCACAACCGTCTGGCCTCTACGACCACCAACACACACCTCTCATACTCTGGAATTTGATTTCTGGAATGCTTTTTT ATTCTTCCTATATCTGTAAGATTTTCTGATATTTAAACTGGCTGCAACTAATGAATAGTTTTCAGTTTTGTTTTAAA AGTGTTCATGTCATTTAAGCTCTAAACTCTCACAATATACTTGGTTTGTTAAATGTAAAATTTTATCAGTAATTAGA TCAGCTCCTTGATATTAATGTACAGGGTAGCTCTTGCGTGCTGATCAGTTCAGAATTTAAATTGAGTTAAAGGTTAA ATGAGTTTAATTTTTGAATTGAACTGAAGCATTGTCTTGTGGCAAATTCATCCAGAATTTTTATTTCCAGTTGCTGT ACAAGTGACGGAAGTGGGTCTTTTTGCGATAAAAACATTGTGAATACATTTAGGATTCAGTGAGCTTCTGTCATTTA CTCGCTCATTCTCTAAACGTGTGAGTGCCCTGCTCCGTGTCAGACCAGATGGCAGGCCCTGCATGGGGTGGGGAGGG GCCAGAATGTGCAGCCCCACCTGCAGCCCAAGCCCAGCTCAGGGGCAGACAGGGGCAGACGGGGAAGTGGGCTGTTC CACACCTTGAGATTGGTGAATTCCTCAAGACAGCGGCTGGCAGGGGCCCAAGCCTAGGTGACTGGCCACAGAGCTGA ATGGGGCTGACCGAGTTAGGACATCACTGGGTGGTGAACCAGGAGGCCCTGGCTGCTGACAGGATGTAGGGGCATGG AGGGGTAGCAGAAGGAGGCAGTTAAGAGGCTGCGAGCCCCCTCTTGGGCATCTGACGGGGTGGTGCTTCCTCCCAGG GCTAGGGGAGAGGTGAGCAAAGAATAACCTCAGGAAAAGAAATAAAAGACCTGGAGGAACAGTTTAACAAGTGGGTG GCCATGAAGAGCTACCAATGGAGACTGAAGGAAAACCAAGAAGGACCAGAGAGAGAATGGAGCCAGGAGGCTGGAAG GAGAGAGGCGGGTTTTGTGTCAGGATTGCCCAGAGCTCCCCGGAGAGGAGCATCTCTCCTCTCCATGGCAGAGCACA GAGGGTGGAACACTGACGTCAGATCTTCTTCAGGCCCTGAACGTAAGAATTCCTTGGTACCTGGTCTGCTTTGAGAC TGACATGCTGTGTTTGATTAGTTTGACTTCGGGATGCCAGCTAAATGCTGTTTGCTCAGCATATGCCTGAACTGGAA ATGGTTCCATCACAAAACAAACTGAATCAAATAGAACGTGGGGGTGGCTCAGTGGGGACACAGAGCCAGAGGTGAGT CTCCTTCACCCCAAACACCCCAAGTTCTAGATTTGTTCTTGGAGCTCTGTGTCAGGGTTGGGGTGGACAGGAGGGAG AGAATATCCTCCGCAGAAACACAGTTTATCACACTGCAGAATTCTTAGTGTTCTTCTGACAAGGACGTTTGTTCAGT TTCCCTCTAGACTGGGCCATGCTCTCTAAATAGAACTGAAATCATAGTTACAACTCAAAGGCAGTTGAGAGAAGAGT TCTAGCTTTGTTCCATAACGTCCTGTGTCTTGATTTCACTGTATCTGTCTGTTCATCCTGCTGGGGGCGTTAACCCA CCTCTTCTCGTACAGGGTCATCTCTAGTTTCACTGAGGACCTCTGAGAACCCTAGTCCCTCTGTCCATACACATCGG CAGGAGACTCACCTCCCCCCTTTCCTCCTGTACCCCATCTGATCCACATGCACAAAACACACACATGCAAATATTTA AAAGTAGAAAGGCTTATGGACTGTATGACTTCAGTACACCTGCAGATTCATGGAGTGGTTCTGGAGAACATTGGTCC TTCTGCCGGCCTGGCAGCTACTTTAATTTCTGGTGTCCATTGGCAGAATACAAGCTCATAGTGTGTGCTGGGGGCTG GGTGGGGCAGGGGATTACCGTTTTCTTGCAGTGATTGTTCTTGATGGAATCCACATTACTGCTTTCAAAGCTGCTTT TCCTGTGCCTTCTTCCAGAAAGCTATCCTCCCGTCCTTGGTTGGCTGGGGCAGGTGAAGCATTAGGAAATGCTCTGT CTCTGCATTCTCTTCGAGTAACACTGGGGAGTGTTCATGGCTTCTGGCAGAACAGCAATGTTAGCCTTCAGCTGCTG AAGCAAGCCTTCTGCTCATTCTAGAGGCATCTTCTAAACAGATCTGCACTGGTCAGGTGGGGCTGGAGAAGGACTGG GCTGAGAGCACAGCTATGGGAGGCAATACTTGTTCTTGTTCCCAAGAAGCTGATGTGTCGTCCGGTGAGGTCTCTCG TCAGCCGAAGGTTGGCACAAGGTCGCCAGGCAAGGGCTTTTTGTATGTGAAGTATGCACATTCTAGCCACAGAGTTT TCTGCCAGGGTGTTTAGACAAGCTAAAAGTGGAATATAAACTGTATTCAATTTGCTAGGTTGCAATTATAAGGACAA ACATGTTTTTAAGACTTAACCCATTATAGTAGGAAAATACAAGGCTTGGGGTATGCTGACTCTTTCCCTTGTTCGTC TCTCAAATAGAAAAATGGTGTGTGTAAGTAGGTGTTTGTATATGTACATTATAAGACATTCTAGAAATTTCTGTCCT ATTTCTTTAATATTCTTGCCACTAAAAATATATGCTCCTGAAACTAGGGAAAAAGAAACTGTTTATCATTCTTCTGA ATTATTACAGATACCCCAAAAGTAGCCTCCTCCAAATAGTGGTTTTTCTTTTCTAAAAATCACCTGGAAAAATACTG AGCTTTCTGATCTTTATTTTATCCTTTTCAGTGGCTCTGTTTGGAAGAGTTATTGTACAACCCAGCACTGCTTTTAT TAAAAAGAAAACTGGGCCACTCATTTCCTTCAAAGTTTTTGGTGTGTTTAAATCTTCTCTAGGTAAACAAAACTTTT ATTGAAAATAATATTTTGAGACCGTGACACCCTTCTCACAAGAAGCGGTGCTGAAAGCCCCCTTGTTGGCTGGTCCT GCAGGCAGCCTGGCGTCTGCTTTGCCTGTGGGCCGTGCAGGGTGCTGGGGGCAGTGGGGAGAGGCGTCAGTCCCACC TGCAGCTTTCGGGGGGGTGCTGGGGAGGCAGATTTGACATGAACGCAAATAAGTGCAAGGACCATCAGGGCAAAGAG ACCCAGGAGACCAGGCCAGGGGAGGAGGCAGAGAGCCTGGTCAGGCCAGGCTGGTCCTCCAGGTCCAGGCCCTGCAG GATCCTGGAAGGCGTGAAGATGGGCTGGAGGTGTGAGCACCAAGAATGGGGCGCGGCCTGACCTTGGGTCTCTAGAA GTTACCCTGTGGTGGCATTTTCTATAATTGATGTCATAAATAGCTGGCTTCTTTGTTAGAATTCATTTACTTACTAA GTTTGGCAAATATGTTGAAGGAAAGAAATGTGAGTGTGTGGATGGATTTCAGCACGTTGACATCAGTGCCTGTCTCC TTGGTGCCTGTTGGAGACACCGTGTTGGAATAAGGATGAGGTTCCTCCCTCAGAATGGTTGATCCATTTCCTTCAGT TCTTCTTCAGTTTTGCAGCTTTTCTCCCCTAACTGTAGCAGACCATCTCCTGGAATCTCATATTAAAGGCATAATTA ATCATGTGATATCCTCTCGTTTTTTGCATCAGAGTTTTCAAGAGCCCTCCAGATTTTTATTGCCTGCAGATCCGTGT GCTTAGACATAGTACCGTCAGCAGTAAACTGGCTTCTGGAGAAGAAATTGACAAACAACTTTATAGTTGCATTTTTA GCCTTAATATCTGAGGGCGAGAAGAATGTTCAGGATTTATGAAGTTCCTGAATTTAAAATATAAGCAATAAAATGTT CCTAATGTGGGGTCCCCATCTGCATCTATTATTACAAACTCTTAAAGTCACTTTAGCCTAACATGTCAATAGGAGTT TTCTTCTCTTTCTCTTTTCTTTTTGACAAATTGTGTCCAAGCAAATTAGTTTGCTTGCATGAAGCGTCATCTGTGTT TGCAAGCTGGAACAGTTTTGCTGGTTAAGCAGTCTAGAGATGATAAAATTTTTTGTCCGAGTATGACTTTGGTGGTG AATTTAAAAGAATCACGGCCGCTGCTGGAAGCTCAGAGGAGAGGTCCATTTTAAAGGGCGTCTGCTGCACTCAGCCC AAAGCGTTACGGGGATTGTTTGAATTGACAAAATGAAAATATGTATTATATTTTCTCTTTTTAAAATCCATTTACAG TTTATTTGTCTGATATGGAGGAGCAGAGGTATAAATTACAGAGAAATTGTCATCATATCCTCTGGATGATAAGTAGG GCCAGGGCTTCTGTTTATTTCGGTGGTTGGTTACCCACTCAGGACAGTAAAATCACAAAGTTTTAGCTAAGGAAGGA GAAATCCCTTCTGCCTGTATAATAAATGTTGTTTTGACCCAACTACACTGTTTCTTGTGATAAAAATATGTCACTTA AGGTTTCCTGCATCTGCCATTTGTGAACGTACAGTTGAGCGACATTAGTTGGTGCCATCTGTGAGTGCACAGTGCAG CAACTTTAGGGGGTTCACAATGTTCCGCAGCCATCACCGCCGCCCAGCACTGGCATGTTTCACAGTGTTCCGCAGCC ATCACCGCCACCCAGCACCGGCATGTTTCACAGTGTTCCGCAGCCACCACCGCCGCCCAGCACCGGCATGTTTCACA GTGTTCCGCAGCCACCACCGCCACCCAGCACCGGAATGTTTCACAGTGTTCCGCAGCCATCACCACCACCCAGCACT GGAATGTTTCTGTGTTTTGATTCTTTTTTTTTTTTTTTTGAGACTTAATCTCGCTCTGTCACCTAGGCTGGAGTACA GTGGTGCGATCTCGGCTCACTGCAACCTCCATCTCCCAGGTTCAAGTGATTCTCGCGCCTCAGCCCCCCAAGTAGCT GGGATTACAGGTGCACGCCACCACGCCCAGCTAATTTTTGTATTTTTAGTAGAGATGGGGTTTCACCGTGTTGCCAG GATGGTCTCGATCTCCTGACCTCAGGTGATCCACCTTCCTTAGTCTCCCAAAGTCCTGGGATTACAGGCGTGAGCCA CCGTGCCTGGCTTCATCTCCAGAACTTTTCTGTCTTGCAGAACTGAAACCCGTACCCATTAAACACTAACTCCCCAT TTCTGCCAGCCCATCCCCTGGCACCCACCCTACTCCTTTCCGTCTTGATGCTAACACACCTTGTGTGGGTTCCTCCA AGTCAAGAGAAGGAGTGTCCAAAGACCCCTGAGACCAGAACCCTCTGCCAACGTTGGTAGTGCTGTTTCGGCCTGGA GGGCAGGTGGGCCTCTGGGCACTTCTTCGTCAGGACATGGAGCCATTTCGGGTAGGGCCCTGGGTCTACCCTGTCCC AGCCCCGTTCCCTATCAGAAACCCGAGGCCCAGAGGTGCAGGGCAGCTGCAGCACCAGGGTGGACAGATGTTGATGA TCAGTGGGAAGGAATTCAAAGAAATAGAACATTCTACACAAATGTGGGGAGGTATCTTTAGTAAAAACAGGACCCAA GTACATGCAAAGTGCACTGTGAGGGAGAGAGATGCTCTGAAGAAAGGCACTGTTTTTACATTAATGAGCATTTAAAT GATGCTGGGTTAACCATTTGGCTTTTTGTACCTTGTCACCATCTCCTTTATGGTGTGATTGGACTTTCGAGAGAAGG TGGAGGAAGGTTAATAGATAGGTAGGAGAGTTGCAGGCAGGAAAGACAGAAGGCCCCGGGGATGATAGGTGGGGCAG AGGGAGGGATGGAGAGGTGACTTCAGGAAGAGCATCAGCTGCCGCAGGCCAGGGCACCCTCAGGAAGCAGGCCCCCC ATGCTTGCAGCTGCCCCCGGGAGCCCTCATCCCCAGTCTGACAACTCGAGGTAGATCTGGGTTGCTCTTTATTTTTT GATGATTTTTGCATAGTTTCAAGGATCAGTGTCTTCTACACTGATATTCTATCTCTGTAAGTTTCTCCGAGGTATTT TCACCTGTACTGACATTGTAGTCTTTCCTTACTCTCTTATTTATTTATTTACCAGACCCCACCACTGGGTGCAGTGA TCAAAACCAAAATATCAAACCAGCACCAGAAACTCTTCAGCAGACCGGTGGAACATGCCTTAGAGAAAGCCAGAGGG GTCAGGCATAGCCTCCTGTGCCTGGCCTGCGCTCGCCTGGGAAGGGCACCCCTCGCTGTCCAAGAGTGACCCCAGGC CACAGAAACCACGCTGAGTACCAAAGGCGAGTCCCCAGGGTGTGGGCAGGCTCCTTGCTGGCATGTTCAGCCCAGGC TTGCCGGAAGTGGGGCTCAGGCTCTGTCTGTGGGATAATGATCAGAAGCTTGGCAGTCATGGGACCAGGATAAGAAG AACCAAAGGACAGCTCTCCTCTCATGGTTATGGGCCAAAAAATAGGTGATTGTTTTAACTGTGGAAACTGACCCACT AAGGGGGACCTGCTGAGAGGAAGGCCAGTGGGGCCGCAGACAGGAGGGGAGGCCACAGCCGCCCACCCGCTCATGGC CGAGCGCCCCGTTTCCTGAACATGTGGGAGGGGCAGGCTCCCCACATGGGAACCACTGGGCCGTGACTGTGGCGCTC CAGCTGCTGGCAGTGCACACCCGGTGGGGCCCTCTGTGGCTTGAGCTGCGTCACCATGACGCTGCATGCCCAGGTGG TCATCCAGGAGGATGACTCTGTGCAGACCTGTGTGCCCCCGGGCCTGGGCCTCCTGCACCCCAGAGGTCAGTGACAG TGGAAATTGCCACAGACGTGGGTTTGTGGCCTTCAAAGCCTTCAATGTCACAGAATTCTGAGTCTTTAGCTAAATTA AGTACATGTTCACGTGAGTGTGTGATTTCTCCATGAGGACTGAGCCTCATAGTTTGTCCCTGTACCGGTGTCAGTTC ATCGCTTTGGTCTTGGTGGAGAATTCTGCATCGCAGGCACATCGTCTGGTTAGCGGGAGACATGTTTGGCCAGCGGT GAAAGACTGCCTTGCCCGAGTTCCTGAGACTTCGGGGCTACTGATGGCAGGGAGAGGCTGGCCGAGGGCAGGGCCAC GCGGTCCCCTTCTGCTGATGTCCGTGAGGACTGGGCACAGCTGCCAGAGTCAAGGGCACGGAAGTGCAAGCAGTCCG TCCTTTTCTGAAGCCTGCTCTTTTTGTTTTTCCCCACGTGTGTCACCTTTTAACGTTTTTTTCCTGGCTTTTTCATT AATGTATGTAAAAATATTAAAAGCCCTTGTATATTACATGAAAAACTATGTCAGCTGCCTTGCTTTTTTCTATTTAT TAAAACTTTTCAAGCAGTAAAAACATTTTACTTGTTAATGAGGGAAAGTGGGAAAATTAATGACATAGAGCTTGGAT CCACCACGATGTCTCCTCTTAACCATGCGCAGCCAGCTTCCCACCGCATGGAGTTTAATTTCTGCGATAGGGTTCAG TAAGCAAATGCAAATAGATTTAATGATTTGCATCAGTAGATCATTTCTCAGTTTAATATCCTCTGATATTTTGGGTC AAGGACTCTTTCTTTGGGAGACTAGTATAATTTCTAGAGGTAGAATTATTAATATTAGTGATATTACATTATGTTGA AGTGAAGTGAGATAGATGTATCATTTTCACAAAGTCAGATTTCTGCGTGACTTTTATTCATTGTGGTGCAAAGGAAA CCCTGGCTGCTGAAGTAGACTTAGGAGCAGGCAGAATTCCTGGACGCAGGTGCCTTGGAGTGAGGTGACCCTCTCTG GCCCCCAGCACCTTGCGAGCAGTGGTTTTTGCATCTGTTCACCAGCGCATGTGAACCTGTGGGCCCGGGGGACACGT GGTCCATTTTTGTTGAGTACGTTCAACAAAGGAATGAATTAAAATGAGAACTCTTTTCAGCAAACGCTGATGGAGCT TTCTGTGTCTCGTGTGTGGCACCATGCTGACGGAATGACGAGAAACCACAACCTGGCCTCAAGGAGCTTTGTCTACT GCGGGAGACAGAGATGGTGGCAGATCAGTCCTGGAGGCACAAGGAGAGAGTGGTAGAAATACACAAAAGGCATTGAA GACCAGTGGAGCATCAGGGTCACTTTCACAGGGAGGAGGCCAGGGGTCTTGTTGCCTGCCTGCCCCAAACGTGGCCT CCATTCCTTCTTTCTGTCTCCCGCTGGAAAGGCTGAGTGCAGGTGCCAGCTCTCTCTGCCTCACTGAGCGGGTATGT GTGAGAAGCGTAGGCCTACTGGCAGGCTCCTGGGGAAGACGTTTCTCCCCTGATACAAAGAGCAGCATGAGGAAGAC TCTCCCGGCTCCCCAGTCTGCGGACACAGTTGTGTGAATGTGATTGCAGGAGGGAGCTGGGCAGCTGTTATGTGACC ATGAGGGCGTGGGACTGGGGCTGAAAGGTGGCGTGCTGCCAATGAGAAAGATGGGGAGAGCTGGGCACCTGCTGGCC CTGTGGCCGGCCAGGCCGCCTCTGAACACCTATTCTGTGACCTGATGTGCATCCTCATCACACACTGCAGCCGTGAG CAGCACGCAGGTGATGACGGGTCATACGCCATCTGGGGACTTGATGCTCCTTTTAGCAAATACAGAAAGTACAAAGG AAATAAGAATCAGTTCCATTAATCAGTGATAGTCTTTTGGTGTAATTCCTTCTAGCTTTTTTTTTGTTTTCATCGAC ATATTTAAAATCAGTTTTGAATTCTACTTAATTTTATATCTTAAGCATTTTTCTTGTTCTGACATCTTTTTAAGCAT GATTTTTCAAGGTCTGTGCTTGGTTCTTTGTTAAGGCCTGTTGCGTGGTTGTACGTGGTGGTATTTTAACTGTCTAT GTCCTGGTGAACCTCTATGTTTTTGTTTCTGTTTACTGGGCTGCAGTAAACAGTCTCGATGAACACTATGTAGCCCT GGGTGAGTGCTTCCTGAGCAAGCTTGCTTTTTGGCCTTTCTCCCTGTAGCTTTTTTGTCTGTAACACCCCTTTCTGT ATTGCAGGTTGGCTTCTGAAATCAAATGTGACCCTAAGTGACTCCTCACTGTTTTTAAGATAAGAAAGCATTAGCTC TGTGTTTTCCTAGCCCCTCCGTTCTTGTACTTAGACCCTTCACTCTGAACAGCAGGTATGCCAGCCTGTACTTCCTG GCATTATTACCCAGTGGCCCATAGCTCAGAAGTGACATTGTGTGGTGTGAACGCTGTCTCCGGAGCGAGATTCCTAA CTCCTCTACTTTACAGCTATAAAGTGGACAAATCACTTCACTCCATGCCTCAGTTTCCCCAGGTATCACACATGGGG ACTATAATAGCATCTAACCACATAGATTGTTGGACAATTAAATGAGCTGACCAGCAGGAAACTCTTAGAACAACGCC ACCCCATAGTAAGCACTCAATAAATGGCAACTGCTGCCGTTGATGAGGATGACGATGGTGCTATTTCTACCACTTCC TAAGGTCGCCCCTGCGTGCTCAGCAGCCACCTCCACCCTGCCCTACCCGCTGCCCACATATTTCATAGGCCTCCTTA GATGTCCCTGTCTTTGAGCCGGGAGCCCTCGCACTCCCAGGCTTGCTTCAGATCCCTTGCCTGAGCCTGTCCAGCAC TTTGAGCCCGCTCTGCCCGAGCGCTGTTCTCCTTCCGTGCCGTGCTGTCTGCTGTGAGTCCTGGAGAACAGGGACCA TGTCTATCTTGCTGGCCTTAGTACCCCTCACAGGGCCTAGCCCAGGGGGCACTCAAGAAATTGTAAAGATCCATAGG CCGGGCGTGGTGGCTCACACCTGTAATCCCAGCACTTTGGGAGGCCAAGGCAAGAGACTCACTTGAGGCCAGGAGTT TGAGAACAGCCTGGGCAACATAGATTCTGTCTCTACAAAAAAACTTAAAAAAAAAAAATTATCCAGGCCTGGTGGAA GGCGTCTGCAGTGTCAGCTACTCAGGAGGCTGAGGCGGGAGGACCGCTTGAGCCCAGGAGTTCAGAGCTGCAGTGAG CTGTGATTATGCCACTGCACTGCAGCCTGGGCAACAGAGTGAGACCCTGTCTCTAAAAAAAAAATAAAATAAAAAAT AAAGATCCTGTAAGTGAAGGGTTAGAAGAGTGGAATATATGTGCTCTTAACAAAGAATGGTGTGATTATAGAGATGG GAGGTGAAAAGTAGCACGAATTCCAAGTTTTATTTTCGGCAACTCCGTCAGAGTCCTGAATGTTCTTTACCCAGTTT CTCACTCCCACTGGGACTCTCTAGGGCCAGCGGGAACCCTGCAGGCATTCGGAGAACTGAGCGCTGGCTGGACCTCC TCAAAACGGGGCACCCTCCAGGGAGCTGTCGAGGGGCTCTTCTGCCTCTTCAGAAACCATCATCAGCTGTGAAATGT GGGCTTCCAAGTGGTTTTGTGTCTCCTCAGTTTACAGAGTCCATGTTTTTGGTGACTCTTGCCTTGGACCCTGATGG CGCTGGGGGGTTTCATCGCCATTTAACCCTCCGCGTCTCACAGAGACCAAGCAGTGCTTTCGGGATCGCTCTGTTGG TCTCTGTGTAGCACGTGGCCCCCAAAATTTAGGTGTTGAAGTCCTCATCCTCAGAACCTCTGGATGTGACAGTATTT TTGAGATAGGGTCTCTTAGAAAGGTGATTAGGGTAACTCAGGGTCATTAGAGGAGCCCCTCACCCAGTGTGACCGGT GTCCCCATGAGATGGAGGTTGTGGCACAGACACACGGAGGGATGGCCACGTGAGGACCCTGGGAGAAGGCTGCCTTC TGCAAGCCAAGGAGAGAGCGCCTTGGAGAAAACCAGCTGTGCCTACACCTTGGGTTCAGACTTGCAGCACCCAGGCT GCAGGGCTTCGTCAGGGCAGCCCTGGCGGAAGAACGCAGCCTCGTCGGTGGGTTTGGTGATGCTGTGCAGTTCAGCT TTACCGTCTTGCTGCAGCGGGAACGTCCTGCTGTAGAAGAGGCGCCGCCATCCCAGACAGTGTTCATAAACACCGAC GGCAAAGTCAGGACGGGCAGGAGCGTTCTAGGCAAATGATGAAAATGGTATTTTACACATATTTGAAAAGAAAGGTT TGAGAAGGCATCCATTATTAAAACCAAATTCAACAGAGAATTTAAAAACTGGCTGTGGTGAGCAATGTTAGTCCCAA ATCACTTTTTCACAACTTGTTTCTGTTCTGTCGTAGGGCTAGTGAGACCAGCTTTCCCTTGAGTTCTGGGGGGGGAC GTGGAATGTTTGTGAGGCTACCCTTCATTGAAGGGGGGCCCGTGATGTTGAGTGTTCACCGTCTTTCAGAACGTTTG TGCGGTGGCGTGTCCCTTCTGTAAATTGCTGTGACCTGGGCTGCATGCTCCACAGTCAGACTCGCTTCGCCCTCTTA CTGGTCTTCATTAATTCGTGGTCCCTGGAGTGGAGCGGGAAATACAGATATCCACCTCCTCTCATTATCCAAATACA ATAACAAATTACGAAGCATCTTATCCTACCAACCATTATCCTATCAGAAAGCATGTGCTAATTTCGAGGAAGCAAGA GGAACTATGTCAGATGTGCCATGAGATGTAAAATGTACTCGCCCTGTATCTTGGTCTTCTCCTAGCAGTATCTTGTC TGACAATCTCCTTGTTTAACTTCTTGGGCTTTTTCTTTGACATCTTCCCACCTTTCCCTAAGGGTTTAACTGTCTTA GATCTCCTTGTCTGCTTCTGCCCGAGACTCTGGGTCCCTGTCAACTCGGGTAGAATTTTATTGGTATTTTTAGGCTC TTTAACATACTTTAATCATTGTGTTGCTGCATATATTTCTTCTAAGATAGAAGTAAATTGTAATTGTCCTCAGATAA TAACCTAGGACCTTAAAATACACACAAATGTACACACTAATGAATTTTGTAAATATTACATAACTCGGTAATTATTG TTTCAAATTAGATAATGCAGAAATCTCTGGATTTTTATGTCGGTGTTTATAAAGCATTTTAATGATAATTGGGGAAG TTGGTTGTGGGTTTTTAGCTAGAACAGGAACCCATTATAATTTTTCCCAATTATAATAATGGGACATAAGCCTCTGT AACCTGAAATTTTCCTCTATGACATGTTTTCAGAAGTAGAATTATTAGATTTGATGAGTGTGGATGCCTAGGTTTGT AGTCAACTTTTTGAACTGAGCTAATCAATGCATATTTGGGAAGAGCATATAATCCAAAATATTGGGTCTACAAATGT AAGATTGCCTTTGGTGATGAGTTGGTGTCATCTGTCTTCTGTAGGAAATGAAGGGCCTCTTGCAGTGTGCTGTGCCT CATTTTAAACCTTTAACTGGCAAGTGGTCCTGATCTTCCCTCTGGACAGCTGCGGGAAGAGGTTTCCCGGTTTACCT TGGCCCCCGTAACACCACATCATCCCACGTGTGCGTGAAGAGCCCGCACAGGCCCCCTGTGCGCCCGGGGTCAGGTG TGGATGGGGTCGGGGTATTTCCAGTACTTGCGCTTCGGAGTCTTTTTAAAATTGAGAGCTCATCTATTGTTGATAAA TGGCCAAATATAAATGTATAACACCTTGATTAATAGGCTGCTATGAAATTGAAGGTGGTCTTTTCTAGGAAATCCTC ATTGAAATACTGCCCATTTTGAATAAGTCTAATAGTACGATGAACCACACCCTTAGTGGAAACGTTATAGGATGCAA ATAGGAAGATTTGTGGGTGTTTTTCCTTCATGAATTTGTTGTTATCTTTGCAGAAGTGAAGAATATCAATATTTTAT GGCCTTTCTTTGGGATTCGTGTTTATTACCAGTGATGCAGAGCGTGGCCCTGGTCCTCAGCGCCTCTGCCTTTGTGG TGGCGGGGGCCAGTTTGCCTGGTGGGGAGGTGTGTGTGTTTTCACCAAGTTAGCAAATTTCCTGTTTTCTCTTTTAA AATGGAAGGCTAGCTTCCTCTCCCATTGGCTTTTTCTGGAGATTGGAAATGGTATTACAGTCTTTGTTGTGTTATTG TGGAAATCTCCGGCGTCTCTCCTGATGTTGCCGCCCTGCACGGCCGTTGGAGAGTACTTGCAGGCAGCCCCGCTCCA CACCACTTTTATCATCTTCATTTTCATTCTTTTGTGAAAATGTAGTTGCTTTGGAGCCTTTCGAAAAGTGTGTCAGA TCATTTTTGCCATTTCTCTTTTTCCTTTTACTTTCTGTTATTTTCCATTTCGATCTCAGATACCCTTCTTAGGAAGC TGCATCCCCGACGCCGGGCTGGTCTGTTCTGCTCTGGGGGCGGCGTGTGCTCTCATTTCACTCCCATAATCAGCTTT GGCATATGGGATTCAGAGACGCAGTGCTTGGTCTTCTGAGATGTTTTGTGCAGCAGCTAGGTGATGTCCCAGTTCTC CTGGAATATTTGCATCGACCAGGATGCTGTTTCTGCGTCGGAACGTGGTGTCTTTGTTTACCCTTAGGCATTATCTT GCTTGTTTACCTAAATCTTTAACTCTCCTTAGGTGAGTGACTTCACTGATACTAAGAGTGATTAAAATAATGTGATG TATGGAGTCAACTTAGGCAATACATTTACCTGTACACCACACGTCCAATATTTATTCAGAATGATTTTTTTCAAATA TTTAATAAGAATGAATAATTGAATGTACTATAGCCTTCTTACTTTGCCCTGCGATCCCATAAGACCTTTAAAGCTAA AACTAGTTTGGGCCCTTGAGGGGTTTATAGAAATTAGGTATGTCTGAGTATGGAAATGGCTGGCATGGTGAAAGAAT TGAGTCCTTAAGTAATTTGCTATTCCCAGTGATAATTAGAAGAAACCCCTGTTCTAGCTCCATTTTCCCATTTTTTT TAATGTTTTAGGGGAGATTTCTTTAGGTATTAGCGGCTGATCTTTTTTTTCTTACCATGTACTCCCGCTGTAAGGTG AGTGGTTTTGGCATATTGTGTTGCCTTGATGGGTTATTAAATCGTCACTTGGAAGGATGAATGTGGGTTATAGAGTA TGTTGTGCCATATATCATCTTAGTCATCAGGAATGTTTCAGAAAACTGAATAAGAGTAAAGTTTTTTAAATTTATGA TTGAAATTAGCAATTTTATTAGGTCCTTTTAAAAAAACCTACAAACTTTTAAAGTTTTTCTCAAAATATACATCTTT GTTCTCAGAAGAGGTCTGCAGACTGCCCTAATTTGTCTTTTGAAAGGACACAGAATTTTAGCAGAATACTTATGCTG CAGAAATGGACAAATGCAGGTGCTGTTCCTTGGATGGTCAGCATGGAAGGTTGACGTGCTCCAAGATTTACTGTGCG TCACCTTAGCCATCAGTCCCATCGTATTCATTTAACTCCACTAATAAGAAACGGAGCAAAAGTGGAATTATGAGTTC AGTAGTATTCTATGAAAGGTCAGTTGTTAAAAAGGCAGAGTCTGACATTCTGTGAAAAAGGTGCCTTCATTAATCAT TCTGATGGGAGAGCACGGGGCGTTCTTGACCAATACCAGTGAACCTTGCAATGCAAAGTTTCAGGGTCTGATGTGTA AGTTCTTATATAAAAACGAGGATCGTTTGAATATATGTTGAGATCATTCAAGGAATTGCTTTACCTTTGCTGTTTAA AAGTGTGTATATGATATAGAACACGTTATTAAATGTGCATTACTGTTTTGAAAAAGGAAAAACACCTGTTAATTTTA TAGATAAATTATGGAAATCTGTGGTAGACACAGCTCCAGGCAGTAATGCATTTCCAAGCGAATGAATGGACATTTCC TATATGGATCATCTACAGATATTGGTAAGGTTTCTTTAAGTCTCTTTTGTACTCTGCATTCGTGGCTAAACCTATGC ACTTTGACCCTGTTCTGCAAAACAAACCATGGCCTACTTTCAGACTCTCCTTCGTTCTTTTGCTGTTGGTTACGGTG GCAGAGTGCCTACTGTGTACACAGAATCTAGACATTTCACATTGAATTATCTGAGTATTTATGTGCCCTGACAATTC AGCGTTAAAGTTCAATACAAATATATAAATTATTAAGCAGTTAACCAGTGACACATTCATCAGCTGAACGTCTTTTA TTGTGGCCTGTAGACAGATTATTTTCATTCAGCCATTAAAGCACAATATTGTCGGGTGAAATTCTGTTTCTGGATTT TCTTTGTCTCTGTTGCTGCTATGGAATTTCATTGAAAGCATCGAAATATGAGACTAACACAGAATACTGAGTGTTTC TTTTCAGAAACGGGAACTTTCAGACATTTTCTCTCCAGCTGAATTCAGTAAAGAGCAGTGTGTGTGTGTGTGTGTGT GTGTGTGTGTGTGTGTGTGTGTGTTCCTTTCCCAGCCAGCAGTGTTATATCTGAAGGGAAGGGTGGGGATGAGCTGT GGTGCCGCCCTTCACGCCATTGAGACGGGCTGGGAAGGTGCCCTTTCACCCTCTACCTGCAGTTGGTGCCTAGTGAT TTTAAAGATTCAGGAATGTCTTTCACCGTGATTCTCACTATTAACCAATCTCACGTATCTAACTTTCCTTACTATAT TATTAGTTACTACTTTCTATACAAGAGAGAGGTGGAGCCTGCCTGTGTCACGATGGGGAAGGCCCTTGGGATTCGCT CTGTGGGTGCGGGCAGCGACAGGGGTGGGTCAGGGTGCAGGCGGTGAGACGGCGAGCGAGGAGGTCGGGAAGGAGCC TCCACACCCCAGCAGGGCCCATTCCACACGAGACCCCAGACGAGGGGAGCAGAAGCTGCTGGTGCCTCTCTGTTCTT TGCCGGATGCTACCGTTGTCTGTGGCCACACTTGCTTCTTCAGGTGTGGAAATAGAAGCTCAGAGAAGTTAAACAAT GCGCCAAATGTTACACCTTCCCATTCTAACGATTTTGTCAATTTCGGTGTCAAGGTGATATCTTGTCTGATGGTGGA GGTCATAGTTGTCTGTGAGGACATGGTATCCACCCTCAAGCATGTAATTATGCATGGAGAGGGCTCAGTTCAGTTTT ACCGAGACACAGTTTATTGGAGTCTACAAATAGCATAAACTGCTATGTCTGCAGTGTTACCATTCTCTTTCCTTATT GTCATAATTTTTGTTTAATGGCTGTTTGTGCTACATTGACCAGGTCCATGGGTTGCTTAACATAAATGATTACATTT GCTTATGATTAAAAACTTCCTCCATTAGAAGCACTGCACCCAGGACTTGTAAATGATTTGTTGTTAAAGTTTTCTAC TTCATTAGCCACGTCGTTGACTCCAGAGTCATTGTCTAAGAGTTAGGAACACTTGTAATGAGCTGTATAATATGGAC CCTCGAACGAAATTTAAAAAGAGACCAAGCCTTCTAGGAACAGCTTAGCATGCAGATAAAAGGCTAGGAAAATGTGT GAACAGCGCCAGGCTGTAGGCTGAGGCACGTTCCATTCTGACTCAGAATGGCATGGGTGAATAAAGTCTTTTATGAT GGAGCAAGACTTGTTGTAAAAAATTATATACCATTCATGACCAAAATCCTTCAAAACACTCCGTCACCATTCCCTTC TGAACCCTATAGCTTAAGTTCTAAGCATCTTGTGAGTCTCTTGATAGAGCGTTGAAAACTCCATGCAATGGTCTTTG GGACGCCATTCGAACCTGGCCTGCCCCTTGCTGGCACCTTGTTCGTCTTTGGCTCCATCCGGGGATTTGATTGTCAG TGACCCACCTGATTACAGTGGGCTGCCATGGCCCTGGCCTCGTGGTACAAAAACATGGACGATTTTGTGATTTATTA TCGGAGGACAGCTAGCAAAGAGAACTTCCTGGAATAACTGCATTAAATGTGATGGGCATTTTTGTGACAGATGTAAA ATTCTTAATCTTGAAAGCAGTTGCATGTGTCAGGCAGACTGGGTGTTAATTTTCTGACAGCAGTAGGAGGAGCTTTT TTTCCCCATTACAGATGGAATTAGGTCTACTTTGTACACAGTACTTTGTGACAGTGACTCTGGCCAGGGGAGGGGAT ATGCTGGTTCTGGAGTCTGAGAAGATGGGGCTGAGCCAGCTGTGACTCGGCCACACGTGGCTGTGGGACTTCGCACT GACTACGCAGCCTCTGCCAGGTTTCTTTGTAAAAGTGAAGTTAACACCGATCTCACAATATCTGGGGAGGAATAAAT AGGAACACACATGCTGAGTTAAAGTCCTCAGTTATTTCGTCTTCAGCGACAGATGATCCCCGACTTACCGTGGTTCA GCGTTTGAGTTTTCGAGCTTTATGATGGTGCAGAAGCAGCCTACGTGCAGTAGAAACTGTACCACAAGTGCCCGTGC CACCATTCTGCGTCTCAGTACAGTATTGAATAAAGGACATGACACAGTCACCACTTTATTATAAAATAGGCTCGTGT TCACTGATGCTGCCCAACTGTAGCTAATTCAAGTGTTGTGAGCACGTTTAAGGCAGGCTGGGTGGAACCATGGCGTT TGGTGTATTGAATGTGTTTTCAGGGTCGATGTTTTTAACTTTCACTGAATGTATCAGGATGTAGCCCCATCATAAGT CGAGGCACATCTCTGTTTGAGTGCCTGTTACGTGCTGGCCATGGTCCCAGGCCTGCGGGATGCAGAGGCGAGGACAG TGTTTGAGTTTCTAGCGTGCTCACTGTGTGTGGGTAGGATGACCCTGCCGGTCTGTGCCCTGGCTTAGTGAACTAGA TCTCGTTGGTGTCCTGAGGCCGAGTCTTCTGTGGTTTCTCTGGAGAGTGTGGCTCTCCCTGGTCAGTATTGTGACCT CAGTTACCACTTTCTGTCCCCTACATTCATATACTCCCATTCATGTATTTAACAATTCTTTACTGCTGTAAGATAAA TGGTTTTCAATTATGAGTTTTGTCATGAAAATTTAATTTTTTAAAAAAAATCAAAAGACCTGGATGTGGTGTGAGCA TGCGGAGCTCCCCTTTCTGCCCAGGCCTTTACCTTCCTGCTAGGAGGCAAGGTCAGCCCAGGGACAGTGCTGGGAGA GAGCGGAGTTCCGTCGTTCATGGGTTGCTAATTTTTGGAGTACTGCAATACAATTAAATATACTTAACCTTAAAATT ACCCAGAATGTGATTGAATCTGTGATTCACAGGCCCCTTCTGGTTCTCCCGTGCCTCGGTGTGATCATTAGGAGGAT GGATCAACCTGGTGCTATCGGGAACGCACTGCGTTAATGGCCTCAGTGCCCAGCAATGGAGAACTTTCCACTGAGTA TCCGCATGCAGCGTGCCCGGCGGAAGGTGAAAGCTTCACCCTTTGTCTCCCTTGCCATCCTTTGGCCTTGTGTGTTT GGAAGTAGCCAGAGGTGGTGGAACAGTGGTGGGCTGGTTTGGGTCTTGTTGGCAGTGCCAAAGGGACAAAGGCTGGA TGTGGGCACGACCTCAGCCTCGTGATGGGCAAGACAGGTGGGGGTGACTTTCTGTTCTGAAAATGACCTCCTCCCCT TCTTCCTCCCCTCAAGCTTCCTACCTTTCCTCCCCCTCCCCCTCCCTTCTTCTTCCACTCCCCCACTTCTTCCTCCT CTCCCCCTCCTTCCCCCTTCCCCCTCCTCTTCCCCCTTCCCCCTCCTCTTCCCCTTCCTCCTCCTCTTCCCCCTCTC CTTCCTCCCCCTCCTTCCTCCCCCTCTCCTTCCTCCCCCCTCTTTCCTCCCCCTCTTTCCTCTTCTCCCCTTCCTCC TCCTCCTCTTCCTTCCTCTCCCCTCCCCCTCCTCCTCCTTCTCTTCCTCCTCTACCCCTTGCTCCTTCTCTTCCCCT TCTTCTTCCTCTCTCTCCCCTTCCTGTCTTTCCCCTTCCTCCTCCCTTCCTCCTCCCCTCCTCCTCCCCTTCTTCCT CCACTTCCTCATTTTCCTCCTCCACTTCCTCATCTTCCTCTTCTTCCTCCTCATTATTTTCCTCCTCCTCCCCCTCA TTTTCCTCCTCCTCCCCCTCCTCCTCCTCCCCTGCTTCCCCTCCTCTGCTTCCTCACCCTCCTCTCCTTCCTCCCCC TCCTCTCCTTCCTCCTCCTCCTCTCCTTCCTCCTCTTCCTCCTCCTCCTGCCCTTCTTTTCCTCTGTCTTCCTGTTT TCTTCCCTTTCCCCTGCTGTATTCCTTCCTCACACGCCCCCCTCAGCCTCTTTTCTGGGGACTGGCTCTTCTAGGAG GCCTGCCTCAAGGCCCTCAGGCCAGTTCCCGGGGCAGCCACTGAGCAGAACCGCCCCTCCCAGCGCCCACCTATGGC CACTGCCCTCAGGGTCCCTTCCTCCAGCATGGTGCTGGCGGATGGCGCCATAAACAGGCTGTCACTCATCTGCAGGC TGCCTTGTCTTTCCCCCAGCAGATTAAAGCCTTCATGAAAAAAGATGGAGGGCGCTTGACTTTGCGACACGCACATT CTGCCGTCTTGGGAAGGGGGAAAGAGGGGCATCTAGCTGGGCGCTGCGTGTAGCCTGCCCGGCGGGGCCGGGGTGTG GCAGGACCGAAGCCTGCTCCTCGTGTGGGGCCCGGCGCGAAAACAGCTTGTGCAGCCGCTGAGTGACTGAGGACCGT GTCCCAGTGTAGTGTCATTTCCTCGTACATGTGGAGTTTAAAGAATTATAGGTACCTTGAGCTACTGGCAGGTAAAA GACAGTAAAAAAAAAAAAAATAGTGAAAGACACAGTCTACCCTCTGAACTGATCTACAAGGCTATGAAAGCATCACT TTGAATAATATGCAGTAGATATGTTAGAAAAATGTAATATTGGTGTGTGGACCCCTCAGCCTCTTTGACGAGTGTTG TAATATATCTTGTTGAATGATGAATATGCTACCGTATGTTTCAACTATTCCTTTCTTGTGGCTGAAAGAAAAATATA TTGAAAATGAATGTAAAATATTGACATTTAGTAGTTGTTATGCTCCACTGTAATTTCTTGTTGCTTTGGATGTGGTA GACACCTCACTAATTACACGGTGTGTACATGCGCACCTGTAACAGGAGCCGCGTGAAAGTCTGATTGGAACTCTGAC TTGATCAGCCCATGTTCTTCTGCCATAGCCACAGGAGCATCTGAACGTGGTGATGGAAGAAGACCCTGGCGCCCCGT CTCCCCGTGGATTAGCGGCCCTACTGTGAGATCCTGGTGATCTTGATGATCGAGGGTTATTTGAAGCAGTTCATTTT GTGCTGCAGTTCATTGAAATGCCACCACCCAGAAGACCCCTGAGTTTCCAGAGGTCCTGGTGCTTTTTTTGCTGGGG CTTGGACCGGAGCGTCTTTAGAGTGACCACTGCCAGGGAAGACACCGTGGTCGGGGCCTGTGATTCCTGCCGGGGCC CCAGGCAGGCTGGAGCCACAGGTCTGAGTTCTGTCCAGTTCAGGTTCGTAGGCCACTCTTGCAGCTCTGTTCCTTCT TCAGCTCCTCTGGTCATTCACACGTGGCCTGGCCACTTGCCTATTGTACCAGCTCTCCAGGGCTGGGGACTTGCTAG AGCAGGGTTCCCAGTGCCCCCAGGCTCTACTTTGCTCTGCCTGGTCTCAGGGTGTAGGGGATGGAGAGCTGGACTTC CAGCCTGCTTCTTGGCTGTCTAGGTGCCAGGGGCTCGGGACACAGAGCTCCTGGAGGCCGAGCACAAGCCTTGGGCA GAGGTGAGGCAGAGCTCTGACTGTTTCATTCGACTACGTTGCCAAGGAGATGCTCGCTCGGAGTGGTTGCTCTGGCT CTGGGATTCCAAACCAAGCTGCCTTCTCTGATGTGGCCTTAGTGCTCTGGGCGGATGTACCTTGGCTCTGCCTGGAC CCTCTCTCTCTTCCAGGCCTCTGTCCCACCAGGATGATGCCTATCCAGAGCTCATTGTCCTCTCCCACTTCCTCCCC GAGCTTCCCATTCCGTGTCTCTCTGGAGGGCCCATCATCATCCTGGTGGAGGTGTTGCACTGAGGACCACAGCAGCC CTCGCATTCCTACACATACCCCTTTGCCCGTGGGATTTTTGCTGTTTCTCTTCTCCCACTGTTGGTCGTTGGCTGGA TCTCGTTGAAGGCCTGCGGAGATTCAGGTGCCATAGGGAGGGTCTGGGACTTTTCTCTCGGAGGCCCCATGAAGTTG GTATTCCTCAGCTCTGCCCCAGGGTCCCTCTGATTCCACGGAGGAGCTGCGGAAAGTCCACATTTTTGAAGAGCTGC AGGCTGGGGAGCCCCCGTGGCGAACAGAGGCTCTAAGAGAGGGGTCTTTGTTTTGGGGCAGTGAGACTGAGTGGCCA GTGAGCAATCCGTCATCAATGGAGATCAATACCCAGGAGGTGCCATCTCTCTTGGCGGGTGACACGTAACTGTTACA AATGGGTGCCTGTCCCTGTCACGTCACCGGAGTGTGCGTCTTGATGCCCTGGCTCCCTGAGGCAGCTCGTGTTTTCG AGTGTTTCCATTTTAGAGACCCGGAAAAGGGATCCTTAGAGCTGCTTTGTTTTCCTTTTTCACCAGAAACAAATGCC TTTGTGCTTCTCCCGCCTGCGGACTCCCACTGCGTTCAGCCCGTGCGGGTGGTCATCGGCCAGACCCATCCAGCCTG TGGCCCGTCCCCTCCACCTCTCACAGCCACCTAGGAAAGTAGTTCTCAGCTCTAAGGGGCATTGTCTGTTCCAAGAA GAATGACTGCTCCCTGCCACCTCCCACCCCCATCCCATGTCCCCATCATAGACCCAGCAGGACAGACCCCCCCAGAG AGCCAGTGGCCTTCTTGCCCATAACTCGTTGGTGCTGGAGAGCTGTGGGTAGCGTAGCAAGTGCCACTGAGCATCCT GGAAACCCTGGGAGGGGTCCCGGCGAGAAAGAGCCATCACCCTAAGAAGATTCAGGAATGGGATGATCATGGGGTTC AGGGTGCCCCAACAGTAGGTTGAAAATCCTGTCCCTGGCCAGGAGGCAGGGAAGTAGCAACCTTATTCAAGGGGAAA AAAAACCTCCTGGAGTCTAGATACAGTATCTTAGTAGTAATAAAAGCACGGGTACAGATTTACTGGTGTCGGAGTTT TAACTGTAATACTGTGGAATGGTAGGTTATTTTGTGTTCAAGAGCTACATTTATCACAAAAATGATGATATACAAAT CACTTCCATATCACAAAATGTTCTTGGTCAAAATTGGCTTGAGGCAAGTGATATCTTCGAGTAAACAGTATATGAAG ACCATATCTTAAAATGATAGATCACCTAATTTTGTTCTGACAGAGGTTTTTGCCGCAACAAACATCTGTCATTGAAA TACCAATTCAGAGATATGGAAGCCAAATTGTAGAGGTTTTCCTGGATTTGTCACTCCTAACTTAAGAATGCTACTGT TCCCATCGTAGCTTTTATAAGATATTAGGCAGTGTTGCACTTTAAGAGACATTAAAACAAAATAAACAATTCAGAGA AATACGCTTTAAATGCAAACCAACCATTAAAAAGTATAGAAGTCAGGAATGGGCCGAGACAGCCTGGCTGTTTTTAT GTGCAGACATCACATTAAGCTCGCTTTACTTGGAGATTTTGAACTGTAGAGGCCTCCAGGCCTCCTGCCTTCACTTG AGGTTTTTGGTGCTTTTTAAAGGACTGTGATAATGATGTTATTCCCAAGATGTGAAGGACCATTCTGGTGCTGTCCT GACAGGGGAGCAGGTTTACAGCTCAGGACACTGGGGTGCCACGGGGACCTGGGGGTCTCCTTGTGCCTGGGATTCCT CCTCGTCAGGAGCCCTCACTCAGGAAGCCCTGCACGGGGGCAAATGTCCTGGGATTGGAGAGGCAAGCGTGAATCAG ACATTTCCAAAGACGACACCGAAGAACTTCTGCTGTATTCCAAGTTAAAAACTAATTGATCTTGGTCCAAACTATCA TAGGATAGTTAAAAAAAACACACAATAGAATTTCTGAGGTGCTTGGGAGACATTTTAGAAATATGTCATTGGTGACC ACTTTTTATAGGCTGAATTAAGAGGAAAAAAAGGTAAAATATCTTTTAAAGTCTCCAGTTTCTGAGACCCCTCTGGA GATGATTTCATTGAGTTCCTCCCTCTGACAGCTCCTATGGACCTGGAGGGCTCTGGTTTCTGGAGTAGCATGGGAGC TGGCCCTGGTCCTGGCTCTCCTGCCCACCTCTGCCCCCTTTTCCCTGCCCCCTCCTGACTGCAGCCACCAGTGCCCG CCATTTCTTCCTGCGCTGCAACAGCTCTGGCCAGTCCTCTCCTTATTCTGTAGGTTGAAGTACATTCCTGGAATCCA GGTTTTCAAAGCATTCTATGCAGTTTCTTGCATGAAATACAGGAGCAGCCTTTCCTGGGCTGCCTCACACATTGGGC TTCTGTATTCCTTTATGACAGTGTGAGGCAGGCCTGGCTAATGTCTTCCAGCCCATTCATCTCCCCACAGGGTATGA GATGATGGGCTTTAGCGTCAGACAGCTGGGCCCACACTCCGGCTCGGCCACTTACGGGCTCTGGCAGGTTACCTCAG CTGTTGAACTCGTGAGCTGTGACTTCCTCCTCTGCTAATGCGGCACTCTCATGCCTGCCTCGCAGGTTCAGATGTGA CGATAGACATAAAACACCTGGCCCGGCTCCGGCGCACAGATGCTGAAGTCAGTTTTCTGAGGTCGTGGTGGGGGCGG GGGTGAGGGTGGCAATGGAAATAGTGACAACAGTAGTTGGCGTTGTCATCCTGTTTACGGCTAGCCTGCGAGTGGCT CAGGCGAATCCAGCACAGCCTTGTCCTCGGGTTAGCTGCCCTCTCAGAGCTTCACATCATAACTAGTTCATTTATCA TCCACGCTAGAGACTGGTCTTCCAGAGGATATTCCTACCTCAGAGCCCCTTCCTCCCGACGTGCTGGGACGGCCCCT GCTGTTGCCTGGCTTTGCCTGGTATTACAAGGGACCTCAACCTCCTGTGCTCTTACCCGGGCCTGACTTGGGTGATG CCCAGAATCCCAGTCATGAGGGGACCATGACTGTGGGCCAGTTGCTGACAACCTTGGTGGGTTGTAGACTCATGAAA GAAACACTCCTTTGCCTCCTGACCTTGTGCATCAGGGAGGATGCAGGAGGAACGGAAGATTGAGCCCGGGGAGTGCT GTCTCGGCAGTGCCACTTCAGACAAGTGAGTGTCCCTTTGTGGGACGTGTTCTCAACAGGCACAGGTGACCTTATAG GTATTGGGATGATGGGGGTGTGCCTGCAGGTTGTGAATTACTTTTTGCCTTCAGAGCCACCAACACATTCACACAAA CATTTGTTTTCCTTTTGATTTTATCAGGAGAATTTTGTTTCTTTGCCCGCCTGAACATTGCTTGCCCTCCATAATTG AGTGTAGACTAACTCTGCAGCCTAAGCCAAAGTACATCTTTTGTCTGTGCGAAGAGAAAGTTCCATTTCCCTTTACC AAGTTATCTCCATGGCCCTTGGCCACAGCACCCTCCGCAGACCCTCACGTGCATGGCCGCAGCAGACTGCCCACACA TTTGCACACTGACATTGGTCTTATTCTCATCAACTAATAATTAAACCAGAATCCAAGTAAGTGCAAGAATCAAAGGC TTTGAGTAGGAACAAAAGGCTATGTTACTTTGTATCCTTAACTAAGAATTTTGTTGTTCAAGAAATCCTGGGCTTTT GTTGGTGTAGCTCTGCAAGTCAGCAGCACCCGGGTTCCACCCGGTGCTTACAGGTCACGAGTCCAGTGACGCTGATT GAGGTGTGTCACCAAATATGCTGCAGATCCGGGGCCAGCCCACCTGGGCCTCCGGCCACGGTCTGTGCCCACGTGTC ACGAGGCACATCCCGGGTCATCCGGAGAGGGACCTACAAAGTCTATTTTCAAACCAAGTTATTTTGTGAAATATTGT AGTGAACTTATCAAAACTGGTGAAGTTGATGAAGTGAAATGAAAATACTGCCATGAAAATTATTTTAGTGCAACATA ATGAGTTCTGTTTTTCATATCTGGCAGATATTACCTACTAAATCTAATCTGCAATGCTGAGAATTATGCCATTTTTT ATGATTTGTTTAATTTTGACTGAAAAAAATTGACTATTCATCGATTCTTGACCTGCGAGTATTGAGGGAAAAATTTA GTTAATAAGAATTTTCATGAGGTGTAAATTTAAATGTATGAGGATTCTGCCTATCCTTTAATACTATAGACATTAAT TTAAAAATTCTATAAGGGCCTGAGGGCCTGGGGTGTCTGAAGAACAGAACATGGAGGCAGTTATGGTTGTTAACTGG TAGACAAGGTCTGTCAAGATAATATAGGAATATTTTGGTGTTTTCCCTATATCCTTGGTTATATGTGGCTGAGCATA ATTAGAAGTTAAATTTGTTTTAGATAATCTCTTCGGCTGTGAAATGGCATCAATACACTTAAGAGTAACAAGTCGAA TAGAAATCAGGGCCTGTTGTTAGTGTATGAGCACACACCACACAAAGTTTCTTCTTGGTTCCCTATTTCCGCAGTTC AAAGGGGGTTTTAAAGAAGTCATAAAAAATGAAGGATCCTAATATTGCAGTTGGAGACTGAGAGTGAATGACATATT CTTTACACACCTCAACTGTCAACATTTCTAATCAAATCACCCAGCCTTCTTACTTCTTAAATGATACAGGCGATATT TCCTGTAATAAACACCCCTAAGTCTAATGAGAGGCCCTAAGGCAACTTGAAATATATGAATTCATTATAATTGAACA ACATAATCTGCAGGGCAAAGATGCCTGCTACCCAGCTCTGAACTTCACAGAGCTTGGGTGTTTTATGAAAAATGTTA TACGTTTTGTTTACAACGTATGGCTGCTGTTTGAAGTATTGTATGTTCCTGTAGTACATAAGACGGGGCCGCATAAT GGAGGAAAAATCAAGGAGGCAATCTTTCATTTTGTTCTGGTATGAAAAATTCAAAAGACTGAAAACTCACCCAGAGA AATTTTGCAAGCATATTATTTTCCAATGTTTCGATCAATTTGTCTGTCAACCATGCTGAGAGGTGGAAGGGGCCAGC AAAAGCAATTTAGCTTGTGAGGTCCAAAATAGAAATGTTTTAGGGAACCTTGTCACATGTTATTTCTTTATATTAGA ACCGCCGTGTGTTTTATTTGCTGGTCATAATATGAAGAGAAATTGATATCAATCATCTAAGTAAGCTATGAATATCT GATATAAATATGACTTTTATATGCATGCATCAGAATACAATATAAATTAACCTCTTCATGCATGCAAGAATCGTTAG TGCGACAGCGGGCTCCCTGTTTTGGATTTTTCCATTTGACAATTCACGGTGCATTTTAATTGATTGTACCCAAGTGA CACTCCGTGGAAGCATCTTGCATGTGAACGTAACTGACCCTGCCAGGGCTTTAATTAAGCTATAATCTTCCTTTAGT CAGTGCATCTGGGATTGATAAACATATGTAAACCATGCTGACCATCTAAGTGTTGCTTTAAAGAAAAAAATGGTGCA GATATGGGAGTTTTAAATAAACGGCTTTGATGTTACCTCCAGTTGAATTTTTAGTTGGGATTTGTTAAGATCAAGTT ATCTTAGGAGTAGTTAATTCTAAGGTGAATATACAATCTTGGTGAAACTTGTCCTGGAAAACCTGTAATTCTGTGAT TAGTCTGTGTGTACCCCAACACTTTTTCTTCAAATCTTAGATTAACACTGAATACATTAAGGTTATTTTTCAAACAG GTTATAGTTCAGAGAAATTAATTTAAATCAGTTGGCTTACAGAAGACCCAGTTTAGTTTTAATTTGCCTTAACAGCC AGGGTCTTCCTGCTCTACTTACTTAGACGTCCTCAGAGTGTCTTCTGAGTAGTTGGCTACCATTTGCATGGCATGAT TCCGCTCTCGGAGCTTGATATCTTTCCAGATTTTCAGAATTTAGAATTAAGTGTGGAAGTCAAGCATACTGAAAGTT TTTTATACTATGGATGCTGATAAATAGAAATAAACTATGACAAATTAATTCAGAAATCTTTCCACTCAGTGTAGATA TTAAGTTGTGGTCATACGGAAGAAGTCTTGAAACACGATTTACAGTAAATTATGATAATTTGGGATAGAGACTGTGC CATTAAGAGTTGTTAAACAGCATGATTCAGACAGCTCTGTTTTTTCCAGTGACTGCCTATTCCTTTATTGTATATGT GTACCCAAGTGATGCTCTCACATTTATCTTAAGTCCCTATTATTAATATACATTTAAAGTCTCCCGAGGTTTTGTTT GGTTTGCTTTGGTCCTTTTTTGGAGTGATTTGAAGCAAAGTTAATTGTGGAACCTATTTATAGACATCTTTCTATAC TTGCACAAGTCTGTGTATAATCAATTCTGAGAAGTAGAATTTAAAATTTAGTGCTTTGAAAATTGTCCTCATTTTAA TTTTTTGGATTTTAATTAGGTAAGGTTGAACATTTTTCCTTATTTTCATTGATTGTTTGGGGTTCCTTGGTAAAATG CTTGCTTTTGTTTCCTGTTGGGTTATTTTGTCTTTTTCTTATTGATATGTGAGAACTTTTTGCATATTAAAGAAAGA CCATCATTTCTATTTTGATTTTGCCCAGGGAATTTTTTTCAGAATAAGAAATTCAACTAGATTTTTAAAAAACTTTT AATTGGGCAATAATTTCAGATTTACAGAAAAGTCACAAAGATTGTACAGATCCTTCACCCAGGATCTCCCAATGTTA ACAGCTTACATAACCATAGTACATGGTTTGTCAAAACTAGGAGATTAACATTGGTCCATTGTGGTCAGATTTTTAAG TCCCTTCCTATGGCTTCTAAATTTATGAGGTGCTTACACAAAGGCCTTTTTAACCTTAAGATTTTTTTTTTGTTTTG CTTTTGTTAATCATATATGTTTATTTCCTTCTACTTTTTAAATGTTGTTTTTCATATTTTCATCTCTATTTATTTAT TTGAAATGTGTTTTAATTTAAAGAGTCTTGGTTGGAACCTATCTTTATTTTCATCTAAATGCTAACTAACCAACTTT TTCAGTATCTTTTGAATTACTCGACTTTGTGTTTACACACATTTTACAAGGACAACAAAAAAGTGCCTGCTGATTGA CTTTGTAGTCAATCATAACCCTTGACCATATTTTTTTTGGTGGTACTTCATATATGAAAGAGTATAAAATCTAGGTT ATTTAATGTTGTTATAAAATTATTCTAAGATCACCGAATGGAGAATACTTAGATTCTAAATAAGTGACTTTGTGAGA ATTGAATTTTTATATCATTAACCAATTCTAAGACATTTTAAAGAAGGCAGAATGATCTAACCCAATACTTCATATAC TTAGTTTTACTGTGGAATCCCAAGGGCAACATGTCCCCCGACCCAACGACAAAATAACATATATTCCTATTAAGTTT AGGGATTGATGGAGCTTGTAATTGTTAATTTGTCACAGATGATACTGTTATTTATGCGCAGTTACTGTCTCCCTTTG GAGAGTTTCATGTGCTAAATTTTCAGCAAATAGTTTGAGCCTCACCTACAGCTTCTTGACCTTTTGGGGAAAAAACT ATCACTTTAAAAGACCTTTTACGAGTGAGCAAATATATGCTTTTCTGTTTTCACAGTAACTTTCAGAGAAACCCACT GGTCTCAGCATGGCCTATGCCTTGGCAGCCCTTTCCACCCGTAGCAGGTTGTTCTTTACCTTTCGTTTTTAAGGTGG CTTCCAGTTCATACCAAGCTCACATACTGTGGCGAAGAGCTTTCTGAGAAACTTCATAAGATTTTGCTAAGATATTA ATGAATAATTTAGTATATTGTTGCATATATGACTGAGTATCACATTTCAGTAATGTTTTTACTATCTTTAAATATAG GTACATAAATCCTAGCTTGGGGTAAAAGGCATTGACATTTTCTCAGTAATAGTTCTTTGTAGACAGACCTGGGTTCA ATATTAGCTCTGCCACCCCTCGAGCTGTGTCACCAGAAGTAGGTTGTCCTGTACGTCTAACTTCAGTTTGTCTATTA AAGGGGATTGCACCACTGACGGCTTGATCAGGGTTAAATACTCCAGCATTCCTTGGAAAACACTTCTGTGAGCATTG TCGCAGACTTGATGATGTAGCAACTATTTTCCCTAAGTTTCCCACTTTAGAAATTATTAAAAATATTGCTGCCTTCA TAGCTTTTTCAAAGGTTTTCTCTTATTTCTGTCAGATCTCTTACATCTAATATTCTCATTCCCAGCAGATAATTAAT CTATTAAGAGGCAGGCTGTGGGCCCCTCTGATACCAGGGAAAGTGAAAGGCACCAGGGCAGGAGTTCTGATTCTAGC AACTGCCTGGCCGCTGTGTGATCTCCACACAGCATCAAACCTTGCAGAGTTCTAACAGAAGTGAATAGAAGATTAGT CTCCCACACAACAATAATGGGAGACTTTAACACCCCACCGTTAACATTAGACAGATCAACAAGACAGAAAGTTAACA AGGATACCCAGGAATTGAACTCAGCTCTGCACCAAGCGGACCTAATAGACATCTACAGAACTCTCCACCCCAAATCA ACAGAATATACTTTTTTTTCAGCACCACACCACACCTATTCCAAAATTGACCACATAGTTGGAAGTAAAGCACTCCT CAGCAAATGTAAAAGAACAGAAATTGTAACAAACTGTCTCTCAGACCACAGTGCAATCAAACTAGAACTCAGGATTA AGAATCTCACTCAAAACCGCTCAACTACATGGAAACTGAACAACCTGCTCCTGAATGACTACTGGGTACATAACGAA ATGAAGGCAGAAATAAAGATGTTCTTTGAAACCAACGAGAACAAAGACACAACATACCAGAATCTCTGGGACACATT CAAAGCAGTGTGTAGAGGGAAATTTATAGCACTAAATGCCCACAAGAGAAAGCAGGAAAGATCTAAAATTGACACCC TAACATCACAATTAAAAGAACTAGAGAAGCAAGAGCAAACACATTCAAAAGCTAGCAGAAAGCAAGAAATAACTAAG ATCAGAGCAGAACTGAAGGAAATAGAGACACAAAAAACCCTTCAAAAAATCAATGAATCCAGGAGCTGATTTTTTGA AAAGATCAACAAAATTGATAGACTGCTAGCAAGACTAATAAAGAAGAAAAGAGAGAAGAATCAAATAGACGCAATAA AAAATGACAAAGGGGATATCACCACCGATCCCACAGAAATACAAACTACCATCAGAGAATACTATAAACACCTCTAT GCAAATAAACTAGAAAATCTAGAAGAAATGGATAAATTCCTCGACACATACACTCTCCCAAGACTAAACCAGGAAGA AGTTGAATCTCTGAATAGACCAATAATAGGCTCTGAAATTGAGGCAATAATTAATAGCTTACCAACCAAAAAAAGTC CAGGACCATATGGATTCGCAGCCGAATTCTACCAGAGGTATAAGGAAGAGCTGGTACCATTCCTTCTGAAACTATTC CAATCAATAGACAAAGAGGGAATCCTCCCTAACTCATTTTATGAGGCCAGCATCATCCTGATACCAAAGCCTGGTAG AGACACAACCAAAAAAGAGAATTTTAGACCAATATCCTTGATGAACATTGATGCAAAAATCCTCAATAAAATACTGG CAAACCAAATCCAGCAGCACATCAAAAAGCTTATCCACCATGATCAAGTGGGCTTCATCCCTGGGATGCAAGGCTGG TTCAATATACGCAAATCAATAAATGTAATCCAGCATGTAAACAGAACCAAAGACAAAAACCACATGATTATCTCAAT AGATGCAGAAAAGACCTTTGACAAAATTCAACAACCCTTCATGCTAAAAACTCTCAATAAGTTAGGTATTGATGGGA CGTATCTCAAAATAATAAGTGCTATCTATGACAAACCCACAGCCAATATCATACTGAATGGACAAAAACTGGAAGCA TTCCCTTTGAAAACTGGCACAAGACAGGGATGCCCTCTTTCACCACTCCTATTCAACATAGTGTTGGAAGTTCTGGC CAGGGCAATCAGGCAGGAGAAGGGAATAAAGGGCATTCATTTAGGAAAAGAGGAAGTCAAATTGTCCCTGTTTGCAG ATGACGTGATTGTATATCTAGAAAACCCCATCGTCTCATCCCAAAATCTCCTTAAGCTGATAAGCAACTTCAGCAAA GTCTCAGGATACAAAATCAATGTGCAAAAATCACAAGCATTCTTATACACCAATAACAGGCAAACAAGAGCCAAATC ATGAGTGAACTCCCATTCACAGTTGCTTCAAAGAGAATAAAATACCTAGGAATCCAACTTACAAGGGATGTGAAGGA CCTCTTCAAGGAGAACTACAAACCACTGCTCAATGAAATAAAAGAGGATACAAACAAATGGAAGAACATTCCATGCT CATGGGTAGGAAGAATCAATATTGTGAAAATGGCCATACTGCCCAAGGTAATTTATAGATTCAATGCCATCCCCATC AAGCTACCAATGACTTTCTTCACAGAATTGGAAAAAGCTACTTTAAAGTTCGTATGGAACCAAAAAAGAGCCCACAT TGCCAAGTCAATCCTAAGCCAAAAGAACAAAGCTGGAGGCATCACGCTACCTGACTTCAAACTATACTACAAGGCTA CAGTAACCAAAACAGCATGGTACTGGTACCAAAACAGAGATATAGACCAATGGAACAGAACAGAGCCCTCAGAAATA ATGCCACATATCTACAACTATCTGATCATTGATAAACCTGACAAAAAGAAGAAATGGGGAAAGGATTCCTTATTTAA TAAATGGTGCTGGGAAAACTGGCTAGCCATATGTAGAAAGCTGAAACTGGATCCCTTCCTTACACCTTATACAAAAA TTAATTCAAGATGGATTAAAGACTTAAATGTTAGACCTAAAACCATAAAAAGCCTAGAAGAAAACCTAGGCAATACC ATTCAGGACATAGGCATGGGCAAGGACTTCATAACCAAAACACCAAAAGCAATGGCAACAAAAGCCAAAATTGACAA ATGGGATCTAATTAAACTAAAGAGCTTCTGCACAGCAAAAGAAACCACCATCAGAGTGAACAGGCAACCTACAGAAT AGGAGAAAATTTTCTCAACCTACTCCTCTGGCAAAGGGCTAATATCCAGAATCTACAATGAATTCAAAGAAATTTAC AAGAAAAAAACAACCCCATCAAAAAGTGGGCAAAGGATATGAACAGACACTTCTCAAAAGAAGACATTTATGCAGCC AAAAAACACATGAAAAAATGCTCACCATCACTGGCCATCAGAGAAATGCAACTCAAAACCACAATGAGATGCCATCT CACACCAGTTAGAATGGCAATCATTAAAAAGTCAGGAAACAACAGGTGCTGGAGAGGATGTGGAGAAATAGGAACAC TTTAATACTGTTGGTGGGACTGTAAAGTAGTTCAACCATTGTGGAAATCAGTGTGGCAATTCCTCAAGGATCTAGAA CTAGAAATACCATTTGACCCAGCCATCCTATTACTGAGTATATACCCAAAGGATTATAAATCATGCTGCTATAAAGA TACATGTACACGTATGTTTATTGCAGCACTATTCACAATAGCAAAAACTCGGAACCAACCCAAATGTCCAACAATGA TAGACTGGATTAAGAAAATGTGGCACATATACACCATGGAATACTATGCAGCCATAAAAAATGATGAGTTCATGTCA TTTGTAGGGACATGGATGAAGCTGGAAACCATCATTCTCAGCAAACTATTGCAAGGACAAAAAACCAAACACCGCAT GTTCTCACTCATAGGTGGGAATTGAACAATGAGAACACATGGACACAGGAAGGGGAACATCACACACTGGGGACTGT TGTGGGGTGGGAGGAGGGGGAGGGGTAGCATTAGGAGATATACCTAATGCTAAATGACAAGTTAATGGGTGCAGCAC ACCAACATGGCACATGTATATGTATGTAAGAAACCTGCACGTTGTGCACATGTACCCTAAAACTTAAAGTATAATAA TAAGAAAGAAACAAGATGAGCTTGTGGACTGTCTTTCACATCCTGGGAACTTATAGAAAGGTAGTTAGGATTATTAA GCAACTAAAACATTTTCCTTTATTTTTCCTTCCTTACCGCTACCTCTCCCAAGTTGTAATAATTTAATAGTTACAAC TATTAGTACAAATAGTTTTAAAAGTCTCTTTGAGTTGCCACCCTGGAGTGTGTATCTCCTAATGGGATAATACTTAA GGCATTTTATAAACTTTAAAGTGCCATGGACATCAGTCATTTGTGCATTTGTGAGCACTGCCTCATTTAAGCCTGCC GTCGCCTTAATGTACTGTGTACATTAGATACGACTTCAGTTCCCTTATCCCAGGAGGGCTGAAACTTACTGGGATTT CTGTTATATTGACCTAACAGATTAGGATGATTTTAAAATTTTACTCATTTTCTATATTGAATTAAAACAAGAAATTA GCTGAGCATTTTCCAAGATGGAAGGAAAAACGGCCATTGTTTTGATTTCTAGTTATGTAACCCATTCCAAAAATTCA AACATGAGATTACACGGAGTGCTGTATTAAACAGATGAGTACCTGCTCACTGGCTTCCTTTCACACAGTCGCCTGGC ACTGCAGCCACACCTGTGCTCACCTGTACCTGCCTACCTGTGGCTGGGCCAGGCCCCAGGAGTCCCGTGGGTCAGGA GCATGGCATGGAGGGTGGGCAGAGCTTTCTGCTCATCCCCGGATCATGGCAGCGTCAGATGGAACTCGGCCTGCCCC GTTTCTGTGCAGCTGTCAGGATGTATGGGGTTTTCCCATGCTCCGTGCCTCCATGCCTGCGGCACTTTGGAAGGACG TTAAGGCAGGACATCTTTAGGAGAATGTCTTTATTGACTTTGTCTTTATTTACCTTGGGCCTGGCGCTGTTATCTCA GCTGAGTGTCCGTGTTTAAAGGCGACACATGGAACGAGCATGGCTCATAATTTTGAGTTTCTTCTTCTGGAGCCTTA CTATTATATGCTCAGAAACCATCTCTGTCTGCGTGGTATCTCTCCTCTGGCAGTGCAGTAGGTCACACATCGTTGAG GTTATGAGCTTTGGAGACTCTTAGACATCAGCTCTCATGTTAACTCTGTGATTTTGGGAAAGTTGACCTATATGTTT TTGTTTTCTTTAGTGTGAAACAGGAATGCCTTCTGCATAGCGAGGCTGTCAGAAAAGCCCTTGACACTTTCTGGTCC CAGAGAGGGCACCGCAGCCACCCAGGCCTGCCCGTGAGAGGTGGCAGCTCTGGGAGGAACACTCCTTAGGCCGGTGT GTGGTACTGTCAGGTGCTTATTTTTGTTTCACAAACTTGGTATTTATTAGGTGTTCCAGGCTTTGTTCGACCCGGGT GGGAGGGAGGATCTTTGTTGGAGGACTCTCACTTTCTAATTGCGGGTTTTTGTTCTGAAGCCATAGGGTGTGTTGCC GTCTCAGCAGGGAGGAGTATTCCCCATTAACGGGCAGGTGGCATCGTGGGAGAAGCACCTGCTGTGCCCGGGGGGGC GGGACTGCGCAGGATCAGGGGGATGCGCGGGAGCCAGTGGTGCTGACACTGCATACCATGTGTCAGGAGCCTTGGAA GTCGGCTTAAATGGTTTAATCTGATTTAATCTTCACAAAAACCTTGAGGGATAGGCATTACGATTAGGCACCACAGT AGAAACTGAGGCATGGAGAGGTGCAACAGTTTCCCTGAGGTCACACAGCTCTTCAGAGGGGGAGACAGGACTTAAAC ACGAGGAGGCTGGCTCCAGGGCCCGTGGGCTTTGAGCGAGGAAGGCCTTCTAGGTCTAGACGTTCCTAGGCTGGGGC TCAGTGATACCCTAAAGCCCATGCACACCTCCTCAGACCTGGCTCCTGAGAGGCAGTCCTCCAGAGTGGCCTCTTTG CTGAGACTGTGAGCCTGGGCTTCTGTCTCTAACCACTAGCTACAAAAGGATGCTGGACAGACATCCTGTACCTAGGG ACACCCCATGATGGCTTGTCCCCCGACCACAGACACCCCATGATTGGGGATACCCCGTGACCATGGATGCCCCATAA CCACAGACACCCCACAACTGGGCAGCTCAAGGCAGCAAGTGCCTTCCTTGTGTGCTTCCGTTTTGTTGAGGTCTTTG TTGCAAACATCGTTTGTTGAGGGCTGCCTTACCCTTAGAAGACATAGTACCATTTCTGGGAACCATGGTTGCTGTTG AGAAATGCATCCTTACACGCCCAGATCCAGCCGCTGTCTGGTCCCACTGACATGGCACAGGAATCAAAGCAGGTGCT TGGGGGATGTCAACAGTTGAATTTGGATTCCTCATAAAGCAATGTTAGCACATGACACTCTGTGAGGAAATAATGAT GCTACTTTGTAAGATAAGAAAGGGGAAACAGCTGCGTTGGTGGATAATTGTTAACGGTGCAGCTGCAGTGTGAGTTG CACACTGGAAGGTGTTTGCCGTGACCTGTCGCGGGCTGAGCTTTTTGGTAGCCTGGCATTGTGGTGGATGCCTTTCA TTCCATCCGCTGTGGCTGAGTTCTGCTTTCCTGCCCCTGGTTCTGCAGTGGCGTGACTGGGCTGCTTACAGGCCCTG TCTTTCCAAGCCACCATTTAATTGGGGAGGGCTACTGACATGGCACCATTGAACTTGAGACCTGCCATTCCTCCGGT GGCAGTCCTTGGAGAACAGGGCCCCAGGTCTTTCTGACCCCACATCATTGGCATGGTCTCGCAGCCAAGTAGGTTAT GTTTTCTGAGGAAATCATCATGTCATTCCCATCTACTGTTAATTTTTAAAAAGCTGTGATTCCTGATGAAACAAACT AGAGATGATGCAGGAACTCTGGATCTAAATGGTCAGTCACTATCTTCTGCAACTTGCTGGAGTGCAGACACGTCTCA GAATAAGATATTCTCAGACTAGTCAGAACATTGTTTCCTTTCTTTAAAAAACAAAACAGAAAACCACTGAGCCCAGA GTTCAAGGCCTCCTAAAGAGGAAGAGGGCTTTGGCTACCTGCAGATAAGAAAGGTTTTGGTGGTAATGCTCAAGTGT GAGTTAGGTGTGGGCGTGAGCATGCCCAGTGGCCGTCCCGTCCTCCTGGAGACAAAACCATTTCCGGGGTATCCCCT GGCTAAGCATTTGAAAGCAGCAATTTATTTTCAACAGTTTCTATCCTTAATATTTAAAAAATAGGAAAGTGTACTCA ATCAGCTTTCTGTTGACTTTCTGCTGCCTGGCCGGCGTCTTGTAGGAGGCGCTCTGCCTGTCTGTGCAGGAGGCTGT CCAGGGTGTGCGAGCCACGTGGGCCAGCCTCTGTGGGCGGACTGTCCCAGGTGGGTGGTGGTGAGGGGGTGAATTCC TCCTTCACATTTGCTTACAAGTGCTCCTTTTTTGAGTGTTGGGAGCACATCTGTGTATGAAGGACATCATTCGGACG CTTTCCAGGGTGGTGGGAAGCAGCCTCCCTTAGCCCGGCTACGTCTCATGAATGTGCGTGGACCCCGCCTGGCCTTC TGCCCGACATGTACTCCACCCCGCCTTCTACCAGGAGCCAAGGCTGTGACCATTGTGATCTGAACAAGCCGTTGAGA GTGTGCTCTGTTGTCAGTGAATTAGTTCAGAGAGTCCCTCCTCGTGTTATAGTTCTCATGACCACTGCGCAGTGTTG CTGTGCTCTGCCTCTGACGGGTGGCTGCCAGGCATTGAAAAAATAACATCGTAAGTCCTTACTGCTAACACTGACTT TTAAAAACATTTAATTGTGTGCCTTTTAAACTTTTGTTCTCCGTACAACGTCTTCCCGATATTTAGATTTTAACTTT TAAAAGACAGTTACAAATTATTTCTAAAGTATAAAGTCTGGTTGTTGTTTTTTTTTTTGATGGAGCTGTGAGGAGGA AAAAAATGAGATATAGAATTTTAGTGTAGGTGATCTTGTGCTTTAGGATAAAACCATTTTTCTGTTACTGCTTTTTG GTATCTAAATCCCCGGCAGTTTCCCCCTTCGGATAAAGCATCATGTAGGTTTTAGCACACCAGCGGGTTCCTGGCTC TTTAGTGAAAAGGTGGCTCTGAGGATTGCCCTGTGCCCGCCATGACCATCCTGGTGGCTTGGCGACTTCATATTGAC TGCAGGCCCTGTGGACAGAAAGAATTATTTCTTTTTTAGAGAAAAGATATTTATGACCGAAAACAGTGCTAAAAACA TGAGAATATTGATCATGGTTTTGAGAGATGCTTGCACTGAATCACTTGATATACCTAAATATCGGCTTTATTCTATC TTCCCTAAAAGACAGATTGCCAACACAAAAGATGAACCATCTTGAGGGAAAAAAATCTTATATCTTTCTGATAGGCT GTCTTGCTTCCTTCCATAACAATGGGGAGAAAAGAAGTCTGTGTGGTTTCCTGAAATAAGCAACAAATATAATAAAT GGTGTATCGGAAGCTTCTGTAAAACTGCCTTGGGTGTACTTTATTTAACTTGTAGTAATAAGTTAAATTAACATCAA ATGGAAATTCAAATAGCTAAACATTTAACCAATCTAACAGTAAACAATTATTCTAAAATCAACATAAAAATAAAGAC CCATTATCATCAGAAGACCTAATTCATTGTTTTTAGAGGTAATCTCTTGGGGTTCTGTGGAAATTTATAAAGGAATG AGTGAGGCTAATTATTTACTCATCAGATTTTTGAAGGCAAATACTTTTCTGTTATTCTTAAATTTTAGACCTATTTT GGATCAAGATGGTGTGTTGCTTTTGTAGTTTAAGGTAGAAGATAGTGAGGCTGACTTCCTTCCTTATCCCGGGTAGA AAGCCTGACTTTTTCTGGATAGATTGCAGCCTAGGGGTTGTGGTTTTGGTCCTGTTCTGCCCTTTTCCCAAATTCTT CTTCATTGCATCTGATACATCCCCCTTGCCTGCAGGGCAGGGCCCTGTCTCTGTGGCACACATAGCAGGACCGTTTA CATTTCCTCTGCTCACAGGTGCCGCCCACACCTTGCTTCCTATTTCATGTCCTCCTCGTCTCTGTAGTTGAGGGAAG AGTATTCCATTCAACAGATGGAAACACCATTGCATCTGACTGCCATGTCTTTGAAACCTGCCAGACCAAGTCTTGAC TTTCGTTTTGTTTTTTTTGGTGGAGCTGGGAGGAGACAGATGGGCCATACAGTCTATGTGTGGGTGCCTTGGTGTGG GACACAAGAAAGTGAGGCAGGACGTGGAGCACCAGGTCATCAGAGCTGGCAGAGGCTGCTCCACCGTGCACCGAAGA CTTGGCATGTCAGTGGAGCCAGGAAGTCTCCGATGCAGAAGCGGAAGTCAGTGTGGCCACAGGAGCGAGGTGGCAAA GTGCTGGCCTTGGAGGAAGAGAGAGGTCAGAGAGTAGACAGAGGGTGAGGCCTGGATCATCATCAGATGAGCAGACA TGAAAGCCGCTCTCAACAGGATTAGAAAACACAGTTTCTAGGGGATTCTTGCAGGGAAACAGACATGGAGGGGCACC ATTTGGTTTGTAAAAGGAAGGTATAGCCCTGAAGTTGGCAAGCTCTTGGCCTGCTGGCCTGATGCAGCAGGCAGCTG AGAATTGCTTGGCCTGTCCATGGGGGCCTGACAGGTATCTCAAATTTTAATTGCCAGCACACACGAATCAGGAGATT TCATATTTCAAAAAGCATGTATGGCTGCTGTTTCTTTTTTGTATAAGGCTTAATTTGTTTTTTTTTTCATGTTATAG CTTTCCTGAGATACATTTTACATACTCTAAAATTTACCCATTTAAATTGTACAGCATGCTGGGTTTTCATGCATTTA TACAGTTGTGTGTCCATCATCACAGTGTAATTTTAGAAGATTTAAATCTCCCTCTTCCCCACTGCCCCTGCCAAAAA AGGGACCCCAGACCTACCAGCAGTCATTTCCCATCCCCCTCCCTCTGGTACCAGCCCACCACTAGTCTGTCTGTGTC TGTGGTTTTCCCTGTTCTGGATGTTTTGCATCAACGGAATCCTGCACCATGTGGCCTTTTGTGCCTGGTTCCTTTCC CTTCGTGTGGTGTTTTCAAGGTTGCTCCACGCTCCAGCATGTGTCAGAACTTAATTCCCTGCGGCCAAACAATATCC CATCATGTGGATGAACCACATTTTGTTGATCTATACATCAGTTAAGTCAGTTTCGCCTTTTGGTGTTGTGAATAAGG CTGCAGTGAACATTTGTGTATATATGTGTTCATTTCTCTTGGGGTATATATACACACACACACACGTAGGCCTAGGA GTAGGATTCCTGGGTCCGATGGCAATTGCATGTTTAGCATTTTGAAAAACTTATGGTTTTCTAATACAGCTGCCCCA TTTTACATTCCTGCCAGCAATGTATGAGGGCTCCAATTTCTTCATATACTCACCAACACTTTCCATGTTGTCTTTTT GATTTTAGCCATCCTAAAGGGCGAGAAAGATATCTTCTTGTGTAAAACGGGCAAATAATCAAGCTGGGAATGGTAAG CAGGGTTTTTATTCACAATAGGGCTGGTTGATGGGATTCACAATTACAGAAGGCCACAGAGGGAGGACACACTTGGT GTACTATTTCTTTTTGTCAAACAATAGCATTATTGAGATGTAAATGACATACAGAGTATACATACAGTAGTTCCCCC TTAGTCATGGGGAATATGTTACAAGAACACCAGCAGATGCTGGAAACCGTAGAAGGCACCAAACCCTTGGTATCCCT GAGGGGTTGGCTCCAGGACTCCTCTCGGATACTAACATCCGCAGGTGCTCAAGCCTCTTATATAAAATGGCATACTA TTCTTATATAGCCCAGAGACACCCTCCCATATTTTTTAAATCATCTCTAGATTACTTATGATACCTAATGCCTAGAT ATCACTTCATTCTTGTGAATTCAACGTAGTCCTTAACATATAGCAAATTCAAGTTTTGCCTTTTTGAACTTTGTAGA ATTTTTTTCCGAATATTTTTGATCTGTGGTTGGTTGAGTCCGTGAGTCCGTGGCTGTGGAGCCCATGCATATGGAGG GCCGGCTGTGCAGTATCTTTTCCTACACATACATCCCCATAATAAAGTTTACTTTGTAAACTAGCCCAGTGAGATTA ACAGCAGCAGTCTATGGAACCATTATAACAACATGCCAGCATCACTATTCTTGCACTTCAGGGCCATTATTAAGTGA AATGTGGGTGACTTGAACACAAGCACTGCAATGACCTTGATAGTCTATCTGATAGATACCAAGATAGATGGCTACTA AGCGACAGAAGGGCGGGGGTGTGTACAGTGGGGATGCACCGGACAGAGGGATGATTCGTGTCTCAGGTGGGATGGGG CGAGATTTCATCCCACTACTCAGAATGGTGTGCAATTTAGAACGTATGGATTATTTATGTCTGGAATTTTCCAGTTA ATATTTTTGGACCACGGTTGATCTCAAGTAATTGAAACCATGGAAAGTAAAACTGTGGATAAAGGGGGCCACTGTAT CTCACATATACAGTTTGATAAAATTTGCCTATGGATGACCCCAATCAAAATAACAAATATTCTCATCACCCCCAAAG TTTCCTCTTGCACCTCTGTGATTCCTCTCCTCACCTCAACCCGCTTTCCTTTCTCATCCCCAGGCAATCACTGATCT GCTGTCACTGTGCATTAGTTTGATTTTCTAGAATTTTGTGATGCACATATATACATATATATTGTATTTTACACAAA ATTTTCTCGTTTTATGAATGGAATTATAACGTATAGTCTCTTCGTGTCTGAGTTCTTCCAGTGTATTGAGTTTGATA TTCATGCATGTTGTTGCATGTGTCAGCGGTTGATTACTCTTTTTGCTGAGTGGTATTCCATTGTGTGGGGATACCAC AGTTTATCATTCGTTTGTTATTGTACATTGAATATTGTTCTTTCTGCTTTCGGCTGTTGCAGACACTGCTATGAATA TTTATATGAAAGACTTGGTAAGGACGTATGCTTCTAATTCTCTTAGGTAAACACCTAGGAGTGGATCCTATGGGCAA TGGGTGTTTAGCATTTTAAAAAGTTGCCAAACTGTTTTCCAGAGTGGCTGCATCCCTCTGCCGTTTTTATGAACAGT GGGTGGGAATGCAATTCTTGCATATAGTCTCTGATTTCATATCATTTTCCTTTTGCCTGGAAGACTTAGCATTTCTT CTGTGGGGTCTGATGGTGATACTGTCTTTTAGTGTTTTTAATGTCTGAAAAAGTATTTTCATATTTAAAAGATATTT TTGCTGTGCAAAGAATTTTGAGTTTTCTCTTTTCCTTTTCTTAAAGATCTTGTTCCACTGTCTCTGACTTGCATTGT TTCGGACCAGAAATCTGCTGTCATCCTTATTTTCCTTCATGTATGTGGAGCATTTTCCCCCCTCCAGGGGTTTTTGA GTTATGTTCTTTATCGCTGGCTTTGACCATCTGGCTCATTTTTTGGGTTGGTGTGCTTGTCTTCATGTGTCTAGTGC TTGGGCTTCATTGAGTTTCTTGGTGCCATCAATTACATCTATATTTGTCTGTTTTAAGTTATCCCACAGTTCTCTAA TATTGTGATTTTTTTGTTTTTTTTGCAGTGTTTTATTTTGGTAGTTTCTATTATGTTTTTGAGTTCACTAATCTTTT CTTCTGCAATGCCTAATATGCTTTGAATGTCATCTAGTATGTTTTTCTTCTCAGGCATGGTGATTTTAATCCATAAA AATTTGTGTCATTTTTATATCTTAATTTTTCTTTTTCTTTTTTTTTGAGATGGAGTCTTGTTCTGTCACCAGGCTGG AGGGCAGTGGTGTGATCTTGGCTCACTGCAACCTCCTCCTCCTGGGTTCAAGTGATTCCCTGTCTCAGCCTCCCAAG TAGCTGAGACTACAGGCACAACCCACCATGCCCAGCTAATTTTTATATTTTTATCATGATCCACCCGCCTCGGCTTC CCAAAGTGCTGGGATTACAGGTGTGAGCCACCGTACCCGACCTATATTTTTCTACTCACCTTTTTGACATGTGAAAT ACAGTTATAACGACTATGTTAATATCCTTGTCTGTTAATTCTAACATCTTTGTCAGTTTTGGGTTGGTTTTGATTTT TTTCTCCTCCTAGCAGTTGTATTTTTATTCTTTTATGCTTTTCTTGTAATTTTTGAATGGATGCTTTATATGCAAAT GTTACCTGGCTGGGTGCTAGGTTATTTATTTAATAAATATCCTTTAGCTTTGTTCTGGGAGGCAGGTAAGTTACGTG GAAATAGTTTGAATCTTTTGGATCATGCTTTGAAGATTCACTAGTTGCAACTACAGTGGTATTTAGTTTCAGGCTAA TTATTCCCACAACCAAGGCAGGATTGTAAGAGGAGAGATCATGGCCGGGGACTCATGGCTAGACAAAAAACAGGACC TCAGTCCTATCAGTGCAAGGAAATGAATTCTGTCAATACATAGTGAGCTTGAAAGAGACTCGCAGCCTCAGCCCTGG GAGTCTCAGTTGCAGCTGACATTTTGGTTTCACCCGGAGAAACCCTTAGCAGAGGACTGAGTCCACCCGTGCCTGGA CTCCTGACCCATGGGGCGGATGAGACAGTAGATGTGTGGTGGTTAAACCACTGAATCTGTGGTAATTTGTGGTGATT TGTTATGCAGCAGTAAGAGGTAATACCGTATGCATCTTCTTGCATCATTTACCAGCTTTTTATTATATGTGGAAGTC TTACGTCTTTCCTCCCTTTTTTATTGCCCTCTGAGTACCTTGTTGTCCCTTTCTGTGTCACATTCTTCCCACTCGCA CGCATGCATCCAGGAATAAGAGCACTGTGGCTCGGTGTGGCCAAGACCCACTGTGTACCTTCCATGAAAGATGTTTG TGAGTAGCATGGGCCCCCGAACCCTGGGTCCAGTCCTGCCTGTACTGCGAGCCAGCACTGTCATCATGGATAGTGCC CTCAGCCCATACTCTCCTCTGTGAAGTGTGTGTGCCAGCACACTGACATCACAGGGTGCCTGCAGCATTTGGAAAAC ACGCAGCATCATGCAAACTGCCTAGGAGTGCTCAACAATTTGGAGCTGGTATCTTTACACTTACCACGTTGAATATT GCATGCAGACTACATATTTGCAGAGCTTAATGAACAGAGAGGCATTTTAGGACAACTAGGAGAAACTCGCGCAGATT CCCCTCAGGGGGAGGGAAGCTGTTTTGTAGGTGTCTCTGGCAGTAGCCTAATGCAGTTGCTTTAGACCCTGGTGGTC TGGATACTGCTTCACTGTAGGCTTTAATTGCATTGCTCCAGGTCTGTGGAAGGCTGGAAGAGGCCGGTGTTTTTGTG TCACTTTTGCTACCCCCTACTCTCTCTAGTTGACAGGCCATTTGGAGCACCAGGGAGTACAATCTGGCTGAAGAAGC GGTATCCAAGGAGGACGTCATGGTGTCTGTTCTCGCAGTCATGGAGCCTAGTGCCAACAGGCCTTAATTCTGTGTTC TGGTGTCTCATGAGTGGCTCTGCAGTGGGACGTCAGAGCAGCCAGGCCTCAAGCCGCCTGGCTGGGGTGGGGACAAA GTGTGTGTTGTCCCTTCATCACGGGAGTGTGGGGCCTGGCACACGCCCTGCCAGGGCCTCACTTGGGCCATGCCTCA GAGCATGGGTGCTACTCACCTCTGACCTCTTGAGTTTTGCAGGCAAACTCAGGTCGAATTTGGATTCTCAGTCGCAT TGTGGCTCACATGACATGAAATAAAATGTTGACATTTATTTGCTTCTTGTGGCCTCTACTAAATATATAAAATAATC AAAACTGAAACTTTCCATTATTCTCAGCAGGAGTGAAACATCTTGACTTTGGAAATTTTTCCTAGTGATTTAACTCA AGTCGGATATCGGCAGCACCACCTGCAATAGTGACCCCCTATGGCCTGCGGCGGGGCTGCTTAACGCTCACATGGGT GGTCACCAAGGAAGGGCTGCTGGACAGGCAGACTCCCAGAGCAGTTGCTACTTACAAATCCAGCTTCCAGCAGGGAG ACCATTAAAGGGCTGCTTCCACCTCCAGGGCGGGCAGTGAAGCCTCCAGCTGGGAGCCGCGTGAAAATCAGAGCCAA TGGGAGCTGGCAGCCCATCCACCAGGAGGGTCCAGAAGACAGAGGCAGAGGACGTGGGATCTGGAGCCCAAGGGAGG GGTCCCAGGTGGGTTGAGGCTGGAGATGGCCCAGGAAGCCCTGGTTTGGGGTGAGGGTGGGCGAGACTGAGAGGCTG CTCAGACAGGATGGGTGGTTGAATGGAGTGCGGATCATGAGATCATCACAGGGCCACAGCATATCAGGCCATGGGTT CCCTGTTAATTCCTCTCCCACCTCGAGGACCGGAGCTTCTGTTAGGCAGGCGGGGGCTCTGCCGCAGGCCCACATTC TCTGCTAATTCCCTTCTCTCCTAAAGGTTTCAGATCTGTCTGTGGTCTTTTGTTTTACTTGGAAACACATGTTTAAT ATATCTTATAAAATACGTTTAATATAAAAATATAGTTCACTTTATAGTTCAGTTGCTTTGAGCACATTTAGTAAACC AAGATGTGCTTATATGAACTTTTCCCTGAAAAGTACCTGGATCCCAGAGTTCTACATGGATTGAATACTTATGTTTC GATTTTAATTCCTTAGATGGCTAACTCAGCATTATTTAAATTTTAATAAAGAGACTGGATACAATGTGAGCGAATTT CTCTCTATATTTTGTGAATCTCTATCAGAGCAAAATAAAACTGTTTCTGTTTTGCAATGAATAGTTTCTAGCCATGG AATTGCTGGTCGAGGCAAGAAAGTATGAATCTTATTTTTGTGGATCTAGCCAAGAAAAAGAACGTAAACTTTGAAAA GTATGTCATTTGCCATTCACAGTCTAATGAGAAACTCAGAGAGGCTAGAAACTCTCAATAAAAATTCTGATATCAGC ATTTAAGATCCAGCAAGATAGGGTATACGGGCATTTAAGGGATTCACAATCCACAGTTTACTGGCACTTTAAATGCT GTGAATCTTGTACTGGCAATCACAATCTTGATTTTATTACCGAGGGGGACCCCTCGTGAGGAATATGTCGGTGCAGT GTGCAGGTTAAACTGTGAGCTGCTCCAGCCTCTCTCCCGCCGGCTGACGGAAAGGTGGTCAAATTACCTTCGCAAAT CTGAAGGGTGCTTGGCTCCAGCAAATTGGCCATTTAGTCAAAAAGTGTCTGAAAATGACGTAGTCGTTGGAAGTGTT TGGGAATAAGCGATGAGTTGGCCAAACGCAGTGTGTTTTCTGTAGGCAAGCACCTGTGGCAGCTGGCAGGGATGGGC AGGCCTGCAGAGATGGCTTCCTGGGGGCGCAGCGTGGTCAGGCTTGAGGGTGGTGACAGTGCCCCCAGGAGAAGGCG AGACTGGCCAGAACTGGGACGGGCATGATGAGTGGCCGTGTTTCAAATATTGTCCATTTTTAACTTTTGAAAATGCC AAAAGCAAGTATGCTGCCTTGTGGAATCTGTGCAAGCAGTTCTTTCCAGGCTGACCTTGAATAGCCTGACAGCAGAG CGAGGAGTGAAATGAGCACGCCTCAGGCTGTGGTCCACTCGTGCGGGAAGACATGGACCTGCTACTGCTCCCTGCCC TCTGTCTCCCCAGGAAAGGAGCATTCTGGCTCAGAGATTCTCAAACTGGGTCTTCCAAGACCGCACAGGTGCTGTGT CAGGTCAGAGATGCCTCTGTAACAACGCCAAGACCTCGCGTGTCCAAGAGTGATGCTGGGGGAGGCTGCTCTAGCTG GACCTAGATCCAGGCCAGGCCCCAGACCTCTGCAGCTGTCCACCTACTCCTCACCACCACGCGTTTGCAGGTGGTGG ACGGTGTTTTATTTAAGAATGTCCTTGTTGGCCGGACGCGGTGGCTCACGCCTGTAATCCCAGCACTTTGGGAGGCC GAGGTGGGTGGATCACAAGGTCAGGAGTTCGAGACCAGCCTGGCCAACATAGTGAAACCCTATCTCTTCTAAAAATA CAAAAAATTAGCCAGGCATGGTGGTAGGCACCTGTAATCTCAGCTACTTGGGAGGCTGAGGCAGGAGAATGGCTTGA ACCCGGGAGGCAGAGATCACAGTGAGCCGAGATGGCGCCACTGCACTCCAGCCTGGGTGACAGAGCGAGACTCCGTC TCAAAAAATAAATAAATAAATAAAAAAGAATGTCCTTGTTGAAGCAATAAACGCTAATTGTACTACAAACTGACCCT GGAGCACCTCTCTTTTTAGTAGACACGGGGATGAAGTGAAGTGTGCGTAAAGCACTTCTGCCATGGACCAAAGCAGG GATGTTTTCCGGAGGAAGGGTTTGCGTGTGACTCAGGGTGACGGGAGTGGCCACTTTTTTCCTGGAATACCATTTTC ACCATTGAAAGTATCACTGACCAGCCAACCATATTTACCCACACTTGGGTTTTTGGCAGAAATTTTCAAGGAAAATA GCTGACAGTATTTGTTGCTAGTACTGAATGATGAAATCTGAGTTTCAAGTGAAAATCATAATTTTGAGAAACTTGCA CCTACTGCCGTGAGCTTAACAGCATTTCAATGTTTAAACAACGTTTTGCTGATACCAGTGTGGCATTAACTAGTGTG AATTTCGGTAGTGTGCTGTGGCTGAAATGCCTAACGTAGATTTGCATACCTCAGTGAACCAGTATTTTCTAAATGAT GGATAATGTTATAAAATTATGCCTGGGTAAAAATCCAAAATGCAGGCTAGGTGAATGGATTTTAATGGAACCGTGCA GACAGTTGATTCGGAAGGCTTCAGGGTCCACATGGAAACTGTGGTTTGGGAGCTGCCCCTTGTTGAGAGTTCTGTTC AGGTATCAAAGGAGAGTATCCACAGTGGCCCAAGGTAGATTTTCTTCCTGCACGTCAGCCAGAGCCCTGTATGGAAA CAGACTGAAGGCAGAAGCAGCTGCGAGAGTCCACCTGCCTTCTGTTAAGCCAGCTGTGGAAGACAGTCTCAAAAATG TAAACCAGTGCAACTTTAATTAATCCTTTTTTTTTTTGGAAAAATGGTTATTTTTCATGAAAATGTTATATGTGATA ACATGAAATCAGTTCATAACTATTTTGAAATGAAATATTTTTAAATGTTCTCAGCTTTCATTTCAAACACAGTATCA ATAGAAATAACTTGCATGAGGAAAAAAATAGCTCTTTAGAGTCCTCATGATGCTTAAGGGTGAGACTGAAAAGTCAG ACACCCACCGCCCCAGACAAACACCATGGTGGCCTCGGGGATGCTGCGAGGTCAGAGAACCTGCACTCTGCTTCCTT CTTGTGTAGGGTGAGGGAGAAGCCCCAAGCCGTTTCTTCTCAGGGCTCAGGTGTCTCTCATCAGTGTAGGGAGGGTC TTCGGGCATCCTATGCCCTGCTCATTCCCTCGATGTTATCCGGACAGGAGATTTCAGCTCCTGCGCAGTGGGCGCTG TTGGGATTCCCAGGCCTCCAAGTCATGACGGTGGGTGAAATGGAGCTGGTATTTGAGAAGGCTCGGAAGCCTCCCCT TAGAAAGGTGGGTCCTGATCAGCAGTTTGGGATGCCCCTGTGTTTCCTGCATTTGGGATGGGCGGTCCTCCCTCCTG CCTCCCCAGCTCTCTTGAGCACAGTGTGGCCGGCATCTGGTCAGGACTTCAGAGTGGCCAGCCCCGTGTTGCCGACG AATCTGAGAGGGAGCCCCTGGCTTCTTATTTTTCTTTGAACTACGTCAACGGAATTGCTTCGGATCCTTAGCCATTT TAAAAAACACAGTCATATCACGTCCCCTTCTGACATTCTCTTAAGCTTTAGCAAATAACAGAAATTTCAGTCTCACT GTGCCTTGTTCAGAGGTGACAACAACAATGGGTGGCTGAGGCGTAAGTCTCAATCATCCAGGCTCCTTAAAGCAGCT TTCGGGCATGTGTGGGGAAAGTACGCCACAGACACCCAGGGCTGTGCTTCCAAAGAGGTTTTCAAGAGGTTGAGTAT TGACACCTTTCCTTACAAGGTAGTGGGGAGGCCTGGAGGCCAGGCAGTGAGGCGAACAGTGCTCAGTGAATCCACGC TCCAGGTGAGGGGAGGCAAATGTCGGCAGAGAAGGTGGGAGCAGAGGAGGAGTTCCTTATGCAGAGGTCTCTGGGCA GGCAGAGGAAATGAGCCTCGACTTTGCTCTGCCCTGGGAAGGGAAGCTTGTGATCCACATTATATCAGTGTGGGGTT TTATGAGCTGGACTGAGATGGTTGATCTAAAGTCACAGTTGGCAAGTCCCTGTTTATGCGAGGCCGGCAAAGAATTC ACCTCTGAGTGATCTGTGGGGGCAGCCCTGTGTTGGTGCCTGAGGCCTCTGCCTTTCTGTGGAGGTCTGGCTGATGC ATGAGGCTAGAAACAGCCATTCATTTGGAAGAGGGCGTTGCAATGACTCAGCCTCTGGGCTTAAGCTTTCCTTTTGC ATAAGAAGTCTGAGGGGTCCTCAGATGTTTTATCTTCCTTTACAAAGTTGTGTTGTCAACACCAAGGAAACAGTCTT GATTCTGAACAAGGAGGTAGCCTGGGTACTGAAGGTGAAAAGAGCTCAGATCAGAAGTTTCTTGGAAAGAGATTTAA AGATTTTTAAAAAATCAGATTACTAAGGCATATTAAAATATGTTCAGTCTTACACTGTGTTCTTTGAAACCTTGAAT TACTCTAGCAAAAGGCTCAGAGGGTACTGCTATGAGAAGCTGGATCTTGGACATCTCTTTCAAATGCCTCGGTACCT TTCAAAGGGCTTTGGATGGAATGAAGGGACACCATTGGGTCTCACAGCTTTCTCCTGCCTAACATACCACAGCAGTG TATGAAATTGTTCCCATCAGCTCCAGCGCGTGAAAGACAATACGAACAGTAACACCCCCAAAGAAACAGTGGGGCTG GAGACAGCAGAATCCTTGGAGGGTTCTCTGGCTGAAGAAATCTCTCTCCTACCACAGATACTGTCCCCAGAGAAGGT GCACCTCTACCACCAATGCCCTCCATCCTCAGTTGACAAGGATTCAAAAAGTTTGTTGGTGACGCTGACATGTAATA TTCCCCTGCGAGTTACACACATCCAGGTGACCTTCGGACCAGCATTGCCGGCACACCCGTCACGCCATCAACCTGCC AGGCTGGAGAAGACCGCTCAGAGCTTTTCCTTGACTGGGGAGAGGGGAGCCGGAGCAGCGCCCCACGTCTCACGGTT CACCCCTGCCGTCTCTCGGGGCCTTCCTTCAGGCTTTCCCTGTATCCTCAGATCTTCGCCAGGGTCCTGTGATCCAG TGTTAGTTCATTCCATGTGTCATATATGAATGATGTCATTTGAATCATTTCAAGTCCTTTTGTAGGAAAACTAAGGC AGAAAGGCCAGCACCACAAAGAGGCATCCAGAATTCTCCTCGGCACAGGAGGGTGCAGCCATGGTGCCTTTGAGGAG ACGGACACGCTTAGTTCCCCCTGCCATCAGTGGGCATCTCGATGTTAACCAGATCTTAGAAATTGCTCTGCTCAGGT TGGACTCATAAGTGTACTCTTAGATGCATTCTTCCATGTTTTTGGAATTTCCTAGAGAAAACGTCTTCTTTGTTCAT GCCCGTGACACACGTTCCTCCCTGTGGTGACCTGGCGTCCATCCTGAGCTTTCGTGGTGTCCACCCATGAAAACAAA GGTGTCTGATCCCCCGTGCCACAGACATACTCTTAACCAGAATCTCCCAACCTGGGGTCCGTGGTGGTCTTCGGGGG GGTCTGACACTACCCAGGGTCAGATGAAAAGTGTTGACTGGATGCGTTTATGTGGGCGCTGCGATACTCTTCTTGGG GCGGGGCCCAGAGGGTTCCTGAAATTCTCAAAAGTGTCTGTGTCCCTCCTTGTGAGTAGGAGTCACTGTTTCAGATG CTCAGCTTTCCAGGTGATTTTTCAAATCCCTGGCACAGGCTTTCAAGGTGACTTAAGATTGTCTAATCCTCCTGCAG GTAGAAATGAGAGTCATCTGGCTGATGGTCACGAGCCGTCGGGGAGTTCCTCCTGTCTTGCACTCAAGCAGAGGAGT AAGGAGACCCCTTTAGAATGTACTTCTAATTGTTGAAAAGCACCTAACAAGTTTTCTATGGGGGAGATTATACAGGG ACTGGGTAGGGACAATCACGTAAGACATACCTGTTTATAGAAAGAGCTGGATATAGAATTATAGGTGGGTTCAGCTG CACAAAGAAGAGTCAGACTACGGAGGCTTGAAGGAGCTGTGAATACACTGGGCATCTGACATCATTGCTTACTTCCC CCTGCCCCGCCCTGCCCCTCCCTGCCCCAGGGTATCGGTAGCATGTGTCCTAATTAAATTTTGACATTATGTGAGTT TTAGCATGGTATTTTCTGCATTGGGCTATCTGTATAATGTCATGGAGTGGTGACATAAATAATGCTAGACTTTTCCA ATTTATCTACCATCCCAGCCCCCTCCCCAACTCAGTCATATGTGGAAAGTCAGTTTCTTTTTCCATTTATTATAGTT GTTAACTAAAGATTAAAATTTTACATTTCATTGCACTGTTCATAAATTGTTTATAAATACAGTGAAATCTAAGCAAA CCAAGATGATCTTGGAAAGAAGTGTTCTGTATGGAATTTATCTGTTCAGACCCAACATGCACACCCTTCCTTCGGGA TGTATCACCAAGATGAAGGCGGGCAGATCTCATGGGCATGAGCTTGTGTGCACCGAGGAAGTTCCTGCAAGCAGTCC TGCTGCACCTGGGCGGGGGACACCCTGTGGAGAACCACGGTGCTTGAGTGGAAGGAGTCTGTGTCTGTTTTTCAGAA TGCCTTCTTGCCTTCACAACTAATATGCAACAAAAATAATAGGATTGCACCTGCTTTTGATGCCTCAAGATATGCAG AAATACATTTCCCTCACTTGAGCATGTCTCTGGATATACTAGGACAGCTAGGTCGTGCTTGCGTTTCAGGCCACGGC CCTGCTCAGGAGTCAGGTTCAGCTTCTTGCATTGAGTCTTATCCGCCACAGCCCAACTTTAACAGTGGATGATAGCC AGGAAAGAGAGGGAAGCATTTTTGGAGCTGGTTGTGGTTTTAATGAGGCATATACAGACACTGCTTTAGTGGATGTA GGAGTGAGGGGGGTGGGGTGTAGTGGTTGAGGAAGGGGCTTAGTGGGCTGGGGTGAAGGTCTCTGCTGGAGATCTAG GAGTTTTCCCTAAATCCTCATCTGATCTTCCTCTCCTGTAGATTGTTAGGATAAATGAGCAAGAAGATTCTGCGCAA CAAACTGATACCTTGCTTTCTTTTGTGAGCAGCAGAGCTGGGGCGTGGAGAGGGTACGTCCAGTGTTGGATGTCAGG AAGTTCACGTCCCAGGGTATCTAGTACATCTGAGCTCTAAGCCTGCAAAGGAACCTTCTTTACAAATTGCACCATTG TTATGGTTGGCATTCTGGTTAAAAGTTCATCTGGATCTCAACCTCGCGTGAAATTGCAGAGCTACGACTGGAAAACT CGGCATCAGTTGAGAACCTTTGGGGACTTCTCAGACATTACAGTTAGAATTGAGCAAAACATGCTGAGTTCCATTCA CTCACATTTTGGTGAGTGGGTTAAAATAACAGTTTAGTTTCGTCATTTTTATTACCTACTTTTCAGACAGATCCAGA AAAATAAAAAAACAAAAAAAAAGACAAGCATCATTACCATGTTTAGGAAATCTTTGAGAAGAAATATGTATGAAATT TGGCATACTGGCTAGCCATTCCCTTACCCCCTTATTTTTGATTATCCAAAAGCTCAAGGTGACTTTGCTCTTCCCCT CTGTGACTGGGGTTAGCAAACAACAGCCATGGGCTAGATCTTGTCCACCAGCTGTTTTTGCATGATCAGGACGCTGA GTGTGGTTTTTTCATTTTTTAAAGGGTTGTAGGAAATAAAGAGACTATTGAGTAGAGACCTCACAGGCCTTGGAAAG TGTGACATACTTCCTATCTCCTTCTCTACAGAAGTGGCTGCTGACTCCTGCTCTTTGGGGTCGAAACACAAAGACTG AATAATGATGTGGTATTTTTGTATTTAAAAAATGGCATAGGGCATTTTTAGGGAGGTTGTGGCATTGACGTATTCTG TGTTGCTTCAGAGAGATGTCGTTCGGTGGGTAGAGGCTGCGCAGTGGCCCACTGTGATTGGCATGGTGGTGGCTCTC GGCCCCTGGGCCTGCTCTGCAGTCAGGTCCACCATGTGGAAGTGCTCTGAGACTCGGTGCACGTATTCAATGTTTAG TGTGTGCCAGCCACGTTCTAGGCACCGTGGATGCGGCCAGCAAGGAAGATGAGGACCCTGTTCTCATGCCCAGCCTC AGGGTGGGTGCATGGAGCATCCCTGGTCGAGTGTGTGCTCAGGATTCCTTTAGTATGTCATGAATCTGTCGTGTTTC TCAGAGCAGACTTAGGAGCCAGGCTCCCTGAGATTGAACCCTGCGTGGGCCACTTCTTTGCTGTGGAACCGTGGGCA AGTCTCTTGTTCTTTCTGGCGGCTTCCATCTGTATAAGGGGATGATAGTGCCAATCTCTTAGCGTAGGTGACAGATT CCGAAGTAAAGGGCTTGTCAAGTAGGCCTGGGGTGGGCCTGGCACATCCTGGGGGTGCTGCCTGAGGGTCAGATGTC ATCTTGGTGGCCCACACTCCCCTGCAGTGGTGCTGCTGGTTCAGGAAGTTAAAGTGGAAAACTGTGCTCCGGAATAA ACACAATTGGGAGAACCCAAAACCACACGCAAGAAAGCAAAATGTGCTGCCCGATTACTAAGCATGGAGTTAAACTC TATTTGGTGTTTTTGTTCTGAATTGTTAGGGAGTAAGAATATTTATGGTTGGAATCCTTGGCCAATCCTAAATTTTC TTCTAACTAGTAGATAATTAAGTGTCTGCTTCTAGAGGATGTAGATGTGCTTGTCTTGTATATTACAAAGTAGAGAC GACTTGCCCACACCCCCTCCTGGGCTCACACTCCATGCGGATGGCGTCAGTAGCTTCTGAGCCTCTTCAGGTGCTGA ACACATGCCCTGAGCTGCTTGTTTTGACAGGGACATCATTTTTAAAGAGTCCTTTATTACCCCAGTTTACTCACCTC TTGTTGTCTCCAGCCCTTCCCTTTTTTATGTTCTTCTCTCCCTTTTCCCTTAGCAATTGCTAATACCCTAGTTGGTA CTGATAAAAGAAAAACTTAAGCTGAATTGAATTTAAAGGAGTTTAATTGAGCAACGAACAATTCGCAAATCGAGCAG CCTCCCAAAGCCAGAGTAGGCTCAGATGGACAGAAAAAGGAAAGTGACAGAGACGAGGCACAGAAACAGCCAGATTG GTTACAGCGTTTGCCTTATTTGAACATGGTTTGAACAGTCAGCTATATTGGATTGGCCAAAACTCAGTGATTGGCAC AAGAGTAGGCTACGGTCTGTTTATACCTCCACTTGTTATAGTTCATGAGGTACAGAAAAACCTTGAGGCCACATTCA AAACATGGAAGGAGGCAGCTTTAGGCTAAGCTTGATTCAACAGGTTGCTCTCGTCACTAGGAAGTAGTCATGTACAA ATGCAAATGTGCTTGAAGTTTCAACCTAGTTTTTAGAATGTGGGATCCTGATGGGTATTCCTCTCATCTTGCTGCTT CTTGTCTTGCGCATTTATCATCCCTTCGAGGCAGTGGTTTCAGATCTTAATCCTTTTTCCTAGTCACCTAATATTCT AAGATGTGGCTATACAAAGCATTTCCAACCATTGTCCTTCCCCCCTCAAAAATTATGGTAATAAGCGTCCTTCCCAC CCCACAGATAATACTGCAGTCAGTGCAGACATATGCTTGTACATGCTTTCACACACGATTCACTGAGGCCGGCAAGT CTGTGGGAGGGAGTTCTATAACTGAATGTTTACACAGGGTGTGCATATCTTTCTCTTTGAATAGGTTGTTTCTATAC TGTTTGTCATGAAAACTCAGACCATTCCCATTTTACCATCCTTTCTTCACCAGGGAGATAGAGTGACAGAGCAACTT AATTGTTGCCCATCTGATGCGGATCAAGTGTCATATTAACTGTGCATATCCCTGCAACGTTTGCACACTAATGTACA TTGGTCTTTCTAGATGCCTGTTGTTACCTATAGGTAAGTAGGTAGGTAGGTAGGTAGGTAGGTAGGTAGATGTCTGC TAGCAATTTGACGGGTCATTTCTTTTTGAAGGATAATGAACAAATTTGAAACCTGTGGCACAGCCTGGGACCTAAGT CTGTGTGGTGCAGGGAGTCTAACTTCTGTCTAAGTCAGTAGTATCTCCAGGGATACAGCCTTACATCCACTGCTGGC TGCGGCTTCTCTGAGCGACCCATCTCTGCGTCCGCCCATCCATGGCTGCCATCTCGCACAAAATTATTTTCCTGGGA TGGTCCCTTGAGTTAGTTCGTGGTTAGGGGTAGCTCTCACCTTAGTCCCTACAAACCCACCTGAATTTCCTTTGTCT CCGAGCCACATGGGAAGGAGACTGTGGAAAATAAACCAAGAGATTCTCTAGTAGGTAGAGCTAGAGGCAACAGGTTA AAATCACATCTTTATAGGAGAATGTTTGGGGAATGCATTCAGCAGTCACCCATTCTCATTAATAGACCCAGAAAACA ATTAAAAAATACACATTGTGATTTGGACTGGGCAGACATGCCGACTGTGGAGCCATTTCTTAAGAGAGGGAGGTTGG CAGGTAGCTGGTGAGCCTATTTCTTTGCTCATTGAGCTAGCAAGAGCAACACCCATTACTTTCATTGGATTACTTGT TTGAAAATTAAATTAATCAAGTGAGGTAAACATCCGTATTGCCTCTTAGCACCCCCATAGGCTGCCCGCAAAATGGC CTGCGTGGGTATCCTAAGAGCAGGAATTGGCTATGACCTGCCGAGGTGGCCAACTCAGATGTGGCCAGTTTTCCATA CAAGTATGAAGTTCCTGAATTAATGGGAAACCTGGCTGCATTGTCTGATGGCTTACTGGCAAGCAGTAATTAGAAAA CATTTTTCATAGTGGAACCTCAGGTTTAGCTATCCAGAGAAATTGGATATTTCAAAATACTCCTAGTTGGTTAGTGA AACATTAGTATTAATGACAAATTAATATTAATATCAATATCAGAGTTGAGTATGTAGCCTTTGGGAAGAGAAGGGAA AGATTTTAAGGACCAGATTTAAGTAGCCTCCATATGCCTTTCCTTCTTGGTGGCATTTTTCATCTGAAAGCATTTTT TTTTTTTTTAGCTCAAAAACTTAGATGTGAAAAATTCAACGCATTGGGAAGAGGCGTCAACATTTGAACCGCAAATG ATTAAACCTTTATGACTAAAGTAATAGGTTTGGCTTCAGTCTTCCCAGTGGAGTAGCAAGCAGAGGTCCTTTTCAGT TTGCAAACAGTAGTATACAAACTTGGTCCATATCAAATACTGTTTCTCTTCCAGGGCTTGTGTGTGCACTGGGAACA GCAACAAAAGTTGAACAGCAACTGGGTGGGGTTTCTTTATGTCTTCTGTTTAATCAGAGTTTCCTGATGGTTTGGCC ACTTCATTCTCCTTTGGCTTAAGGGGTTCTAAGCCATGGGGCAGACCTTGGGTGGCTCACTGCTCTTGGAAGGAGGG TGTCCAGCCTTCCTGGCAGTGTGGAGATGAGTAAGGGAAACACTGCAGGGGCTTCTGGCTTCCTGGATCCTGCCCCT CACCTGGGGACTTTGTCTAAGTCCTCATCCTAGCACCACCTCGAGATCGATTCAGGCCTCCCCAGCAGTGGCAGAAA TCCAACCATGGGAGCTAGTGGGTTCCATTACTGTGGAGTAGGGAAGAAGACATATGTCCCTTCTAAGTCACTTTAAT TTGGTCCAAAATAAATAACCAAAGTCCTTGGGGAGACCGTCAGGGAAGTATCTTCCCACATCACACTTGGTCTTTGC AAGAAGTGCTGGTGGGCGTGCAGGGCTTCTTGACACTTCGCAGCAACGTAAGGATGTGGTAGTAGAGTGCTTGGTGT TCCAGTGGCCACTGCAATACAAATAGAGTGAGTTTTGTCGCCGTGGTACATTACAGCCATGGAAATTCCCCGTAGTT CATTGGTCCGTGACCAACAAAAATCCCCCTAGACTAACAATTAATCAGGCTCTGCTGAGCCTTTGACTGGCGACAGT TGCAGATGTCACATCATGCGAAAAGTTAAATCTCAGCTTTCCCCAAGAAGGAAAAAAAGTTTATTTTTACAGTTTAT GGAACTAGTTTTCCTTTTGATCAAATGACCTGGTCTTTAGGGGAGAAATATTTTCATTTTTATGTTAGCAAGTGTGA TACAGAATCATATACATTTAAAATCTTCATTTTTATTGCTTTTTTTTTAAAGTACAAAATTTTAATAGTAATAGTGA TTTCAAGAAAATGTTGTGAGTGTCACTTTACTAGTCAGGCATGTTGAAAAGGAACGCGCTTCCTGAAATCTCCAAGC GAGGTTGGCATTTGAGACCTCTGGGTACGTGAGCTTAAAATTAATATAAGTACCTGAGCCTAGAGCCCAGGAGGTTT AGAAAGACTCAGAGATGCGCTTAAAGATAATTGGTGTGCTCCTCTTGTGAGAGCGGATTCACCAAAATGAAGTTAAA ATTTGTTTGGGAAGTTGCTTGTACTGTGCCTTGTGAACTTACAAATCTGTGTCACAATCCAAAGGGTTGAGAGCCAC ACAAAGCAAAACAGATGGGCCGTGTGTCGTAGGATTTCCTGCTGTCCTTTCGGCTTCAGGTAACTAGGACTTGTGAA GCACAAGATACATGGGAGGCAAATCTGAAAAGGAATGGTGAGTGCGCCCCACGTGCCTGGGTAATACCTGAGTGCTC CCGGCATTACCTGGGGGCTGCCACCCTCCCTCCCCCTCCTTCCTTTCCAGCTCAACATTGAGGTGAACTTTTTACCA TGATCGATGTAGCTTTCTGGTGTCTACACAGATTTCTGGATGGCCTCAGAAATGTCACATACTGCTTCGGGAATGTC TGCAAGTATATTTCATACATTTTACCTGGCAATTAAAAAAAAGTCATCTTTAAGATATTAGCATGTGGATACCGAGG TTCCACACAAAGCAAACAAAGAGGTCATTCTTAGCAGCTAATTTTAAATCTTCAGGCAACTATACGAACCTATGTCA CAGTCTCTCCCAAAATTTATTATAATGCCCTTGTTATAAATTTAGAATATTTTTGCAAACTCATATAAACAAGTAAT TGATGCGACTAAAATTCTTGTCACATATTTATTGCACTATCAGCTAAAATTTTTAAGTGACAAGAACCAAAATAATC GTTAATTTTTATAGGGCAAGGATCTGGCTTTTTGTCTGACACAAAGCTGTATAAAAAACTGCTTCTGATTTTATGCA CATTGTTTTTAGTTAATGATTTTCAGCTGTTTGTTGTTTCTCTGATAGCATGAAAATGTACCATATGCTCAGCCCAA AGACAGATGATTAGCAAGTGAGATTCCGGGCAGCTGTCTGACTGAGCGCGTTGGGTTGATAGCATTCTGCTATCATA ATTAGCTTAAGCTTTGGGTTAATTAACTTTCTACCTGGATATGCATAATAATAGCAAACTGCAAAAAGCAAGAAGCT TTCAGTACATCAACAACATTGCTGTCTTTTTTATTTGGTATTTCAAGAGCATATTAGAATTTCAAGAGTGATTAATC CTGGGAATATTGTCATCTACTGTAGATTTTATTTGCAAGCCAGATAATACTGAAACAATTGGAATCTATTATAGAGC AGAAATAGCATTTTAAAATTGTAATTAAAGTTTCTAAAAGCAATTGCTAATTTCAAATGCCTTTGTTGGCAAGAATA TTAGGCACACTGCTTCTTGTATGGGCAGCTTGTCGGGCACAAAAAATACCAGCACTTACACTGTGAAGAATAAAACT TTCTTTTATTTAAGGGCTGTATTGAAAATAATCAGTTATTTTTATGTAATTTGAAAGTAAGATTACTCTGTAGTTTG CAGAGGTGCTGTTCAGACTCCTAGATTGAAGATATTAACCCTGTGCCCTCTTGCAGGTTCTCACCTTTGTTACCTCC TGAGCAGTGGAGGGCTGGAGGCCTGGGTAGGAGTGCCTGGTGCCCTCTTAGAAGATTTGATGTGTGCGTGTGTCTGC GGGTGCCAGAGGTCAGATTTTTCAAAAGTCAGTGCTATACATTTGTAGCTTGATATTTGTTTTCTACCCCAAGCAGT TTCTAAATCAATTTACTGATGGTATGAAATGGGGAGAGGGAGGGCTTTGTCTCCATCCTCCTCCTTGTTTGCATGAT TTACCAAAGCACTCTCTACGACGCTCATCATCTGAAGGGGCTGCCGGGGCCTTTGGAGAGCACAAGCTAGTGAAGTG GATGGTGGATTTGGAGTAAAAATTGTAGTTTACATTTCCCAAAGCACCAGAGAGCCTAGCACTTAATTCTGAAATAA GTCATGCCTGTTGTTACACTCAGAAAAATATTTTATCTTCTGAAAAAAAAATTCTTTACATATGCAGTGGATGGTGA AGATTTGGTGGCGGTGAATTTGCCCTGGCTCCAGAGGACTTTACTTACAGAATCAGCAGTCGTGAAAACGTGCTTTC TCAGATGTGTGACTTGTGGTCAGTCTGTGGGCTCAGGAGCACCCATTTGGTCAATCCATGCAAGTTTTATGGGGCTG TCAGAAGCCATTTTTCAAAATTGGCTTCATCTGAGGACACGTGGAGGAGCCACTCTCTTGGTGTGGGTAGTGAAAGG AGTGGCTCCCTGTGGCTCTGTCTTGGGAGTTGGGGGCTGCAGTGGTTCACTGGGAGGAGGGGGTGCCCCTGCAGGCC CCACCTGCACCCCACCTCGCCGCCCCACCCCCTCCCCCCGGCTTTCAGGCTGTGACCTCAAGGCCTTTTATCATTTT CACAATGATGTCTCCAACAGACCTTTACCCCAGTCTCAAAAAAGATACTGCCAGAGCCTGCCTTTGCTTTTTGTTTA GTCTGCTTCGGGCTGCGTCAATAAAGATAGCAGAGGGGTCAAGAGAAAAGAAGTGAACGGAATCACAGTTTTGGTGT TGAACCCTTAAATGGGGGCCCCACTGTCTCTGCTGTGTAGCAGGCACAGGATTATCTGTCTGCCTTCTGAGATTTCT TTTAATGTTTTACCAAATTAAACATGAACAATTTCAGGATGCAAAAACTTGACTGCATCTTGTTGTTTCTTAAATAA GAGCACTTTAAGAAGGCAATATATGGAGATTCTTTTGTGGGAAAGATGTTTCAAATGGGTTATTACTGGCCATTGAA AGAAAGAAAAAGAGGAAATGCATCGAGGCCTCATTTTTTGGCCTGCACATTTGATTATTTTATTTTAAATGCCATTT CAAACATAGTGTAAACTAATGATATTATTTTTTAAAAAACTTACTCTACTATTTGCGGTCCTTGATCTTTAATTTCT TTTAATGTCAAAATTATTTATTTGGCCAGTTCCATTCCAGATGTGACTGTTGAGGGCACATTAATTTCTATTCTGTT TTCATGGGCCCCTGTCCCCATCTGTACATCATTTCTGACTTCCGTGTGCTCCCTAGGGAGTTCACTTATTCATATTG TAGGTTTCATTTGCTGTGTAAACAGAATAAACAGACAATGCAAAAATCCCCACAATACCAGAAAATAATTCTTTTCA ACAACATAGTGGATCATATTTAAAAAAAAACATGGAAAATGCAATACATGTGAAGCCCATTTTTTCCACTTTATTGT CCTCCCGAGGAAAGGCTTGTGTTACCAGTGCATTTCCCTTGAATTTGATAAGTTCATTTTTATTAAAAATCCATCCC AAACAGCATTTTACGATAATTCTCAAACACGTGTTGTGGACATTTCTTTGTTTTGCGTATTAGCTTGGTCTTGCGGG TTAATTCGGAATGTGTTACTCAACTGGTATGTGCTTGCGTGGCCAAAAACACCCGTTGTGCTGTGTGTGTGTGAAAA GCAACATTCAAGAACGGTGATTTTTTTTTTTTGACATTTACAAATAAAGAGGGACATGAGTTATTTATGCTCCAATG TTGCTGCAAAGTCCTTATCTCCATTTGGCACTAAACAAGGATTTGTTGTGGGATTTGTGAGGGCTGCGCAGTGCCTC TGTGCTAAGCACCCAAAACTCTAGGGGACTGGCACTAATTTCCTCTCTCTCGTAAAACAACGTAGTATTCATAACAA CTCAAGAGGCTTGACATAAGTAATGATGGCATGTGCAGGCGAAGATTACCACCCAACAGTGTAATCAAGGTGCTAGG TACTAATGCAAGTTAAATTGAGACAATAATGCCGAAACTTGCATTGTGGGATTAGGAGGGCACTTGAAATGCTGACG TGAGCACATCCTGCCTGCCTGCCTGTCTGGCGCTCCGTTCCTGTTTATACTTAATGACCTCAAAATTTGTATGTCGT TAACACCGTGTACTGAAGTGGGAGAGAACACGGTTTGGGAGGGAGAAGACTCCCTGTCTTCGTTGACTTTTGTCTCT TTTGGTAATTGGTGGCTTTTCCTGCCGTATTAGGGAGCAAAGCGTGCAGCGGGGAGGCCCCTGAGGTCTCTGTAAAC ATGCTGTGGGCACCGAGGGCCTCCGCACCCGGCGCTAGGCAGTAATTTACATACTTTGAATGAAAAGTCATTTGTGC CTGCAAAATTGTTATTGCTGGAAGAAATTTAAATACTAGTCATATGGAAATTTGAAATAAAGTCATATTAAATTTTG ATGCTCAGATCAATATTGTGGAGCCCCGGTAATTAAAGTGGGTTTGTTTATTTGGCTCCTTATAAATAAAAAGGGCT TAATACAGACTAATTACACAGAATCTTTCGTCTACGGTGGGATAATAATGGCAGCAATTTAAAGTGATATTAAATGA GAATTAATAAAGGAATATTGAGTCACTTTGACTGTATTAAGCTGTGAAATGATTCCTCATCTCAATTTAACTTTCTG TCTTGAGCATAATGTTTGATAAGCAATGCATTTTTGTAGGAATAATCTATAACAGTATTTGACTGCAATATTTAATA ACAACTAGACTTGTGACTTTATGTTGTTTTTAAATGGGCTGGGAAAGCCCGTTTTTTCTCTGCAAATTTATAGGACA ACTTAGAGGGTTCTTGCCCTATGGTAGCTTCACAAGAGTTCTGAGTTGGCACCCTCCGGTTTGGGAGGTAGGTGGAG ATGGCTTTGACTTTTGTTCAACTTACAAGGGAGTAACTTCTTGGAAGTGCAGTCCGGGCCAGCAGAAATGGTCATAG TAGGCCATGGTGGAAGGAGAATCAGAACCACGCGTAAATCCTCAGAAGGAAGAGGGCAGTCATTTTTTTTTTTTTCT CTTGGAGGAATATCCCGGGAAGAATTACCTGGAAGAAATCAGAGTGGTTTTGGAAGATGGATTGTCGGATAACATTT TAACTTAAGGGCTGAAGTTCCTTTCTACCTAAGTACCATTGAAGAAGTATGTTCCTGATCTTAAACATTTTTAATAG CAGTCTAGGCCAATTGACTCTGTGACCATTAAGTAATTTTCAAGTGGACTGGCTGCTGCCAGGGTGTTTGTGTTTTG CTTTGTTTTGTTTGCAGAGTAACTTGTGTGTAATTTCTTTCCACTGTGCCGCACAGCATGTCATGTCCACGTTAGCA TTTCTGCCCTTTTAAAGGGTCCTGCTGAAGGTCAGGACCTCACACTGAACACCCTTTTTATATATATTACAAATTGC TGGAATTGTTCATTAATTTCTGTCTTTGAAATGCCATGTCAACCCTCTAAAGGAATTCGCAGTGCCAGTTTCCCTTG GACAGCTGCTCACCATGGTCCAGTGCGAATTTCTGATGAAATTACAGGTGCAGGGAAATGCAGAATTAGAAATATAT CTGATGTTGCAATACTTGTGAAGCTATAGCTTTGTTGATGACAGGACAATTCCATTTTTGACAGTTTAATTTACTGT TGCCAGTGGACAAGAGCAAGAGGAGGACGTGGGGTTAGCCACCTGCCCCCTCGTACCGTGTTTCACATGCGAGGTTG CCAAATCATGACTCCCTCAACCTGTCGGGCTCAAATGAGAAGGTTTTCAGCTGGGAAAATGGAATATATCAGTGCAT GTAATATTGCCTGACCTCATAAAACAAAAGGGAAAATTGCAGATTCTGACAGCCATTATGAATCTTGTATCAGCATC CAAAACGACTTGGAGCCAGGGTATAGTACATGTTTATAATAGAAAAAAAACGGGGTTGCCACGTTGACTTGCAATAT GGAGCAAAAAATGACTTGTCATAATTCGTTCTCAGATGTTAAAGAGGCTGTTGAATTTACTAGTATATACACAGAAG AATGCGTAGCCCGGAGCAGAGTGTGGAAATAGTCCCTACACAGAGGGGTCTGCTGAAGTTAGTCATCGAGTTAGATT AGAATGGAAGGCAGGAGGGGAGGAACTCCGGGTTTGCGCCGCAGCTGCGTCGGTGGGGCCAGATTTCTCATTACAAG ATGTACTGAACCTTTCCACTTTCACCCACTGTAAATCTATAAGTAATCAGGCTTCTAAAATAAAGCAAACAACCTTG TTTTGAGATTATGAGAATCATTTGAATTGAATGTATTCTGTTGGAAAACTGGTGTATTGAGGCATGGCTTTTTATCT TACGCTTAAAAAGTTTTATTTATATTAAAATAAGGCATAATCTCTCTGCGTATAATTATACGCTCTTCGATTTAGTT TTTCTATTTAATAGTCTATTCCTTCACCTTCTTGCCCATTTCTTTATGTTATTCCTTAAAAAATAATTTCTAAGTAC AATAATTGTCTCAGCTGCTTTTGGTGATTTCTTTGGGAGGGGAGATGTGGAGTGACAGTCCAGGAACTTTCTGCCCA GGGGCAGGAGGCCCAGCGCGTGCTCCCCAGCTGAGGCCCCGTCCGCCTTGGCCACTCCCTTTCATCTCCCGGGCTGA ATGCGGAGTGTGGTGACTTTTATTTTTTCCTTTGCTATTGGTTTAGAATGAGATGTAGCAGTTGATTTAAGTGAAGT AAAGCATGCTTACGCAGTACACTGTGTCCCTGTCGGGGCCTGCTCTCTCATGTCACCTGCCGGCGGTGGCATGGAGA CAAAGCCTTCTCTCCTCTCTTACTGCTGCTGGGCCTCTCCTGGGCAGGTCCGGGCTCAGTGGCTTGAACAGGTGATG CAGGGAGGGGCAGTGCCTGTGGCCACAGTGATGGCACAGGTGGACATGATCCTGAGAGTCCAGTGGGGGCTGTAGCA CAGGAAAGGAGGTTGTCTACAGCCTTTCTCACCACACCTTTCCCTCCTCAGTGGAATCTCTGGCCCCATCTGGAGTC CCTGGAGGCTGGATGGTAGAACTGGAATCGTTGGCCCGATCTGGAGCCCCTGGAGGCTGGGTGGTAGAAGTGGAGTC TCTGGCCCCATCCGGATGATGGAGGTGGAATCTCTGGCCCCATCCGGATGATAGAGGTGGAATCTCTGGCCCCATCT GGAGCCCCTGGAGGCTGGATGGTAGAAGTGAAATCTCTGGCCCCATCTGGAGTCCCTGGAGGCTGGATGGTGGAGGT TTGCTGGGGTAACCCTAGGCGGTAGGTGTTGCCACCCAAGGTGAAGAGGAACTCACAGCAGCGCTGGCTTAGCAGCT CTGTGGGGCATAACCCACTTCTTTGCAAACTCTGGTGCTGGGAGATGATGAAATGAGCACCTGGTACATTAGGTTTG GGACTTAAAGCTGATACTTCCATTCGGGAGCAGGATGAGTAAGACCTGGTGCTTCTTTGCTCAGAGCTCTCTGAGGT GGGAGGCTGGAAGCGCTTCCCTGAACACTGTAGGAAGTGTTGCAGGAGAGCGGAAGAGCAGGAGGAGGAATGGTGCA GAGGAGGAGGAGCAGTGCGGAGATTTCACCTGGGGGGACACCACCACGGGAGGCAGGCGGCAATGGTGGAGGCGTTG GCTGAGCAGGGCCTTTAGAAAAAGGCCCGGGAGCTTGGCAGCAGAAAGGAGGGTGGAAGTGCAGAAGCATCGAGATG CCCAGTGACGTCTGTGCAGTTTGGATTTTGCTGTTGAAAAGCAAAGGAGATGAATAGAAAGCTTTAGGCAGACACTG AGAGTTTTTGCTTTGGAGGTATTTTGATATATGGTAAACTATTGTTTGGATTATTTTGGAGTATGCTTTGGTCTATT ATTAAATATCCCAGTCAAAGATAGCAGATATTCAATATTTGAGTTAGGATTTTTCAAATACTTAGAATATTTGAAAA TATTTTTATCATTAGAATTTATTGATTTTTTGAGACACTATCATATTCTAACAATTGCACCTTATTCTTTGGCGGTA TCACTGTCATTGTATTAATGGCAAAGGCTTCAAAATAGCCTGTCAGGCCCATGTCATCTGCAAGTCAACCCTCAACC CTTTCTCTCTAAACTCCTCTCCTCCAGTTTGCCAAACCACTGTGCTCCAGCCATGCTGCCCTCCTTGCTGTTCTGGA ACTTGCCAAGTATGCCCCACCCCAGGGCCTTGGCATGTGCCTGGAACACTTGAGCCCCCACCCTGCACATGGCTGGC CCCTTGTTTTCTTCAGCTCTCCGTCCATATGCAATAGCGATTCCTCATGCCCCTCATAGCACTTCTGGACTTTTTCC TTGCTCTATTTTTTACCAACTAAAACAGGGGTTGGCCAACCATGGCTCTCAGGCTGGCCACCTGTTTTGCAAATACA ATTTTATTGGAACACACTTATAAAGACTTGATTTCTTATGGCTGTTTTCCCTATGATGGCAGAGTTGAATAGTTGCA ATAAAGTCTGACCTGCAAATCTAAAATGTGTGTAATATCTGGCTCATTAGGCAAAAGTTTGCAAAGCCCTCATCTAG GATATAGTGCATTCATTTGCCTCTGTCCCTGACTGGAATGCACCCTCCCTTAAGACAGAGCCTATCTCTGTTTGGCC CACTGCTGTATCCCTAGAGCCTACAACAGTGTCTAGCACAAAGTATGTTCTCGTGAGATACTTGAATGAATAAATGA ACAAAAGTGAAAGTTCCAGCCAACAGGATGATGGGCAGTAGTTAACTATGCCTCTAATTCTGGCTTAAACTTTGGTA TTTCAGCCTTTATGTATGTTCTATTTTGCAGTTTTTATGGTGCACAGGATGAAAGAACACATCAACTCCTAGGGAGT AGAGGAGGCCTGGAAATAGACTCAGATGCAGAATTGTGTGCAGGTGGCTGTTGGGGAGTGTATTCATTCATTCTCAC ACTGCTATTAGCATCTGAGACTGGGTAATTTATGAAAGAAAGAGGTTTAATTAACTCAGAGTTATCTGGGCTGGACA GACTTCTGCTTCTGGAGAGGCCTCAGGAAACTTACAATCATGGCCGAAAGCAAAGGGGGAAGCAAACACATCCTCAT GGATGGAGCAGGAAGAAGAGAGAGAGTGAAGGGGGAGGTGCCACACACTTTCAAACAACCAGATCTCTTGAGAACTC ACTCACTATCATGAGAATAGCAAGGGGGAAATCTGCCCCTGTGATCCAGTCACCTCCTACCAGGACCCTTCTCCAAG ACTGAAGATCACAAGTCAACATGCAGTTTGGGTGTGGACACAGAGCCAAACCATATCAGGGAGTATTCCCAGGATAC ACTCTGTAAGGAAGTGCATACTGCAGGATCGGGCAAGGGAGAAGCAGGGGCTTGCATTATGACCTAGTTGCAGTTGA GGTCTCATCCTGTCCTGCAGGGAACTCTGGAGAGAGAATGACCTGTAGAGTCATCCCAAATTGAGGCCGGGGGCCTA AGTCTTGGCTCCCGGGTGCGCTCTGGGGGGGCCATAACCTTGGATGAGATGCTTCTCCCTCGAGAGCAGCGGTGAAG TATGCACCTGCCTCTGAGCTCCTAGAGCTGGGGTGTGATGCACTGGTCCTGAAACAAGGCCTGGGCAAGTACCCAGA ATTTCAGTTGTCAATGGAAAGAGTCAAACTCTGTAAAATACTTATAGGGATTTATTCTGAGCCAAATATGAGTGACC ATGGCCAGTGACACAGCCCTCAGGAGATCCTGAGAACATGTGCCTAAGGTGGTCGGGGTGCAGCTTGGTTTTATACA TTTAGGGAGACATGAGACATCAATCAAATACATTAAGAAATACATTGGTTTGGTCCAGAAAGGCGGGACACCTTGAA GTCCAGGGGACTTCCAGCTTATAGGTAGATTTAAAAATCTCCTGGTTGATAATTGGTTGAGTTTCTCTAAAGACCTG AGATCAATAGAAAGGAATGTCTGGGTTAAGATAAAGGATTGTGGAGATGCAAGTTCTTATTTGTGGAGGAAGCCTTC AGGTAGCAGGCTTCAGAGAGAATAACTTGTAAAATGTTTCTTATCAGACTTCAAGTCTGTGTGGATGTTAGTGCCGG AGAGGTATAGCGAAGCATATCCAACCCCCACTTCCCGTCATGCCTGAAACAGTCTCTCAGGTTACATTTTGAAAGAG CCCTGGCTGCGGAGGAAGTCCATTTGATGGTTGGGGTTAGAATTTTATATTTGGTTTACAAAGTCTTGAATTAAAAT ATTTTATCATTACCTAGTTTTATACCCGGGAATGTTAGTTGTTGCACGTGAGGACATGAAGTGAGTTAATGCAGGGC TTGGGCCGTCCAGTGTCTTCTTTCCCCACAGCCTTGCTGGCAGTGACCCCATATAAATAGGAACAATTACCGGAAGA AACTGTGCTCCTCCTAAAGCCTAGCTAGTGACTTCCACCTTTGAACCATAGGCGAGGCAGCACTTAACCAGGGCACT GTTTGATAGGATGTTACAGGTGGTTCCAGAGAAAAACGAAACATGTCATCTTGTTAAGGGAGGTCTTCGTTTCGGCA TCTCTGTAAAATATTTAAAGAGGTATTTTTATTTCTTTAAACAGGCTCTGCCTCTTCCGTCCCCCTCGCCCAATGTG GACTCTGCCCGTCCTTCCTGAGCAGTGAGACTCTGTCCCCATGTGCTTCTGGTCACAGCTGCGGTGACATCCTGTAA CATTGTTTGGTCCTTGCTTAAATCAGTTACTCACCATGTTATAGCCGAGTTCAGACCCACTACACAGACCTCCTAAG GTGCTGGCCTGTCTAAAACATTATTTCCATTATTCATTCCTGTTCACTCTGGGATAGGGAAGCCATGCTCCAAGCTG TATTGGAATATCAGGTCCAGGGTAATTAGCCAGGGCCTAAAGGGTCTGTTTTGGAAAATTCAAGTACAAGTAGAATC TTCTTTAGTATCTTGGATCCACCAGGGAAGAGATGGTCTCTGAGGCCTGCTATGCAGAATAAAACCAAGAGAGTCAC TGTGAAGGAATCCAAGAGATGCAAGTGCTCTTTGCTGTCCAGTGATTAAAATGAAAGCAAAGACGGGAAGCGTCCTT GATCCACATTTTGCCTGTGATTTGAATATCACATGCTTGGTCCGGGCACTTAGGTGGGCTTCAGTGATTTGGGCCGG AAGGAAATGGTGCCCCTTTCCTCGAGTTTCTAGATTGTTTTGTCACAGACAGGGGAAGCCCTCATCTGACTTGCCCT GTAGGACCCTAGTCTGTCGGGAGGTCTCTGTCCCCACCCCTCCCTGGAGTCTGGGGTGTAGTTGGGCTGACCCTCAA AATATGCTGTGTCATCAAAGGTTCATCATCTATCTGGTCTGTTTTTTAACGCAACTTGATAAAATACCAGTGTTTTA ATAAAAAGGTCTAAAACATTTACCATTTAAATGAGCCTCCCTTCCTGGGATGCACACAGGAGTCTTGGCGGGAGGCT GGTGGCGCAGGCTGATGGGTCCTGTCCCTCTGTGCCTTGGGCGCCTCTGCCCAGCGTCACGCAGTGTCATGAGACCC CTCAGTGCAAGCGCAGGTCTGCCTGAGGTCCCCCCTCCCACCTGCAACCTGGATGCCTTTTGTGCCTATGGAACACA ACTGAAAGGGCCGGTCAGTGCCATGGCTTGGCTAATTCATGGTGGACATGCATTTTGGTTTTTAAAATTATGGTAAA ATATACATAAAATTTCCCACCTTCACCATTTTTAAGAGTCCAGCTCAGCAGCTGTCAGTGCATTCACACCGTCGTGC AGCCATCACCACCACCCATCCTCAGAGCCCCTCATCTTCCCACAGGGAAACTCCATCCCCATTGAGCACAGACTCCC CCTTCCCCAGCCCTGGCACCCACCCTTCTACTGTCTCTATGAGTCTGACTACATCACATAAGTGGTACAGCCATTGT CTTTTGTGACTGGCTTATTTCATGGAGTATCATGTCCTCAAGGTCCATCCGTGTTGTAGCACGTGTCAAAAGGTCCT TCCTTCCTCAGGCTGGATATGGGCTCTTTAAAAGCCTATTTTCTTAGAGCAAAACCCGTTTCCCCCACACCTGATCG TCACAAGCCGTCTAAGACACGTGGTCTAGGGTTTGCTAGTGATCGTCTGTGGGCTTTCCGAGCCTGCGCTGGTTTTG CTGCCACAACCTGAGGTCCGCGGACGTCCCTGTGCTCGCTATGACTTCTTTGTGTGAGACTGTCAGAGTGTGTTCCT GGCCCTGACACGTGCTCGGCGGCTGGTTTTTCTCCTTCAGATCAGCGGCCTTGGACAGCTTTCGCTTCTTTGGCAGC CGTTTCAAGCTGCTCCGTCTTGTCATTTTAGAGTTCAATATCTGCTGCTCTGAAGGAAGAAACGGGGATGGGCTGGA CCATTGCACTTGGTCTCTTGACCTCGATGTTGCCCATGAGCAGTGAAGGATGACTTTTGACGAGCCATGTCAGATGT GACAGGCAATCTAGTTGGCTTGAGTGGAAATGTGCTGTACAAGTTTGAAGCCTTGGTTGGGGGCATTTTTCTGGTGT TCAATGCATTTAAATTGACACCAGACTTCAGTATGTTGTTCATTTCAGGCCCAGCACTGTAGGCTCCCATCTTTAAA ATGTGTGGGTGCCGAGCGCTCCCTCGTCAGCTTTTGCAAAGCATTTTGCATATTCCCAGTACTGTATTTACATTCCT GGCTCACATTGGTTTTTGTTTTTTGTTTTTCCTATCTTAAAGCTTATTTTTGAAGTGAATTTTTAATGCTTTCAGTT GAGTAGGGATTTGTGGAATTTTGAGGGGTGGGGAGGTGCAGTGGAGAAAAGGGGGAAAATGGTTGTTTCTTGGCTCT CAGCATAAGCTACATTTTCCATCATATGGAGTGAGATGCCTATATTGGGCAGCTGTGATTTTAAGTGAAAGTCATTT CCAGTTGTTTCTAATGTCTAGAAATTAGGTTTGTTTTGATTTTAATTGTCAAAGGAAGGGACTGTGGGTGAGGAAGA GCCCTTGCCGCCGCCTCCCCTGACGTGCCCCTGCTTGGGCAGACGCCTCCCTGGTGAGGTGTGGGCTGCGCTGGACA GCACCCAGGACCACGGCCTCGTTCTTTTCCTTCTCACTGTGTTTTCCTCTTGGGTAGGGGTGAGGGTGGTTATTTTA CTCAGATCTCTGAGCCTTAAAGTGGATCTTCTGCAGATCATCTCCAGAGTCATCTGACGGCGCCGGGCAGAAGTCTG TATGTTGGGAGCTGTCCCCAGCTCCTCTCCTTAGGACTTCTGAATCTGCTTCAACCAAGCATATTCCTGCCTCATCC GGAACATTCCTCACCCTCTGCCCCAGTGCAGGCGGTGTCCACATCTCAGGGATGCAGCGTGGTGGAATTTTTAAGGT TTTGGTTGGCGTGGATGAGAGCATCTCTGCTGAGGCTGCCGTGCGGGTGTGGGCTGGGTGCATCTGTGTCTCTGGGC ACCATATACCAAGTGGCACTCATCCCTGTGAGAACATGGCCTGGGCATTAGAGGATAGGATCCTTAGTGTGAGGGAG GCCTCAACCATAAAGGGACTGAGGGGAGAGACAGGAAGGGTCCAGGTATAAGAAGAGCTGCCCACGGCAGGGGGTGT GGCAGTGGGACCAGGATGAATGGGTCTCAGTAATGTGGCTCCTTCCCCAAGCTGGGGAGCAAGGGAGGCTTCTGCTG TTGGGTGTTGAAGAGGAATCTTTGGTTTGCAGATGGGGGTGGGGTGGGTCTTTGCCCATCCTCTGATCGTATGTGTA GAAGTTTGCAACATGAAGGGCAGACTGTGGTGGAGTTCTTTGGCAGTTAGGAAAGCAAGCCAGGGCACAGACGTGTT CTCTGAAAGGCAGGGTGTGGGCACCACAGGGTCAGCCCTGCAAACAAGAGCACTGAGCAGAGGGAGCGGCGATTGGA TTGGAGAACGGAGGCTCCCACCTGGCTCACATACTCCTACATACATGCCACACGCATGCCACGGTGCTTAGGAATCT TGAAAGCTGCAGGCTCAGGGGAGCTGCGATGCTCATCGTGAAGATGCAGAGCCGGAGAGGCCGCCCAGGCAGGAAGG CCAGTGCTGGTCGCCTCCAGGTGGTCTCAGGATCCCAGAGCAGGAGGCAGCCATGTGGTGCTGAAGGGGAAGCGAGG GCATAGAAGCTGTGCCCTGGAGCTGGAATGGTAGACAGGGCTTTCTTAGTGCCAGGGCCTGCAAATTCCCAACAAGG GCTCACTGGAATCCTCCTCCCGCCATCCTCCCAGGCCCCCCATTGGCCGGCCAGGCCCCTGGATTACCTCTCTGGTG CCCTGTCCTCCTCCATGCTCTCCTCTAAGGGCCCTCACTGGCACCTTTGCCCTCCTTAACCAGGTAACACTAAACCA GGAGACATCTAGAATCCTGTTTGAGACATCTTCGAGAGTCACCTTGTTAACTAGACAGAAGTGGATCTCTACAGGTT AGAGCCTGGGGAACCTCTGTTTTCTTTGTGATATTCTCTAGTGAGTGTTCCAGGAAAGAACATGCCCCACTGTCTCC TTTCTACTTGCAGATAGCGGTGAGGTGGGAGAGGGGCCTGGGAGTGTGCTCTTCATTCTCCACCTCCTCCCCCGAGG AGGTGGTCATGGTCACTCGCTTGACGAGCCCAGACTCTGAGCTTCTGCCCCTTTATTGAGCAAATTCATAAAGTCAA CCATGCTCTTTTATTATGTAACTTGTTTTTTAGATTCAGGGGTACATGTGCATGTTTGTTGTATAGGTAACTTGCCT ATCACAGGGGTTTTGTGTGTGGATTATTTCTTCATCCACATGATAAGCACATGATAAGCATAGTACCCAATAGGTAG GTCTTCAATCCTCACCCTCCTCCCACCCTCAAGTAGGCACCGTTGTCTGCTGTTCCCTTCTTTGTGGCCATGTGTAC TCAGTGGTTAGCACCCACCTCTAAGTGAGAACACATCCATGTTGCTGCAAAGGACAACATGGATGCAAATGATCTCA TTCTTTTATTATGGCTGCATAGTATTCTGTGGTGTATATTTACCACATGTTCTTTATCCAGTCTCCTATTGATGGGC CTTTAGGTTTAGTCCATGTCTTTACTATTATGAATAGTGCTGCAGTGAATATACGCGTGCATGTATCTTTATGGTAG AACCGTTTATATTCCTTTGGGTGTGTGCCCAATAATAGGATTGTGGATTGAACAGTAATTGTGTTTTAAGTTCTTTG AGAAGTCACCAAACTGCTTTCCACAGTGGCTGAACTAATTTACATTCCCACCAAGAGCGTATAAGCATTCCGTTTTC TCTACAGCCTCACCGGCATCTGTTATTTTTTGACTTTTTAATAAAAACCATTCTGACTAGTGTGAGATGGTGTCTCA CTGTGGTTTTGATTTGCATTTCTCTAATGATTAGTGATGTTGAGCATTTTTTTCATATGCTTGTTGGCCATATGTAT GTCTTCTTTTGAAAAGTGTTTGTTCATGTCCTTTGCCCACTTTTTTTTTACAGAGTTGATTGTTTTTTGCTTGTTAA TTTGTTTAAGTTCTTTATGGTTTCTGGGTATTAGACCTTTGGGGGATGCATAGTCTGCAAAGTGTGCTTCTTATGCA AGCACCCAGCCTTCCGGCACTGGGACGGGCCACATGGGAGGAGCCAAAGGATGGGAGAGTTTACCCCCTCCAGCCCA TGAACTTGCTGTGAGGACCCCTCCTGCCATATACCCTCCTGGGTGTGAAGAGGCCTCCTGTGTGGGCTGCACCACTG TCTCCGGGATTCTTGGCCTGGAGGCATCTCTGAAATTTCTCAGAATGCCCAATTTGCACCAGAGATAGAGCCAGGCC CCTTGGGATGGAAAAGGAAAAGAAACTAGATTTACTTTTTAAAGTTTCTAGAACTTCTTTGGTATCCCTAGAAAACT TTTTTTAAAAAGGATTTTCTTTTTAAGTTGGATTTCTATCCATTATTTACCTGAGACATAATTTCAGCTGATCAAAG TTTAGAGTGCTGGCAAGTGCCAAGCCTTACGATAGATGTTGTACCTTTTGACAAATGACCATGTATGCACAGCTCTG TTTCTGGACTCTGTTCTATCCATTTTTCTGCTTGTCCTCATGCCAACATGGCCCCGACTTCATTGCTGTGGCTCTGT AGTAAGTCTTGGTGTCTTGTAGAAGTTCTCCAAATTTCGTTGTTTTTTCCACAATTGTTTTGGCTCTTCTTAGTCCT TTGCATTTCCATGTAGAATAAGTGGATTAATTAGTATAGAAAAACCTGTGATTTTCATTCAACTGCATTCAATCTAT AGATCTATTTGCAGAGATATTTCACAGTTTTGAGTCTTGATCTTTGATTGTGGCGTATAGCTCCATATTTGTTTTCT TTGATACATCTCAACATGGTTTTGTAATTTTTTGGTATACAAATCTTTTAAATATATTCCACATAAATTTATCCATA AGTTTTTCATGTGTTTTTGTTTTGTCCTTTAAAAATGCTATATTTTTAGTTTCAATTCCCAGTATTTCTTTGCTAAT GATGAGAATTACAGGAGCTTTCTGTAAATTTGTCTAGTATGCTGTGAGTTTGCTGAACAAATTTATTCTAGTTCTAG TTGCCCAAGGATTCTTTAGTATCTTCCATGTACGTGAATATCTTGTTTGAGAATGAAGACAGTTTTGTTTCTTCCTT TATACTATGTATGCTGTTAGTTTCTTTTTCTTACTTTATTGTACTGGCTAGGGTCTCCATACTGCATTCAACAGGAG TTGGGGAAGTAAACATCCTCTGTTCCTAATCTTAGGGGTGAAGCACTCAGTATTTTACTGTTAAATATAAATACACA TTCTTGTAAATTCCCATTGAAGTTCTATTCTTGTAGGCTGAGAGTTTTATTACGGAAGGGTGTGTCATTTTGTCAGG TGCCTTTTTGCATCTGTTGTAATGTTTATGTGGTTTCTGTCTTTTATTCTGATCATATGGAGAAATGCAGTAATTGA TTTTCTAATGCTCAACAAACCTTGCTTGTCTTTGATAAGTGCCACTTGCTTTGAGAAATGCATGCATACATCTCTCT GTATATATATGTGTATAATTCCAGCATTATTTCTATATACATAGAAATAATAAATATACAAATAATGCTGGTTATAT TTGCTAATATTTTACGAATTACGGGATACTGGTCTGCAGTTTTCACATTTTGTCTTTTTTAGGCTTTATTATCGGGG TAATGCTGGCTTCATAAAATGAACTGATGTATTCTCTCTTGTACTGCTTTTTAAAATTGTTTAGGATTGGTATTTTT TTTATTTAAGTGTTTAAAAACATCTGGGCCTGGAATTTTCTTTGTGGGAAGGTTATTACTTAATTTAAAAAATATAT GCAATACTATTAAGATTTTGAATTTCTTCATGACTCAGTTTTGGTTATCTGTCTTTCAAAGAGTTTGTTTTATCTAA GTGGTTGAGTTTATTGGCATTAATTGTTCGTAATCTTCTCTTATCCAGTTATCCCTCTCAGGTCTCTAGGGCACGCC ATGATGATGCTATTCCACTGCCCTTTTTTCCATTCCTGGAATGGTACTTCCCACCTTCTAAATCAGTCTTGTTACAG GTTTATTCATTTTCTCAGTTCTGTATTTTATTGATTTTTATTTTTTTGTTATTTTGTGTATTTTACTCTCTTTCTAC TTTCTAAGATAGAAGCAGTGGGTCCCACTGAAGAAAAGCAGATAGCAGGCACTAAATTTCCCTGTAGGGTTAACTAT GTCAGCCTGACAGACCCCAGGCTGTGTGTCTTTGGAGGACAGAGACATTGGAGGCCGTTCATGATCCTTTCTAAGAT TGGTCATTGATAGGAAACTTTGTTTGTTAAGTAATATAAGTATTCAAAACTAGACATTAACTTCTAAGCAGTGCTTA AGCAGCATTCTACATGTTTTGATAGGGATTGTTTTTTAATATCACTCTGTTAAATATTTATGTACTGTAATTATTGT AAATGGTGATTACACTGTTCCATGTGCATTTGCGAGAATATACCCTGCCATTGTGTGCAGTCTTCTATAAATGTACG TTGGGTCAGGTTGTTTTGGCGTGTTGTGCAGGTCTTCCCTATCTTCTGACTTTGTCTCCCTGTTCAATCAGTCGAGA AAGGAGTGTCGAAGTCTGCAACTCGAATTATGGATTTGTCTCTTTTCCCCTTTGGTTCTGTCAACTCTTGCCTTGTG CCTTCTGTACATTTGCTAGTAGGTGCCTAATCACATGAGATCATGACGTCCTCCTGATGTGCTGGCTCCTTAACAGT ATGAAATGTACTCTTTATCTCCAGCCATTTTTCTTACTCTGAAGTTACTTTGATATTAATATTGCTAGCTTTCTTGT GATTTGCCTATGCATGTGTTATACTCTTTTCCATCCTTTTGCTTTTGATCTATTTCTTTATATTTATAGTGTGTTTC TTGGAACCAGGATATAGTGATCCAGTATGCAAGTCTGTACTTTTTATTTGAAATGTTTTAGTTAATGTACTCATCAA TAGGTATGGGTTTAGTCTGCCGTTTTGCTGATTTTTTCATTTGTACTTTTTATTCTTCATTCCTGTTTTCCTAATTC CCTGCCTTCTTTTGGATTGAATCCTTTTTTGATTTCATTTTATAATTACTATTGCGTTATTAGTGCTACCTTTTTTT AAGTAGTTTGTTTAGTACAGTACTTTTTGTTAGAAATTCCAGAAATGATGGAATGCGCTGTATCCACACTGTCCAGT ATGGCAGGCACTGGCCACCTGTAGCTGTTGAGCACTTGACATGTGACTCGGGCAACTGAAGGAACTGGGTATGCAAT TACGTTTAATTTTAAATAATTTAAATATAAATAGCCACTTGGGGATACCTGCTACCACACTGGGCAGGGTGACTGTA GGGTTTCTAATATTATTGTTAACTTCTCATGATCTACATTGAAAATGGTGTTCTGTGACGTCACATGCAATGCAAGA CCTTCACCACAGTGAACTTCCATTTGCCCCTTGAAGTCCCATGTACACGGCCATTGATCTTACTTCTACATGTTATA GACTCTCAAATACATGGTTGTGACTTTTTCCTTTAAACAGTCATTTGTCGAGAAATAATCATTTAGAATTGAAATTG AAAGTGAGAAAGTACTCTTTTCACGTACGCATTTTGATGTTCTAAATATGTTGAAAGGGCGCAGGGGGGTTTAATGC CCTTCATCAGATCTGTGCTACCTTGTGGACAGTAATTGGAAAGGATGGGGAACAGGGACGCACGAGTGGGTAGATGA ATGCGAGGCTGTTGAAATGGTTCCATGGTGAGCAGTGCATGGTTGCTTGGAACAGGAAGGAGCGGAGGTGTTAAGAA GTGGTTGAATTTGGGATCTCTTTGGAAGTATGATGCTCCAGCTGTTATCAGCAGAGCTGTAAGTGAAATGTACTTTG ATTGTTTGTTGAACATCCTTGCCACCTTTCCTATCGAATTTGCTTTTCAAAAATAGTGTGGACATTAAAAAGCCATC CCCATGTGCCTAATTTCAATTAGAAAATGTTGAATCACTGTGAATTTGGTGAGTCATCCTGCATGTAAGTAGAGCTA TCCATCTAACTCTTAGAATTTGTTAACTATTAAGAGAGGAAGACAGAAGGTAATATAGAGATGACTATTTATGAGTC ATTTTATTTATTCATTATCCATCTAAAGAGTAGCAATTGATTGTATCACAGAACGGTGTTTGTTTTACATCTTTTGA TTAGGAGCAGTGGTTTATGGCATAGACTTGCTTAATTTCCTCCTGTTTCTTCCTCTGGAGTGGATAACTGTTTCACA ACAGAAGGCGATAAAAGATTTCTGGTTTATTCATTAATTTTGCTTTGAGACGGAATACCTGATCTCAAGGATAAGAT GCTGATTGGTATGACCTGAATCGAATGATTAGCAGTATGTTGCCCTTACTCTGATCTCCCCACAGTGTGAGAGATTT TCTCATCTTCGCATCAGTTTTTAGCCATGTTTTGGTGTTTAAGCAGAGATACGATTCCACTTTGAAAGCTCTGGAAG TAATTCTCAGATCACATATATTCATCTCAAATTTGAAATCTGGAGTGTTTGTCTTGAAATTAAATTGTGGTATTGTA AGCTGTCAGTGGCATGATCTGTGCTGGAACCTGATGCGGTCTAGTTTACACGGTATTGAATCATGTAAGTATCTCAT CTTTCCTCTTTGAATTCAGTATGACTTCACATAGGTGAGGTTAGCTTTTAAGTGTACACAGAGGTATGGTTAACTAT CAGCAGACTTCAGTTATCAATTGCTGATCTCAGAAAGCTAATTTATCTTTAGTGTCCAATAACATTACATGGCTTTC TTTCTTTGTTTTATGTTTTGTGTATATGTGCTTAACTGTTTAAATAAGTTCTGGATTGCATCCAAATAAGGTTTGAT ATGCTCTCATTAAGAATATGATATTGTGAATAAATGTAATCCTGACTTTCAATAAATGGCCTGTAAAAAAAAAAAGA AAGTATTTAGAGTTAGTGAGTTGAGGGGCTTCGTCACATGGCTAAAGGAGATTTGAGTAGCCCCTGGAATGTTGAGT GACTCTGACTTGTGGAATGCATGGAGCCCCGTTTCGTTGGCTGGCAGGATCTACGTGGGCCGAGCATACAGCCCTAG ATGAATGACTTATGTCTCTGAATTCTGTTCCTAATCTCTGCTGCTCAATCTGTGGCCACCTGCAGAGGAGCCAGCCG GATGGCATCGTCCTTACCGAGCTCTCTGGTTGTCAGATCCTTCACTACTCCTTAGTGGCTGATTACTCTGCGTAGTG TAGGGTGCTGTAGGGTGCATAACTGATTAGTGCCTTGCAGATATAAGCAAAGTTTACAATGAAGCCCTTGCGCTTAG GAGCATACAGTCTAGTTATGAAGAGAAGACACAAAACACCCAGTCACATCACTGTGAACAGACAAGTTTGCCAGGAG TCTGTTCAGACCTGGTGCTCCCTGAGCCGCGCTGAGCAGCAGTTCAGCGGGGATACCAAGTTGGGGAAGATGCCAAG TGGTAGGAAGGAGGCTGGGGCTCTGGTCTGCACATGCCAGCTGATGGAGTTTGGAGTTGGGGGGATATGGCCAGTTC CCAATGCACTGGACCAGCCACCATCCAGAATTAGGAAGTAGATCAGCCCGTGCCTGGCATGCATTGCTTTCTTTTCA GTTTCTAACATATATATAACCTTTTTAAGTATATATATATGTATGTATATATATAACTTTAGTTATAGAGTCTCGCT GTTTTGCCCAGGATGGAGTACAGTGGTGCAATCATAGCTTGCTGTAGCCTCAAGTGATCCCTCCCACCTCAGCCTCC CAAGTAGCTGGGACTACATACGTGCACCACCACGCCTGGCTAATTTTTTTGAAAGGACAAGTCTTGCTATGTTGCCC AGACTAGTCACCAACTCCTGGTCTCAAGCAGTCTTCCTGCCTTGGCCTCCAAAGGAGTTAGGATTACAGGCATAAGC CACTGTGCCCAGCCTAATCTATATAACCTTTCAAACAGGTATCTCCATTTGTATACTAGGGGAGAATGTAGACCCCA CACCCTCTTCCTCAAGAAACAACTTGAACGCATGCCATTCTGCCATCTCAGCCAAGGCGATTGCCTGTGCCCTTCCC AAGGGCTTGGAGACACCCTCTCCCTGCTAGCCCCGTGCAGGGGTCTTCCCATGTGTACCCTGCAGCACCGTCCACCT GTCTGAGTTCGATGGGGCCTCCAGGCCCCCTGCCTTGGTGAGGCAACACGCTCAGCGCCTGCGCGAATCTTCTTGCC CATCAGTTCCTTTTCCTTTTATCCAGGATTTCACACACTGGGACATTTTGTGCCAACAATTATTAATCAGTTTTAAG ATTGACTGGGTTTGTGGACTGTGCCCAGGGTTTGTGCACCTCACTCACGGCAGATTTCCTGGCAGCCCTGGGGATGG TCCTGCTCCCCCGGGGACAGTTTCCATCTCATGGTGTAGCTTTGGGAGTGGGGCCCACTGAAGAAAAGCAGATAGCA GGCACTGAAGTTCCTGCAGCCTGTTGGACCCCGGGCCGTGTGTCTTTGGAGGACAGAGACATTGGCCTACAGTAAAA TAAAGTCAGATGAGAAAGGGTGGGGAGGCTTTCCTGCTGTAAAGGGATTATGTATTCATACTCGAAATAGGGATACA TTAGGGGAATAGATTGTAATCTCTACATCCCCAATCCATGAAAACAAAACAGAAATGGAGGGCCAAGAAACCTACAC AGGGAAGACACGAAATAGCAAACATACCTGATTTATCCAAGGGAAGGCAGAGGAGGGAAACGAAAGGATGAATAACA GGTGAGGCAAGCAGGACATAACTCGTAGGATGGTCAGCATGCCCAGTGCGGCGGCGAGGACTTCGGAAGTCAGTGGA CCCAGTGGAGACTCAGATGAAAATCAGAGATGGTCTCACTGTGGGAACATGGTGTGCAACCATAGACTAAGGCGGCA CACCTTAAACATAGCCTAAGAGATGCACCGTGCAGGGCAGGCACCCACATGAAGCGGCTATGTAAACGTGACAAAGT AGATATTAAGAAAAGTAGGAAGGAACAGTAAAAATAAGATCAGATATCAGCAAAGCAGAAAATGGTATTACAGAGAT GTTAACAAAGGCAGAAATTATGTCCTTGGAAAGAGTCGTAAAAATTTTCAAAATTCCCAGCCAAACCTGATGAAGAA AAATGAAATGACAAATAATATAAATGAAAAGGAAAGATCACTACAGAATCTACAAATATTCAAAGATAATGAGGATG TTATTTAAAACTTTATGTTGACAAATTTGACAGTTTAGATACAATGAGCTAAGTTTTTGTCAGAGCTTAACAATTTA ATCTAAAGAAATCAAAAATTGAAAATTAAAAATCTTCCCTCAAAGAAAAATCTAGGCCCATACAGCTTCACTGTTCA GTTTTATCAAATAGTTAAGGAAGAAGTAATTCCAATCTTATATTAGCCCTTTCAAGGAATAGCAGAAGAGAGAATAA TTCCTAGCTTGTTTCATAAGACCAACACAACCATGACACCAAGATGCCAAGATGTGTCAAGGATGTTTGAGAAATGG TAACCACAGACCAATGTCTCTCATGAACCCAAATTTTAAAATCCTAATAAAATATTAGAATGTCAATTTTACAATAT AGAAAAATATGTATATTTCCAGTGGGGTTTATTCCATTCAAAAATCAATCGGTGTAATTCTCCACATTCACAGAGGA AAAGAAAAGAACTTTATGATGATAATGATCATAGTAACCAAAAAAAGCATTTGACAAATTTCAACATCCATTCACGA TGAAAATGCACTGCAAAGTAAGAATATAAAGGAAATTCTCTTACATGACAGCGTGTATACGAGTGTGCACACGTGTG TGTGCGTGTGTGTGCATGCATGTATGTGTGTGTACACGTGTGCACCTGTGGTTTTCTCTCCATGTTTCTTCCAGTAC TGATCAGGGTTGCTTGTTTTCAGGAGTTTTCAAGTGCTCTACCTTCAAGTTTTCCCCAGCTAAATCTTTCCCATTTC TTTCTCTAAATCCCTTTTTGATATTTGCAGTTCTTTTCAACTTACCACCAATATTTTAGTCTTGATTAGAATCTTCC CAGAAAAGACAAGTTTTCCTTCTGATTCCCACATGTCCCTTCAGCTCGTGATGGCGCAGAATATGTTTGCTTGCCAG TTAGGGGAACCTGAGGCTGCCTTCCTGGGCAGAGTGGCGATTTGTACTGGGCCAACGGGGCAGCCACTGTTACTTAT GGACAGGTGGACTAGGCTCTTTTTCATCCTGAGGAACTGCTCCGCGCTTGGGAAGAGCCACTGGAGTTTATCAGCCT GCGTGTAAGCATGTGGGAAGGGGGATCAGGAACATTTAGTAGAATAGTCCGTGCTCCAGGTGATCAGTCCCCACCCA CCCGCATGCCTCTCCTTCTCCATCCCACCCGCATTTTGGGTCATTGGGGGATTAATTTATTCGTGTCTCGTAAGCAC TGGCAGAACACCACCCGTGTGAACAGCATTGGTGAAGCCTGGGGAGTTCTTTTTGAGACTTCCTTGAGCTTCCGGCA GCACGTGTGAGTTTCGGGGGTGATTGGAATGTTTCTCCCTGGAGGGAGGCCTGATGCCCTGGAGCTGGCTCCAGCCC GAGCCCCGCGGCATGTTCTGCCTGCTGCCGCCTACCTGCAGGGAGACGCCTGAGCTGGGAAGGTTCTGAGGGTTGGC AGGGTGCTCTGCTGTGCTCTTTGGGAGGATCCCCTTGGCTGTTCTGCATGCCCAGGGCCGTGCTCTCCGTGGAAATC TATGTTGGAGACGACAGGCTCCGGTTCCAGCTACACCAGCCTGACTTCCACTGGACAGTGCCATTTTCTGCCTCTGA TAACACCGTGGTGAAGCGCCTTACGTAAAGCAACAGATTTTTTGTTTTAAGATGCACTATAATTACTCTTTTCAGAA CCAATAATATTAACCCAGTGAAGTCAAAACTGAATTGTTTTATAAACTGACTATGGAGCTGGTGTAAGGAGATGCAG GGAAGGCTTCTCATCTGAGTCGGTAGCAGAGTACATAGTGCAAGAAGCGTGGGCAGGCTCCCAGCGCACCCAGAGAT CAAGGAGAGTGATGGGTGCTGCCCGCCTCTGAGGGGACGGAGGCAGCTGCCACCCGCCGTGTCCCTCACGCTGGCTT TCAGAAGGCTTCACGCAAGTGGGCTCACAGGCAAGAAGAAAAGCTGTGGGCCGTGTGTCTCCCTTGGCTATGGCTCA GTTTTAATGTAATTAGAAGCTCAACTTGAAAGTGAGATATCAAAGGAAGCCTTCAGTTGCTGAAGATGGGTGTGCTG GGGGATGAGGGCGTGGGTTGAAAAGTATCCAGTTACTGTTTTTCTCACGTGGATCAGTCTAACATATGTGACTCTGG TAATTGAAGATGGTGACAGGCTAAACTAAGCTGGGATTCCCCAGGGAGAGACTAGGATTTCTGGAACCAGTCTAACA AAAACAGAAACTTGAAGGAGAAAACAGAATATGCCTCCCTCTCTTCCCTGCTTCCCTCCTCTACTCAAAAAAAAGAA AGAAAGAAAAAAGCAGCTTTTGCAATGAAGAATTCAGTTTTTCGCCCCCGAGTGTATGATGGTAGTGACTTTGGTGT TCCTGGTGCAGACCTGTATTTTTTTGTGATGTCTTCATCTGGCCCCTCGCCCTCCACTCTTCATGATGAATATGAGA CCTGTGCACTGAGGGTCCTCACCAACACTTCCTTCCTCACAGCCGTATGATTTCATCCGGAAGCGGCCTCTAAAAAT AAACACCCTCATGTTAGCCTTTTTCCACCATGCTTCATATTTGGCTCTTGTATAAATATCTGCCACGTTTCCACTGG GAATTATTGCTGTTATATATTTTATAGACACTCGACTGTCATCTAAGTGGCTTATTTTATTCCCATAGCTAGAAGAA AAATACAAAAATAATTTTGTAATGTGAGTGTGATTGTGGGCCAGGAGTTATGTTCTGAGAAGGAGCTGAGAGTAAAT TATATTCCTGCTTTATTGTGTTGATATTGTCTTCCCTGTTGTGTCCTGAGTTAGCCTTTGTTGTTCCAAGTTATTAA CCAGAGGTGGCTTGATAATGACGCCACTTTGGAAGCGTCTGGCTGGTGTTTAAAACTCTAGCTGGTGATAAATATAT TTTAGTCCTATTAATGAAGAATTGTAACATTTTAGTCCTATTAATGAAGAATTTTAACATCCATGCAGATGAGCGGC ATCCTAAAAGCAGCTTCAGATGCTTTGGGGTGTTTTCTACCGAAGATGCTTTTGTAGAAATACCGCCTTCCTTTTCA TTTTTTACACTGGTCTGTTCATCAAAAACCATAACTTCATGGAACTTGCTTCTGTGGAATGAACTAAATGTAAATTA TTTTTCCAAAAGCTTTATGAGTTTATCATACATGTTTTGGAAAAAGTGGAAAAACACTAGGAAGAAGTTCCAGTGAG CAAATGTTTCCCGACATGTTTCACGTTTTGCTCTGGTTTGAAGCAGGGCGTTTTGTGGAAGGTAGGGCTGGTGGATC GCTCGGTCGCTGGGCAGTGCTGGTCACTGCCTTTCTTTGGTTGAGCTGGTCTTGAGTCCTGGTACCTGTGTCTGCCC TGGCATTGACCCCGTGGTGCTTTCTGTGCATCTCCGTGCTCACCTTTCTGGAACACAGCCCCTGAACAGAATCATTT GGCAAAACATCCCAGTACAAAAACCAGTGGGTTTTACATGGGGAAAGAACTCAATGAGTCCACAGTTCGTGTCGATG AAGGAGGCACTGCGTGTTGGGCTCAAACGCATCTGTAACTGTGGGTGCCAAGAGACAAGTAGAGCTCAGACTGCTGG GAGCGTTGGCTGGAATAAAGCTGGCCCTCACGGGGCTGTTAAAATACTTGAACTTGAATTCAAAGTCAGATTTAAGC TGACTTCACCCCTCTTCCCTTGCTTCTGAAGATTCTGGTTTTTCACGAGACAGAAAAAAGGGTGGAACCAGGAGCTT ATCCCCTTCCTTCCTTCCTTGCAAGCAGCAGCAACAGCCATTGAAACTCAAAGACAGCAAGAGCTCTCTTCCCGCCC ACTCCCAGCGCCACTCCCGGGGGAACCCATGTGGGAAGGGCTCTTCCTGACACCTCTCCTGCAGCACACAGCACACG TCAGCCTTGCCCTGCATGCAGCCTTCCCAGCTGGAGCAGGTCCCACCAGCGCCCTGCCAGGCGGCAATGGTCTACAC CGCCATTTTACCTTCCCCAGGTCTGTGGCATTAGGTCTTCCCTTGTGAGTGGCTCGTATTCTTTTCAAGATACTGTA AATAATTTGGCATCATATGGACCACTTGATGCTTCTATATGAAACATGCCTTATAAACCCTTAGTACTGCATGATTT CAGATTACGGAAATATCTGCATGAGTATTGGCTGCGATATCTCTGTACTAGAAATTTCAGTGCTACCTCTACACAAA CAGACACACTGGGGATGTGCTGTGTGTATTGTATGAGTGTATCATAGAATATTTCATTGTCCGTGGTAGTACATTTC ACATCATAGGCTGTCTGTGGCTACTTTTAAACCTTAGACATTTGAATTTTCCCTCAAGCTTTATTCTGGTGAAGCGT GGGATGGGGTCTTAGCTCACTTTGGAAGGATGGAACAGTTAAGCAGCGTACCTGGTGACTGGCACTGTGTGTGAGTG ATGCCACCTCGGCACCTTCGCGTTGATCATCTTTAGGATCTTTAGGATCACTGAGAATTAATCATTCTTTGCATGCA TAAACCTGTGTAAGGGTTGCTCCACGTTTCTGCCATTGCTCACAGATAAAACACATTCATGATCTCAGCTTAATCCC AAGAGGATGTTTCCCCATCCATCAAAACCACAGTGCAGGTTTTCACTGATGGGACATAGGGAAGGTATGGCAAGCTG GGTGGAGGTGTGTTTCCTGGACTTTTCCGGAATAACCCAACCCATCCCTCCTAGTGAGCACAGAATTACCCAGAAAG TTGAAAAGGAAAACACAGTTTATTGGAACAAATATGCAAAGTGATTTGTTCTTTTCACAGAGAAGGTAAATAGCATG TCAGCCGCCAAGGCCCTCACACACACGGATCTGCCCGTGGAGTGATGAACTTGTAAAAGAACGTCAGGTGGAAGCGG TGAGAGGGCCTGGACAGTTGTTCTGCAGCTGTGTTCTTTGTCTGGTTAATCGCGTGCGTCTCCAGTCTGTGGCTGGC CAGCCGCGTCCACCTGCGTGCTCCGGGCACCCAAGGTGCTTGGTTAATATGCAGCTCTCTCAACATCTCCCCCTTAG GAGCAACAGGTACCCGGTGCTGGTGTTGTCCGTCCAGATGAAAGGGCCTGGCCACTCTGATTGCACTTCTCTTTGAT CTCCCTGTAGAAGGTCGGCTTGTCTGCCTAGAGATTCCTCTGAAGGGCAATTTAAAAGTTGGATTTGAGCAACATCA AGTGAAATGTCTTCCCATCTCACGCCGTGAGGAGCTCTTTGGTGTGGCTCATGGCTGGATGTGAGGAAAGATATTAA CCCTTCCTTTGAAACAAACTGTCTCACAGGCTGAACTTGCCAGCTACCTTTCTCCTCTGCTTTTAGAAAAGAAAATA TTTTCTTTCTCATAATGCTCTTGGCCCTTGAAGATAAACTCATTGCAGTGTTTAAAATTTGTCCTGAGACCCTATTG CCTTTACTTTGTTAGTGTGTGTGAGACTGAAGGCCTGTGGATGGGTGAGATGCTTCGAACTGATAGAAAAAGAAAAC AGAAGGAAGATTTTTGTGGGCAGAGCCGAGACGCCGTCTCTCAAGGTGTTGTGATCAGTAAAAGAATCCATTTTTAA TGGTGAACTGGCAAAGGCTGCTAAATACCAATTACTGAGTAAAGTGCCATGAGAAGGTAAAGCCACTTTTTGTGAAT TATTTCATTGCACTAACGTGCTCCTACTGAAAAACATGGCCAGGCTGCTTCCGATACAGTTCACTTAAAGAAAAATG GCTCACGTTAAAAATAGTTGCTTTATTTTGTAAATGTTTTAGAAAAGTGCATTGCTGTCCAGAAATCTAGATGTACA CTTGTTTTGTGTTTAATGAAAAAGGGAAGGAAAAATATCTCGAAATCCCAAATCTCATCGGTATCAATAGGATCATA AAAGTAAAGGCAGGAAAAGGAATTTGCTGCTCGTGTTTCCCATCCATGTTTCCAGGTTATGTATTTTGTTTCTCAAC TTTTATTTATGTTAATGAAACCAGTCTGCTTTTTTTTTTTGTTATTTTTGATGACTAAGATCCCATTTATTAGGAAT TTGTAACTCAGCTGTGACAACGTAGCCTGAGATTTACACAGTCCCCGTTAAGGGTAGAAAATAGAGGGAGGGCTTAG CTCTCTGTTTTCATAGCTGTGTTAAAGAGCCAAATAGTAATTTGTTGACCGAATGTATTATCTGTCCTGCCATATGT TGTTCAAATGATGAGACAGAAGAATGAAGGACTCTTACAATGTAAACTTCTGGAAATCATACTGTTTCAGGGTTGTT TACATTAATAACAATGATGGCTTACATGTATGTATGGTTTTATAATTTTTTGAGATTATAAAAGGTATACATGGTCA GTGTTGAAAATAAAGTATAAAGAAATTAAAAATTTGGACGGTGTGGTGGCTCACGCCGGTAATCCCAACACTTTGGT AGGCCAAGGTGGGCAGATCGCTTGAGTGCAGGAGTTCAGGACCAGCCTGGGCAACAAGGCAAAACCCCGTCTCCACC AAAAATACAAAAAATTAGCTGGGTGAGATGGTGTGCACCTGTGGTCCCAGCTGCTCAGGAGGCTGAGGTAGGAAAAT CTCTTGAGCCTGGGAGTTGGAGGCTGCAATGAGCTGAGATCACAGCACTGTACCCCAGCCTGGATGACAGAGTGAGA CCCTGTCTCAATTTAATAAATAAATAAAATAAAAAATGTATATTTCTATTGCATAATTAACTATTATTTATGTTTTA TCAGTCCTTCTAATTTCTTTTTTTCTTAGGAGACAGGGGCTCCCTATGTTGCCCAGGTTGGTCTTGAACTCCTGGGC TGTAGCAGTCCTCCCACCTTGGCCTCCTGAAGTGCTGGGATTGCAGGCGTAAGCCACCGCGCCCAGCTTTCTAGTTT GTTTTTATGCCTACAGCGTACAAATGTTACTAAAGTTTGGATTGCGTCACACTGCATGTGTTGTAGTGGGATATGCC TTTTTATGCACCAGCGTATGCATTGTGCCACATCCTTAGACATGACTTTTATTGGATATGCAGTAGCCTGGCTTACG GATGTTTCATAATTTATTTAACACCCTGTGATTGGTTATTTAGCTTACTTTCATTTTTAACTGTACCAAATTGTGCT GTCATGCCATCCTGGAAGTGGATTGCATGTGGGCGCCTTGTACTTGATAGAGCACTTTCTTAAACTGTATCTCAGTC ATTAGCACAAGTGCTCCATGAGGCAGTGAGGCCACTGAGTAGTGATCCGGGTCACAAGGGAAGAACTGGGGCCCAGC GAGACTGAAGCGGGTATTTTCACGTGAGACTTCGCCAGTACGGGGCAAAAGCACACGGTAGAGGATTTTGAAATCAC CCTGATTGAAGACCAAGCTGGTTTTTGTCCCAACAATAGTGATTCCTTCATTTATCCCACAAATATTTAAATGCTGC GTACGTGTCAGGCACTGTCCTTGGTTCTGGTGAATAGAGCAGACCCTGCCTGCTGCTCCGGGGGATGTCGGCCCGAT TCTTTGGTAACTCTGGAAGGCTTGTGCACCTGCTGGAGTTTGGGGGAGAGAGGGAGGGTTGTGGACCCAGTCACATA CCACAGTGGGTTCAAAGTCTCATCTTTATTCTGGGAGTGACTGGGTGTCTTTAAAAGTCAAGTTCGGAAGATTCTCA TTTAATGATATTTGATTCCATGTCTCATGCAGAGGAATACTTAGATACGACGGAATGAGTTAAGTAAAGGGTAAAGT ATTACTTAAATATATCATCTGAAAATAACTGCTTCATATCTCTTGTATCTTAAAATATTTTCTGGACAAAAATTTTA TGTAAATTAAAACAAAATGCTGTTTTTCATCATTGTATTAGGAAAAAATGTAAATACAAAATATTTGGTGTTTTGAA GGATGGGCCGGAAATGGGGATGTTTTTGTATGATGCTGCTGATAACAGTAAGTTGCTATCAGTCTTGTGACCATATA CATACAGACATAAAAATGTTAAAACCCTTCTCAGTACTCCCACTTTGAAAAAGTATACTCTAGAAAAATATCTAAAT TATAGAAAAAACGTTATACCTTGCAGCTTCTCTTATCATGGTGGAAAGGAAACCAACCTAGACGTCCAACACTAGTG AGATCGTTTAGATAATACTGACACATGCTCTCACCAAACCGAGTCAGCATCTAATGCCTATGAGACTGCGTAGTCAG GGATAAATGCTTCCGTTAAGTGAAAAAGCAGAGTGCTAAAGAGCAGGCACATTAGAGTTACAACTGTGCCATGTGAG AAAAAGCTTGAAGTGAATACTCTCAAATGATGATAATGGCTGTTTTAGGGATGAAGATCAAGGAATTTCCTGTTTTT TCTTGTCTGTATTTCAAATTTTTTATAGTATAGTTATATTACTTTTTAAAACTAGCGACTTCATTTTATAAAATGAC TTTTACTTATTTTTAAAATTTAAGCAATACAGGAAAGCAAAAGAAATAACAATTACCTCCCATCTCACAGCCCCCAG ATAAGTAGTGCTGATACTTGGTGAGCCTCCTTGTAAAAGTCACTCTTTGCTTGCATAAACATGTGGTTATATGCATA AAAGACAGTAACATAAACACAGATAAAACGACAAATATTTTCAAATGACAATAGTTTTGTTTAATACAAGGTTCTTA AATATTGTCTGTAAAGAACCAGATAGTAAATATATTAGTCTCTGTCTCAGTTATTCTGCCGTTTTGTGACAGCAATC ATAGACAAAATGTAAATGAATTAATGCAGCCGTGTTCCAATAAAGTTTTATTGCTCTTCATTCTGTTTAGATCCATT TCCACCTGGCATCATTTTCTTCTTCCTGACAGTTTCCTTCACCCTTTCTCATTGCACTGGTCTACTGCAGGTGACTT CTTACAGTTTTTTAGTGCCCAAAATGTCTTTATTGCTTCTTGATTGTTGAAAGGTATTTTCACTGGGTGTAGAATTC TAGATTGACAGGGTTTTTTTCCTCCCAATACTTTACAGATTTTGCTACACTGCCCTCTTGCATGCATTGTTTCCATT AAGAATTCTGCTGTCATCCTCATCTTTTTGTGCCTCTGTGTGACATGATTTTTTCCTCTGGTAGGTTGTAAGGCCCC TTATCAATTTTTTGAACAATTTTATTGTGATGCATCTTGGTGCAGTTCTTCATGTGTCTTTTACTTGGTTTCACTGT CCATCTTGTATCTGTGCATTTGCAGTTTGCATCAAATTGGAAAATATTTTGGCTATTTCTTCAAATATATTTTTTTC CTTTTCCTTTCAGAAACTCCAACTACAGATATGTACGATTTCCTGAAGTTTTTCAAAACCTCACTGATAATCCTTCC TTCCTTTCTTCCTTCCTTTTGATTTCCTTTCTCTGTCCTCATTTTGTGTAGTTTCTATAGGAATATATTCAAGTTCA CTAATTTTTTCTTTTGCAGTGTCTAATCTATTATTTTCATTTGATGTATTTTTCCATTGTAGGTTTTTTTAGTTTTT AATTCTGAAAGTTCTCTTTGGATCTTTTTTTTACTATATTCTATAATTCTAATTAACTTTTTGAATGTCTGGAATAC AGTTACATTAACTTTTTGCATCCTCGTCTGCTAATCTTAACATCTGAGTTAGTTTTAGGTCCATTTCAATTGACTGG TGTATTTCTTCGTAATGGATCATATTTTCCTGCTTCTTTGTGTGCCTGGTAATCTTTGATTGCATGTCCAGTATTGT GAATTTTACCTTGTTGAGTTCTGGTTATTTCTGCATTCTGATAGATTTCCTTGAGCTTTGTTCTGGGATACAGTCAC AGTTAAATTACTTGGGAATAGTTTGACTCTTTTGGGTCTTGCTTTTAAGATTCGTTAGGTAGAACCAGAGCAGTGTA CTGAGGCCAGCCCCCTTTTCAGCTCGCCCCGGATGGTCTGTGAATAGGAGGCATTCCAGTGTGGCTGTCAGGAAAAG TCATGCTCCCAGCCCTGCAAGAGCAGCGGTTACCACCCTGTCATCCTCACAGATAGCTCTTTTCCTGCCTGGGGGAG CTTCCTGACATGGCGGTGCCCATCAGTACTCTGATGAATATGTGAGGGTGACCTGTTGCAGATCTCAGGATTCCTCT TTCTGAGATGTGTCTCTGTCCCTCCAGTTCTGTCCTGCAAACTCTGCCTGTCCTGGTTTCCGGGCTCACAGCTCCAT CCCCTCAGTTTGGGAGCTGGCCAGGCCCTTCCTGTGTGCCCCTCCGGGTGCCCGGAACTCTCAGGGCAGTCGCAGCC TTTTCTTCCTTGGTTTTCTGTCACTCATCTGTCTCTGTACTTTGCTCTCCAGTTTCTTGAAAAGTGTGTTCTATTTA ATTTATTTTTTCTTTTTGGTTCTTTTTGGTGAGAGGGTCAATCTTGTCTCTTACTTATTTTATCTTGCCTGGAAACA GAAGTGCTGGGGTGTTTTTTAAAAAATAATTGTAAGATACATAATTTAAAGCTGTGCTATTATAGTATTTACATGAA GTTTTAAAAAGAAATTTGCTTCCCCTAAACTTTCTGATCATCGATAGCACTTTTTGAGGCAGGGAGCCACTAGTGGT CACCTATGTCTGTTAGCAATAGACAGACATGTCTGTTACTTCCAAAGGACTCTCACAGTGTAAACTGAGGACCCTCT TACAAGCTGGTACGGGAAGACCAGGCCTGCATCTGTCAGAGATGAGAATAAGACAGATTCTCCTAATCAAGCTGCAA GGAGCTCCTGCTGTAATCACTCCAGAATATATATCAAGAGTGGATGTGTGTTCTCTATGGCAAAAAACAGGCACTGG AAAATTTACATATTTTTAGTTTAAAATATGCATGCTCTTGGCCAATATGTTTGAACTGAAAAAAGATAGAATGTGGT TTTCTGAGTTATCTTCTTTTTCTTTTTTCTCAAGTTAGTTAAGATTTATAAGGTGCTTACTCAGAAATTCATGGATG AAGTACAACGTTCACCTTCACAACACTTTGCTCTGGTTACAAATTTTTGTGGTGTAGAAACCCCCAAAGTGCCTCGT ATTTTCTCACCCGAGTCCAGCCGGAGATACTGACCTTGGTCTAGATCGTCACCTCTGAACCATTCCTGAAGAAGTGG GTAGACACCCCCTCAGGACTGCTGTAAGAGTGGAACACATTCACGTATAACCAGCACAGAGGTTAGTATTCAGTAAG CACTCAATAAATGTTGGCTCTGAAGAGATTCTTCTCATTTGCATCATTGAAAAGGGGTCTTTGCAATGATGCTTATA GCCCAGTTTGGGGTGAATCATACCTCTAAGCAACTGTCATTGAAAGAAGGCCTTAATGCTGATAGTCATTGTTTCAG TTTTACTTTTTATTTCTTTGTCTTGGCTCTCTGGCTAGGCCTTTAATACAGTTTTGAATAGAAGTCGTGATAATGGG CATTCTTGTCTTGTTACTAAATTTAGAGGAAAAGCTTTCAGCATTCCACTGTTGATTTCCTGTGAACTCTATAGATT GTTTTGTGGATACCCATTTTCCCCCAGAATGAAAGATCTTTTTGAAATTATATTATTCTTTCTTTAATGAGGCCATT TTCATATTTGCATTTATGAGAAAATGTTTAAAAAAGTATGTGAACATAAATTATATAATCTTTTGAGTCAATCAGAA TTATACAATTGAAAAATAGTCTACAATTAATGATATTCAAGTATCTTTAGATTTTAAACTCATTAAATGAACATTGA AAGTTCTGTTTTCTAATTATAGAGCCGAGTTTAAATTGACAAGAGCAGCCACACTCGAGTTGTCTAAGTCAGAGGCT TTATAAACCTGTTGGATTTTCCAAGGGTTGCTTCTCTTGAATAAAGGTGTTTTTGTTTCTCACATATTTTACATTTT CAATGACCTGTTTAGGCAGAAGCACCTTTTGTCACTAATTAGTGTGGTGTGACAAGTAACATAATGCGTATCTGAAA AGCTCCACTGGGTGTAAGTGGAGTTCACACCTCTTAATGAGTGCCTTCAAGAGTGTTTTTGTCATTCCCAGGGAGAA CTAGTGCCCCTTGAATAGAAAACTGCTGTAAATGGAAAAAGGATGTGTCTTAGGAGCCTGGTGTAAGTGCAGATGGG CCCACCCTGTCCTCTGACTTTAGGGCCTTCCTCAAAGCCAAGGCCCTCTTGTGCGATGGGGCTCTTCTCCTTCTTAG AATTCCTACATCCAGAGTAATGGAGACGACTTGGGATCATGCTTCAGGATATATGTAGGTGCTCAACACAGGCTGGT TTCTGTTTTTAATTTCTGGCAGAATGAACCACTTGAAAATGAATTTTCATTACGATTTTAGGAGGGCTGAGAGTAGA TGAGGTAAGAGATCTGCCTAGGGGGCAGGATCGAAGGAGGCTGTCACTCTCAGATTTGTGCAAGTGACTTGTGTTCC CCAAATTCACATGTTGGAGCCCTAGCCCTCAGTACGTCGGAGCGTGACTGTATTTGGAGATGGGGCCTTTAAGCAGG TACTTAAAGTTAAATTGGGGTTGTTAGAATAGGCCCTAATTCAGCCTGACTAGTGTCCTTATAAGAAGAGGAGATTA GGGCACAGATATACCATAGGCTTCTGTGCACAGAGATGACCATGTGAAGTGGCAGCAAGGGGTGGCCGTCCGCAAGC CAAGAAGAGAGGCGTCAGAGAAAATCAACTCTGCCAACACCTTGAACCTAGACTTGCAGCATCCAGAGCTGTGAGAA AATAAATGTCTGTTCTTTAAACCACCCGGTCTATGGTATTTTGTTATGGCAGCCTGAGCAAATTCATTCAGCAAGTG CCAGCCTTGCACTCGCGGGAGAGTGAGTGCCTCCTGCAGTGCTCAGTCTGGTCTCAGGCTGAAATTCTAGGTAGATG CACATTTTCCCAGTTGGCAGGTGCTGGCTCATGCTGAAGGGGAACATATGCTCAGGATTCCTGCTTTATGTACTTCA AAAGGAGACATGTGACATGTTTCACTTAACTTCATCTAAATTTCCTAGACACACCAATCTGTAACGGTTTAGAACTC AACCCGGTGGTTATACAGCTTTCCTGAAGTGGAGAGGTGGGCTACTTATCTTGTATGAGTCCCATGAGAACTAAAGA ACAATGGTTCAAAAAACAGATGGATGTCTCCCATCTTACATTCCCTCCAGGAAGAAGTAGTTGAAGAAATAATGGAT ATAAATTTCCTTGAATTAAGAACACATGAAAGACTTAAGAATAAGAAGTCCAAGAGAGGACCAAAGAGGCAAAAAAA AAAAAAAAAGAAAAAAAAAAGAAAAATAACTGACGTCTATCTAGAAGAGCACAGTGAAATTTAAGAATAGAGAGAAA AATCTAAAACATTAGCAAGAACAAACAACACATATAAAGAACCAGTGGTCATATTGGCTTCAGATTTGTCAACAGCA ATATTGAATGTAAGAAGAGAATGGAGGCATGTTTTCAGCGTATTAAAGGAAAATAACTTAGAACAGAGTTTTATATG CAGCTAAAACTTTAAAATATGAGGGCTTGGCAAAACTATTCTCACAAGGCCTCAAAAGTTACACCTTAACAATTATA ATAAATGTAAATGAACTAAACTCACCAGTAAGAAAAAGACTGAAAAATGGAATAAAATATAAAATCCAAATATACGC CACTCAAAGGTTATCCAAAGTATAAGGACTTTCAAACTTTGAGGGTAAATGGATGGAAAGAAGCATGTCAGGAAAAT ACCCAAAGAAAACTGGCATAGCTATAATGATATGTAAAATAGATTCTAAGACTAACAGCCTTGTTAGAGATAGAAAA GGTGAATACACAATAACAAAACAAGTAAAATAGATTAACAGAGTAAAACATAAATGACAAAAATAATTTGTATTCTT GAAAATATATAGCCATGGAAGTATACATTTTAAGTTAGAAAATGAACAGAATAAACCTTTTAAAAAGCAGAAGAAAA GATCATTGGAAATTAGTGGAAAAAATACAAAGATCTTAAAAAACCATGAATTGTTTGTTTAAGAGAAAAAAATAGAT TAAAGGTAAGATATCTGAAATGGCTATATTAGCATTAGATGATGTATATTCTACAAAAAAAGTTACTAGGGTTAAAG AGAGATGTTACATAGCGATAAAGTATTCAGTTCACCAAAAAGACCTAACAGTCTTAAATGGCTATGTACCTGACAAC AGAATTCCAAAATACATGAAGCAAAAACGGAAAGGAGAAATAGATAAGTCCACAATTATAAATGGAGATTTCACCAT TTCTTACTGATCAACAGATCCTAAAATCAGTAAGGATATAGACAATTTGAACAGCATTATCTACTAACTTGATGTAA TTAACATTTCTGGAATACACTTAACAAAGGCCAAGATGTGGAAAATCCAGAATATTTGAAAGTTCTTAGTAACCCAT CATTCAAAGAAGTCACAGGGAAACTTAGAAAATGTTTTGAATTAAATGAACATGAAAGCACAACCTATCAAAAGCTG TGGGTTGCGGCTAAAAGTGTGCTTTGAGGGAAATTTATAACATTAAGTTTTTATAATAGCAAAAGGTCTCAAAACAA TGATCTAAGCTGCTGCTTTAAGAAAACAGAAAAGTAAGAGCAAGTCAAACCCAAGACAAACAGAAGGAAGGAGATAA TAAAGATAAAAACAAAGATGAATAAACATGGAAAACAGAAAAACAGTGGAAAATATCAATGAGTCAAAGAACTGGTT CTTTGGAAAAATATTAATTAAACTGATAAATCGGTGGCTAGACTGACCAAAAAAAAAAAAAAAGAGAGTGAAGTCAT ATATTAACAATGTTATGATGAGAGGGGCCATTGCTACAAAACATACTGACACTGAAAAAAAAAGTGCATAGCAGGAC AGTTTCGCTACCCATATGTTTGACTGCTTAGATAAATGAATAACTTTTTTTTTTTTTTTTTGGAGACAGAGTCTAGC TCTTTCTCCCAGCCTGGAGTTCAGAGGCACGATCTTGGCTCACTGCATCCTTCTCCTCCCGGGTTCAAGTGATTCTT CTGCCTCAGCCTCCTGAGTAGCTGGGACTACAGGTGAGCACCACCATGCCCACCTAATTTTTGTATTTTTAGTAGAG ACAGGATTTTACCATATTGGCCAGGCTGGTCTCAAACTCCTGGCCTCATCATCCACCCACCTCGGCCTCCCAAAATG CTGAGATTATAGGCGTGAGCCACTGTGCCCAGCCTGAATAACTTTTTTGAAAGGCACAGACTACCAAGCTCATTCAA GAAGAAATAGTCTTAAATCTATCATAATAATTGAATTTATAATTTAAGCCTTTCCATAATGAAAATTTCAGACGTAG TTGTCTTCATTGGGGAATTCTACAAAACATTTATGGAAGAAATAATGTCTGTTCTAGAAAATTCTTCCAGAAAATAC ACGAGGAAATACTTTCCAACTCTTTTTATGATGGCAGCATTACCTTGATACCACAACCAAATAAAGGGATTAGAAGA AAAATACAGACCAATATTCCTAATGTACATAAAATGCAAAAGTCCTCAGGAATATTACCAACTTGAAACCAGGAAAT ATATAAAGGATGATGGAACATGACCAACTTGAGTTTATCTTATGAATGTAAGACTGTTCAGTATTTCACAATTAATC AGTTTACCATATCAATAGGAAAAATGAAGATAAACCTGTGTTAATCTCGAAGAAATTTCCTGATTTGATAAAAAGGA ATCTATCAAATACTTATTGCTGACATAATTCCTAATGATAAAAGATTGAATGTTTTCCTCCTAAAATCAGAAATAAG ACAAAGATGTCTGTCCACTCTTCCTACAGCTATTCAGTGGAAGGTCCTAGCCAGTCCAGTACATCAAGGGAAAAAAT GATTTTGGAAAAGTAAGAAATAAAACTTTATTTATAGAAGGCATGATTGTCTATACAGAAAATTCCCAAAAACCTAC AAAACTACGCAACATACAAAAACCAATTGCCTTTCTATATACTAGCAATGAATATTGGATACTAAAATTTTAAATAT AGTTCCATTTATAATAGATGAAAATGTGCAGTAGTTCATGTCCAATGATATTTGCAGGATATATATACTGAAAACTA CAAAACCTTAAATAAAATAACATTTAAAGAAATGGAGAGATATACTGTGTTCTTAGATTGGAAGACTCAATATTCTC CCCAAACTGATGGATTTAACATGATTCCAGTCAAAATCACAGCAGGTCTTTTCCTAGAAACTGATAAGCCATTCTGA AATCTATGTGGAAATTTACAGTTGTACAAGTTTTCCAAAATTATTTTTGACAACCCATCACTAGAGAATGTTAAAGT AACTGATCATATAATTCCTTCAAGAATGGTCATTAAATTCTGGATTTCACAGTTTCTTTTAGTTCGTATTTCACAAG ATAGAAGCTTTACATTTTTCAGATTAAGGTAGTTTTCACCTTTGTGCATGCTACATCTTGGGGAAAATACTGAGACA AAATGACTCATTGGAATTATTTTTGATTTTTTGATACTCGGCTGACAATTATAGTCTGTGTTATGACAGTTATAGCC TGTGTCATACGTACTCAGAATTAACTAACATAGTCTTCCTCCTAACTTCCCTGCATATTGGAACATTAGAATTCTTT TGGTTGGTTGAAGAAACATCCTAGAATTTTAAAATATTTTGTATCTAATGTAATGCTGAAAACATGAAATCCACATA ATGTATGCGGCATAGCTAATATTAGAAGCATGTTCAAGGAGCAGCCTCTGGGGTTAATAGAGTTTAATTTGCAAGAC AAATGAAAGCTTATTTTCTCCTAGGCTCTCTGCTCATAATTCTAGTAGGGCCACTTTTGAAGAATAGTACCTTCAAC AGACACAGAGAACCCTTGTTGGACAGCAACAGAACTTGCTCACAGTGAGACCCGACATCCCCTCCGCTCAGTGGGCA TTTCCTACAGTGCAGAGTTGTGCGTTGAAAAGTGCCTCTTCACTCCCTACATGAGGTTCCTCACACAACCCCGCACC TGGGCGGGGGGCGGGCGTAGGGGGCATAAATGGCTTATCCCTATGAACTTCATCATTATGAAATGTAAAAATGGAC AGTCCCATTGCCCCAGAAACAGTGGGGGAGCTTCTAAGTAAATCCAGGTTTATCTGCATTTGGGAATATTCTGCATT TTTTGAAAATGATGTTCCCAGGAATCTTTATAACCAAGGAGAATCCTTACTGTAAACATTCCACCTGAATTTTTCCA AAAAAAAAATAGATCATTAAGAACAATAGACAAAGGAATATGCTTTTAAAAATAGTGATTATCTCTGAAGGTGGGAT TGTGGCTAATTTTTAACTACCCTGGTGTGACCTTATGTGACCCTGTGTGAGTCAACATGTCTGGCCTCAGGGGTGTG TGTGGAGGGGGCACCCTTTGCCATTGCATTACACAAGTCTTTGAACTGACTGTCCTTCTTACTAAATGCTATTAGCA TCTCTTAGTCACTGTGGCAGCCAAAAATGCTTCCACGTTTTCTAAGCATTCCACAGGTGTATGTTCCTGGCCTGATT CAGGATAGACCAGTAACTCCTGAAAGTAATCAAAGGGGCCGGGTATTGTGGCTCACGTCTGTAGTCACAGCTACTTG GGAGGCTGAGGCGGGAAGACCACCTGAGCCCCGAAGTTCAAGACTGCAGTGAGCCGCGATCCCACCAAGGCATTCCA GCCTGGGCTGCAGAATAAGAACCTGTCTCTTAAGAAAAAAAAAAGAAAAAAAGGTAATAAAAGAGCACCAGGAAGCA TAGGTGATGCACCTCCCATGTAGAGAAGGCTGGGCGAGCGAATGTGTAGTGGTTTCTGCGGCTCCATTGTTAGTGAT GACTTACGGATGGAAAAGGGAGTTTTGTAGCTGAGTGAAAACTGTTAGAAAACCAAATGCCGCTGTCATGTTTTTGT CTCGTGCGCTTCCCCTTCACCTTCATCCTTGGGCCCATGCTGTGGCCAACTGAGGAGTACCCTGAGGTTAAGCGTCC CCCATGGCAGGTGAGGCTGTGGGGTGGGAGGAGGGCTGGGAGATAGCAGATTAGAGATCTACAAGAGAATAGAAAGT TTGATTCAAGGAGAAAAACTGGAGTAAGCAGTTTGGAGAAGTCAGATGTTTAAAACATGAAAAGAAATGTAACTTTG AGTTGCAGTGGTTTTGAGTTTCCTGATCTTGATGTGCCAGTAACTCCCTGGGGGCTGACAAATCCAGGGGGAAGGTT CAAAGGCAGAGAGCCTGTTTGAGCTGGGCCAGGGCACAGAGGCTTGCTCAGAAGACGTGGACGGCAGCAGAGCCTGG GCTTGAGAGTCGAGCTCCACCTTCTTCAGGCTCTTTCCAGCGGGGGGGGACAAGGACCCACACATGCTAAGCGAGCA GGGACCCTCAAGCCTGTGACTGTTCGTGCCAGTGAAAAGGGCACCAGTGCACTGATTTCTTCCGTTCACCCAGAAAC AACGATTTCTTCAATGTTCACAGTAGTCTGTTAACCACCTCTTCGTGGTGCATCTTTGAGCCTGTGTTTACAGCAGT CCTCTCTTTGGTCTTAACAACCCAACGTGAATTTTGTGGCATGCTACAAATTGAGGCATCAAAGCTATGCTTTTTAC ATTGACTTTTGAGAAATTCGACAGAGTTCTGAAACCCAAATCTTGACCTTTCATGGATATGATGGTAACCTGGCTTG AGGTTTTTTTTCATCTCTTTCCCAAACTACCTGTTCTTTCCATCGGCATTTTAAGTAGCTTGAGCACTTGGTTTCAC TCTTCAATACTTTGATGATGCGAATATCTGCAGATGCCTACTGTATGCCCAGCCCAGCCTCTCTACAGAGAGACCTT CCCAGCCAGCCCCGGTCTAACCCATCATGCTGTTGAGTGTTCTTCCTAGCAGACATCATTATATTACTCATGCATTC ATTTTAGGGGGTTATGGTCTATTCCATTGCTCCCCTCTCCCAGAGCAGTGCTTTAGGGGAGCCAGGTCTGTCTTACT CCCGGTACACCCAGCACCTGTAACTCTCTAGCAAATCCTAGATGCTTGGTGAGTGAGTGAGTACATTGAAGTACATT GAGTACAGTGAGGCCACACAATTTAAAAAGTGACAATGGCAGTACACTGCGGCATGTGCTGGAAAATGAAGTCCAGG GTGCTGGGTGGCCTCATGGCAGGGAGGCTCCCCTAGGCTGGCGTCGGGGCCAGGCAGCCTGAGGATGTGAAATTCAA GAGGACACAGCAAGAGGCTGGAAGGAAACTAGTTGGGGACAGGGGTGAGAGGACTCGATTGAAGGGGTCCCACTGCA AAGGGCCCCATGAGCCCATCCAGAGTGCTTGGGTTCCCCCCCTGAGGCCTGGTGAGAGCCCGTGGAAGGGCCGAGCC TGGGGAGCTCACACCGAGGCCTCAATTCCTGCTTCCCTTTCAGACACGCATTCATCCTTAACTCTTTATCAGAAGGG AAATAAAACCTCCCAGATAGCTTGGTTGTGAGGATTAAATTAGGAAAAAAAATAAAGCTATAGCTGTTATTGGCCTT GCCCGGTGCTCCTGGACCGTGGTTAGTGGATGGAGCCTTTCCTCATCCTCCAGCTTCTTGCCTGTGTTTGTAGGGCT CACGACAGCTTGTAATTATTTCATTTGTGTGGGTCTTACTTTTTGCACATCTCTTCACTGCGTGGCAGGTCCTGTGG AGGCAGAGCTTGGGTCTGTTTTGTCCACTTTGTTCCCAGTCCAGGCAGAAGGATGGGCAGGGAGTGGACGTCCAGAT AATGAACCTGAAGTGAGTGAATGAATGCACTAAGCTCAAGTCAGGGTTTTCTTTACATAGAAATTCTCCCACGCTCC TTTTTGCTTTTAGTCTTGAGGATCAACAGTGTTCATGTACTAAATCAAGCCTGAAAGCCCTTTTTTTTTTTTTTTTT TTGAGATGGAGTCTTGCTCTGTCACCCATGCTGGAGTGCAGTAGCATGATCTTGGCTCACTGCAACCTCCGCCTCCT GGGTTCAAGCGATTCTGCTGCCTCAGCCTCCTGAGCAGCTGGGTTTATAGGCGCCCACCACCATGCCTAGCTGATTT TTGTATTTTTTTGGTAGAGATGAGGTTTTACCATGTTAATCAGGCTGGTCTCGAACTCCTGACCTCAGGTGATCCAC CCACCTCAGCCTCCCAAAGTGCTGGGATTACAGGCATGAACCACTGTACCTGGCCAAAAGCCCACGTTTGGCAGGGT GGCTGGCAGCCTTGGGGCCTCATCCACGGTGAGGTTGTGTTTGGCCTCTCTTTGCAGGTTGATGGCTGGAAGGGGGA AGGGTTCTGTGGTCAGGCCTGTGCTTCATGGAGATGTCTGACCGTTGGGACTGTACCTTTCATCCTTTGGATGAGAT GCTCTGCCTTGAGGCAGAAGCATGGAAAGCCGGTGGATTTGTGCGTGTCGGTGGTTTTCCACTGGGTCTCCAATCCG GACTCAGCATTGTGGGACCACCAGTGGCTCCCCCTGCCACTTCTTGTGGACACGTTCTTTCTCCTTAGAGCATCTGT TCCAGGCCAGCGGCGGTGTTACTTTCCAGCCTGGGGATGACTTTATGGCGTGATGTCTAATCTCCAGTGGGCAAGTG GTGAAGGTACTCTAGCATCCATCCAGTGGCCAGTCGGCCGAGGGCCTGTCTGCTCATGGGGAAGTGTCCTCTGATGG CAGCCCAGTGTCTTGCTAACCAGCAGACCACTGCAGAAGGCAACGCTGGCCTCCTAGAGGTGTGGCTTGTTTGCATC TCTATGTTTGTGACCAAGTCGTTTCCTTCCTTGGTCTCAGAATCTGCTTGGCACTTACTAATAGCATTTGTTCAACA TGCATGATCCCGGTATGTGAAGTACAGATATGACATTTATAAGCCAGACACTGCGTTTGACTAATGTTGGCAAAGTC ACACTAAGAGCCTCCCAGTGTTCAGATGGCGGAAGGGAAGGCAGATAGGAGTCCAGTCCCCAGGACTCTGAGGCCCC ACCTTGTGCCTTGGTAGAAGTGAAGACAGATCGCCTGGGGAAGTTGGAAGAAGTAGCCGAGACATTTCTCCTGGCTC AGAGCAGAGGGGGATTTACGTTGGCCTATGAAGGAAGAGTAAGTATGTAGAACCTTCACTTGTAGAGAGCTGAGACT TTACTGTCACCCTTGTTTTAGGGAGCCTACATGGCACCTAAGACTCAAATTTACATTTTTAACTAACTGAAGCCAAA TAAAAGACCTTTTATCCCAACTGGGTACACTCTAAAGTCTCGACATGATTATGCCTGTGATCCTGCACAAATCGTCT CAAAGATCTTGGAAAATTGGTTAGTGTCGGGGCACGGTGGCAGTTAGTACTGGGGCATTGGAAGCACCAGAGCTTAC CTTAGCTAGACGTTTCCATCCCGTGGCAGCTTAACACGTGGCATCCTCACTGGTCTTACAGCATTATGGGGAATGCA AAATAAGGACTTGTCTCCTTCCAGAAGCCTGCTGCCCATCAGAAATATATATATATATATATATATATATATATATA TATTTTCAGGGAATGGTAGAGAACAGTGGAGAAGTAGATGCTTGTCAGGCGTCTTGTCTGCTGGGCCAAGGTGAATC AGGAGGTGAGAGCGGCGGCTTTCCTCTTGTTTGGGCAGCGGGTGAAGGACAGGCGTGGCAGGCTGTATGGTGAGTGT GGGCATGGCCGCCCCTCCGTCCTCTTTCCCCTCTGGCCCGTCTCGCATCTGAACACCTGGGAGTCTGTGATTAGACC TGAGAAGAGGAAATGAGGGGCAGTTCCCTTCCATTTTCCTCCCAGCCGCTCAGTCCAGGTGTGTGTCAGTTTGCACG CCTCCCTCTGGAAGTCCGTGTCTCTGCGAGGCTCCTCAGCCCCGGTAGCCCCCACGCCAAGTCCCATTTACTCAGGG TTTCTGCTGGTGACGGCTCTAATAGGCACTTCACCTGCTCTGCGGAGGCGCCTGCGGAATGGTGGTCGCTCTCATTA GCTCTGCTCACCCGCCCAGCGTTACAGGCAGCTGGGGAGGGATTCAGGGGCTGCTGTGTTCAGCAGTAATCAGAGCC CTTCTGTGCACATTCGACGCTCAAGTGTGTAGTTTACCACGGGAGATCAAGAAATACGTTAAATGCATAAAATTAAA GGCAGCGGCCTGCAGGATCCCCAGGTGGCGTGTGCTGGGAATTGGATGCACTTGGCTGTGTGTGTCACTTAGGAAAT GCGCTAGGGGGTCAGCAGCTTTCCCATCGAAGCGTTGGTTAGTTTGTGAAAAGTAAAATTCCAAATATTTGAAATAA TAAGGGGCCAGATACGTTTGGAGCTTGAGAAGAACTATTTCACCAGCCAAGAGATCCTAAACATTTTTTGGCTTAAT AGAAAATAATAGCCTATTTTGAACAATAATCTTTGTAAATCCAAGAAGAAAAAACAGTTCATCTCCCTTTATAGGGT CTGATTTGTGTCTGTTCAATTTAAATAGCGGCAACAGAAATACAAGTGTCTTTGGGTGATTTTGTTCTGCTCTTACC AACAGATGACAATCACGTCTTATGGTTTTTGATTTGACAGAACGGTTCATTTCATCAGCTTTCTAGCAGCCCATTTG ATTCAATTTCCCTCTGCAGTGTTTTACTGAAAATGACAAAAATGTTCTTTTACATAAAGCCTGCGAGTCTGTGAAGG AACATAAATGTGCTGTGCTGTTTACATACTAACTTAATTGTAATTTAAATGCCCTTTTCATTCCATAAATATAGCCA TAGGCTTTTCATTTCCTTCAAGCCTTCAGCTCACAGAGCAGTTTATATGTAAACTGGAGTCAGTTGCTTCATAAAGT GAATTTCTGGAGGAAATAATATAGTATATATCAAAATCTAGATAGGTAATGGGAAATTGATTGTGACAATACAATAT TAGAAACACATCTCCATAATATTTTATTTATTACACTTTCCACCTTTTGCTGTCAAGGGAAAATATTTCATCTTGCA CCGCGAACTCCAGTCTGTAGAGATTTTGACCTCAATATTCTCACACAAATGAATATAGTGTGTAAGGTAGCACAATT TTCCCTGTGTAAAATCATGCATAAAAAACAATTCATTTAAAGCATCTAAATGTTTCCAAATTACTGCAGGTAATTTT TACAGCTTAATTCCTCCGAGACACCATTTTAAATGAACCCATAATTCAATTTTCAGACTTTGCATTTCAAATTTTTA TGTTGAAAGTAATTTCCTTTCTTGCTTAAGTTGTGCTCAGAACCAGATTCATAAAATGTGTATGATGTATGTCTGTA GAATCAGTGACTGTTAGAAGCTTAATAACAAATATGCAAGGAAGAAATTAAATGATTTTTCTCTTCAGTAGTTCAGT TTAACATTGATTTCTAAAAGAAATGATTCTGACTTTGCCGCTAAGTTTCTTTCTTTCACTTTTTTTCTTTTCTTTTT TCTTCTTGCAGTGTTCCAGGGGATAAAACTGTCCTTGTATCTGTATTTTGAATGATTTGGAATCTTTTATCTTTGCA TATTCCTTTAGACCAGAAAAGAAGTTGAATAATGTTCAGACTGGCTCCCATGTTAAGGTAGCACTTAGAGATTCTCT GAATATCATCCCTGAAGCTATGGCTTCCTAAAGACTTTTGACCTCTTAAATTAGTGAAGAGTGGACACCACCGCTTA AGCCCTGCTAAGACCAGTTAAAAGCATCTGTGGTCTGGGCGGAGGGAGCTTTGAGTACAATGGAAAATGGCACCACC GTGTTCATGCTTGCGAGCTTTCCATCCTGATGGCTCTCCTCTGCCTTTTCCTGTGGCTGTGGGATTTTTCAAAACCC TTTTCCATGTCTGCCCTTCAATAGAACACTCCAAGTATCCAGTTTTATTAATGTCCAGAAGCGTAAATCACAGCCCC CTGTTTTGTCATTCCAGTCATTTTAGTCACTAAAGGATTACTTCAAGTGACTGAACTCGGCTGTTATCTGTTTGAGT TTTTGCAGCCAGGTCATCTCAGGGGACTGGGAACAAGCTTTCTGCCCCCTTAACTATGTCGAGTGGATGGCTTTAGC TGGACCACTTTTTGTGATTGATGTACATTCTGTGTCGCTGTATCTTCCCGCGACGTGGTAATGCAAACTTAGAAAAA AAAATAAGATGGAAATGGTGCTGCAAGTTTTTAAAATCAAGGGTTGGGCAGTGCAGGGGGAGCTATTGTTTAAAAAA TAAAAGTTGGGAGGAAGATATAATGGATTTTGTCAGTGGTATTAGGGCGATGAGGCATTCTTGAGTTCAGCAAATAT TGGCAGATAATTCTGCTTTATGGAAACTATTAAATGTAATTGGTCACATCAGAGACACAATTGGCATCTGTACTTTG AAGCTGAATCTCCTCAGGTTGAGAGAGAGAAAGAGAGATTAAGACGGACTCTTCAGAGACCATGGACTACAGGGCCC AAAGTTATAAATCTGGAAGATGTAAATAAAGGAATATTTTAGGCTAACGTTGCTCCAAGAAGCAGTATTTGCCTGTA AGAAATGTAATAATAGAGGTGCCAATACAAGATAGCAAAAGTTACCCAGGAAAGATGTTAAGTGACATGCTGTCTTC ATTTTTAAACAGGACAAATTATTTAATTGGGAATTTTGCCGACACTGTTGAAGCAATTATCATATTTAAACTGTTTA TCTTCTCCACATTCTGCCTGTATTTTTTTTCTTCTTTGCATTAATCTTTTTCCTCTTTAGCATCTAGAGAGGGTCCC TTTCTCGTGGAGATCGGCATTGTAGACCTTAAAAGGTCTCACTTGAGAAATATTTTTGATATTATTGAATAATTATT AATTCATGCAAGAAACAAAAGGAAGGGCACTCACCGGCTCGTGGCCAGAGCAGACTCTCATTCTTTACTTCTGAGTG TTTGGGGGCTTCTAGCGAATAATCCCTGGATGACGGGTCCTAGTGGTTTTGAGACCACCAGTGGGTAGCCTCGCCCT GGGAGGGGCTTGAGCAGCCTTGAGGTGCTTTTGTGCTTTGCACGTTCGTAATTGTGAACCTCAACGCAAAGCAGGTG TTGTTGTAAATCTGGTGTCTCTGTGGAAGCAATGCCAGTCCTCTAATTCATCTTCGCCAAGCTAGAGGACGCGAGCA CATGTGCAGGTCTGTGACCTAAAGCCCTTGCTGGCCAGGGTGCTATTCTTACCTTTGGGCTTCCAGAAAGAGCCAGC TCCTGGTGGAGTGAAGGTCCTACCTCCAGATGCCTCCGAAGGTGCCGGTACGTGATTGGAATAGGAATGCGCATGAA CGGAGAAAACCCTCACCATTGCGTCCTTTTGTTCTTTTTGCGAGGAAGAGATCCATGGGTTGGCTCTTACTGAACAT GAAATGTTGGAAGTGGAACACTGCAGTGTTACCAGTGAGCTGTGTAATCGCCACCTCTGACAGGGATCCTGCTCGAG GAGCACGTCTTTCCTTGGTGTGGCCGTCTCCAAGTACTTTGGGTGGTGGTAAATTTACCCTTCTCGGTCACACACTG TGAAGATGTGAGTTTCCCAATTTCAGCATTTGGAGCCATGTCCTTGGTGAGGGCAGGAGGAATTTGTCACCCTTTCT CGATGTGCCTGGGACTAGGGCAGAGACGGTTAGTCTCAGGAGAGCCAGGTGTGCCAGCTGCCCCTGCCTGCCATGGC TCCCGCATTGTGGCCAGGACTTTTTCTGGCAGTGGTACTGCCCGAGGGCCGCAGTCCTGGTCACATTCCACTTGGGG ACAGAGTGTGCAAGGGGCTGATCTGAAGATCCGGCTGGAACCTGGGAGCCACAGGATCCTGGGGACCCTCTTTGGCT GTACCCCGTACCTCTGTATTTGCTCCCACATGCTGTCTGATTTCTCTGGATGGCCTGGATGCCTCTGTTCCCAGCAT CTCCTCGGCATGCTCCCTGCAGCCCTTGGCCTGTGTCCAGTGGGCCCCGACCCGGAGGCTCCTGCCCCGTAGCTCAG GTCCCGTCTTGGCCTCAGCCTTCCCTTAGGTGCTCGTTTCTCCAGTACCTGCAGCACCGGCGCTTTTAGATTGCATT CTTTATGCATTAATTAGTAATGTGGTGGTCCCAGGTGACTAATAAGCTAAAGAAAGAACTAGTGTGAGTGAATTTCT TTAAAGGTCATTTGGCTCTAGGAAAACCTTTTTTTTAAGAAAAAAAAAAGCATTTTATAGAAATGTTCAATGGCAAA GTGAAATGTAAAGTATTACATGTTTTTTACTATAGCGAACAAATTGCCCCTTTTTATTCCGTTTATGTCTTCATCTG CTACATTTAGCCAGATATATTTGTCTACCTAATTTTCTGCAAACTGGAAGACATAATCCCCCAATGTGAAAACACCA AGAGTTACATGATGATAATTATAACTCATGAGGGGAAAAGTGTCGCCTATAGAATCCATACCGGTCGTTTGCCTGAG AGAACGTGCTCATCCTGGCCCTGTTGGATTGTCTCCACAGATGTTTTTCATTTCGTATTTGGTTTGATTAAAGACAA AATTCACCCATCAAAAGGAAGAACGGCCCTGCAGAGTGTGAGTTCTTCATTCGAGAGCATGTGCTAGTTAAAAAGAA AGAAAAAAGATATCTTAATCCAATTTCTGAGCTGCACTGATCCCAAATTGAACTGAATTTCCATTAATAACTCAACC TAAAAATCCTTTAGGTGTTCTCTGGGGGCTGGAAACAGAGGCCGGTGGCGTGGTGTGATGTTCAGCGTTGGCCAGGA TCACTTGCTTCACCCAGGTGTTGGGCCTGCACACTGAGTGCCCGAGAGGAAAGGTTCCGGGAAAGCTGCTGTCGGAA GCCGGGGTTTGTGGGATCGTGTGTAGGAGTAGATGTGGAGGGGCTTGTGTGAATGGGGGAGTTATGAAACCAGGACT GAAGACAACAGAAAGGCCCCCTGGGAGACAGGTCCCTGGCTTGCCCTGTGCTTCCCCGCCACTCGGGGGGCCGGCCA TGCGGAGAACACTCTCCTCTCCCAGCCAGGCTTCAGAACTGGGGGGCTCGGCCTCCTTCCTCTGGCCCCAGCAGCCC CCGAGCGGAGACGCTGGAGTTCCAGTAGAGTGGAGGGAAAAGTGTCTTTGACAGCGAGGTGAGCTGCCTGCCTGCAC GGTGGGTCCCCTGGGTGACTCAGGCCCCCTTCCTGGAAGGCAAAGGGAGGGGCACGTTTCTGACCCTCCTGAGGGAA CGGAGGAGACTGGAGAGGGAACATTCTAGTATGTGCGTGCGCCCATGCGAAGGCTTTCAAAGGCCTGAGAGCAGACT TCAGAGCTGATCACAAAGTTGAAGGTGGGAGGAGGGGAGCAAGAAAGCATCGGCACTCAGAGTCCCCAGGCATGGGC ACCTGACACGGTGCTGTCCCCCGCAGTGGCTGCTGCTGTTGGTGTGCCTACTGTGTGGGGGCTTCTGTGGGAGAGGA CCCTGTCCTCCGCACGTCAGCTGCCGGAGAGTCAGCTGGTGCCAGATGGCCGGCCGGCCTGCCTGCCTCTGGGAGGC CTCAGTGCCTGTTGGATTCCCTGCCATGCAGGGCGCACCCACGGGGTGACGTGTGGGACCCTCCCAAGCGTGCCCGT GCACCCATGCAGCTGTGGCCGCAGTCTCCACTGTTTTGAATATTTGTTGTGTTCCTCCTGGTAGGATGCATGATGTT TTGGGACTGTGCTGGCAGCTCTGTCTTCCAGTTCCTTCCCAAGCAGTGTGGGCTGAGGGTGCCAGCAGAATGCCCGC CCCAGGACACGATCCAGTGGCTCTCGGGATCCCTCCAGGGTTGGCTGAGAATATATCAGTGGCACTGATCTTGTCCC AGAATGCTTGGTCGTCCGGTCGGCTGTGACAAAAGAGAAACATGGTCCGGGTTATACACAGCCTTTCCTTGTCTTTA TTTCTAGACACCCTTTATTTCAAGACTCTACTCCACTGGACTTCATGTCCGGTTATTAATAAGCAGTTCTCGTTCTG TCATCGAGCCTGCTCTGGAGTTAACTGTCAAATAATCTGAACTAAAAAGTTAAATCATATAGGCTTTGAAAATTAGC ATCCCTAAGTCTCTGTCCTTTTGTATTTGAAAACATTGATCATTTTCCACCCCCTCAGGATGGCCAGTATCCTCTGG ATTTATTGCTAACAGTAACTGCTCAGTTTCACACCCATCCTGAAACCATTTGAGGTGATCCTGTAATTGCCATGTGT GTGTATTACTAATCAAGGCTGCTCCCTCTACAAAACACTGAGTGGCCCCCAGGCCGAGGTGCTGCAGAGATGGCCCG TGTGGGAGGGGTAACGCCTGCAAACCCGACCCTGATCACCAATGGAGTGGCCTCACGTGGCCTCCCTGATGGTGGCC CTTGACTGTGGTCAGCACTGGACTGGCCCACCCTATGAGATGTCTCAGGCAGCTTGCAAGATTACATCATGTGATGG CCAATGCTTCTGCTAAACAAGAGGCAGGGAGCCGAATGGACAGGCCTCAGGAAGCACAGCGTGGTGGCCGTCACAGC CTTCTGGGAAGGCTATTTCTGCATCACTGAGGCCCCACAGCCCAGGGTGTTTAGGATGAAGGGCACAGATTTCCAGA TGTGAAGAGTGTCAGGTGGGCTAGGGGCAGGAGAAGCATGAGGAGGACCCTGTGCTGGGGATGAGAGGAGAGCGGCC CTGCAGTCAAGGGGCCAGGTGGAGCCACCTTTGGGGATGCGGGGAGAACTTGGTGGCCCTCAGAGACCCCTGCTTGG AGACCCCACCTCCCCCTTGACAAGACTGCGGCCTGTGCTGGGCACAGCTGGCCCAGAGCGAGGGCCACACCCTACTA CTGCACCCTCCACGCCTGTCTGTCCTTGCCCACCTCGGTGGCTGCCTCGCCGACCCCCGCCTTGCAGCTGGAGTAGC TGTGCTGATAAAGATGCAGGTGGGAAGCTGGATGGTGAGGTAGCCCATCTGTGGTTTGGGATCCGAGAAGACGGCAA GACCTCAGCTTCATGAGAAGAGAGACCTGAAGATCCATGCTGGGGAAGGGCGAGGATGGAAAGGGGTGCAGGGCGTG GAGCAGGTGCCCAGGTCGGGTACAGAGACAGGCCTGGGACCTGGAGGACCTGCACGCGGGGTCGGGCACCTGCCACA CTCTCCCATGTCTTTGAAGCCTCTTGTGGTAGAAGAGAAGGTGCTCATATTTTACCTTCTGTGCCTTAGTATGTAGT TTGGTATTGTGTTAAGTGGACAGAAATCACATACCCCTGCTCACTCTGAGCCTGCATCCTTTGACCGTCACTGTGAA CCTCAGATCGAGACACCAGCCTCAGCGGGGGCTGAGATAGGGCATTCCCCATTCCCACTGGCTGCTTGGAGGGCTGT GAGGGACCTGCTGCCTGGAGCACAGGGCCTGTATGGGTGGGTAAGTCCCTGGAGAGACAGGAGGAGGCAGGGGTGTG CAAGCCTCTTGAGGTATGAGGAAGGTGGCCGGGGTCTCGGGAAGCTTGTCTGGCCCTGGCAGGCAGGACAAGGGCCC CCTCCTGCCCATACCTCTACCTTAGGCCCCTTGTCATGACACGTGATACCTGAGGGTGGGGGGCTGTATGGGCATTT GGAATGTGACGGCACAAGCCACAGTGGGTCACTTGTTTCTACAAATGCCTGAGAAGAAAACTATTCTTCTAACTCAG AGAAGTGGGATTTCCCACTGAAAATCAGTGGAAATCACTTATAATGGTCTTTGCAAATTCCTTGCATCTAAGGAAGT GCCTGTGGAGCAGCAGTGGGAGGAAACCATTCAGGCTCGATGGAGAGGGTGACCGCTGCACCCTCATCCCTGGTGTC AGCACACTACCGAGGTGCTCCTGGTTTAAGGACGTTTGTGCACCCACCCGGAGGTATGCATGGAAAGAAAGCACTGC AGCCATTCCCCAGCCAGTGTAGGGGTGGGACACAGTCCCGTGGGGGCCCCGCGGAGGGCCTGGGCAGATGCAGGGCT GCGCACTGCCGTGGTTTCCTGTGTGTCTGCCAGGAGTGAAGACCTGAGCAGCCTCACTGGCCTGGTGTGGAGGGGCC GCCTCCGAGCATGCGGAGAAGTGGTTTGCATGGCTGGAAGTCAATGTTTATCTGTCTTTAGACTCAGTTGAAGACAC ATTTCTTTCACACATTACCATTTTTAAAACCCATTAAGGTCTGATTTTCCAAGGCGCTGACCCTGACGCTTCTAGAG GGCCTCATCCCGGAAGCTGGTGGGGAGAGCAGGAAAATCTTCCCCGTTGAGTTTTAAACGTCCAGACCTTTGTTGTC TCCTTGTGACCCTTGCAGGAGAGCTCTCGTGGCTTCTGTGCATGTTCGTGTGTGACTCGCCCGGCTGAGGGACTGGC ATAAACAAACAGGGATGAGTTTGTAAAACACTTTGTAATCCCTTGAAAAGGAGAAAAATATAAATGAAAATCACTGT TTAACAGTGAAGGCAGGAAGGGAGCTGTTCCTCAGTATAGCTGTGGGTTGTCGTTACGTGAGCAGGAGGGAATTTCA CTTTGGATGGATTTGGATTTTCTCTTCATGCTCATGCTCTCTAAATCTTGCAAAAGCACATGGTAAACACACAGCGC ATGTGTTTCTGGAGGAAACGCACAGTGTCCATATAGAGCAGGCACTGATTTTGCACTGAAAGAACGTGGATGAGAAG TTCCACGTGTTTAAATAAACTGGCAACAGCGGTCCCAGATAGCTTAGCCGGGCAGCAGTCAGAGGTGCCCTGGCCTG GGGACTGAGCTAAGGTCTCAGAAGGGTCAGCTAGCCAAGCTCTTCACCGGACAACCCCTGAATTAACCAGACACATC ACAGATGCAGACTGTTGATTCCAGGGAACCCAGGTGAAAGGCCAAGGAGAGGTGAGGTAGTTGGTGCGGTGCCCCTC CTGGAGTCCCTTCAGGACTATGGCACTACAGTTCTATGTAAGCTGTCACCCAGGACTCATCTTCAGTGGAGTCTGGA CTGCAGTCGGGAGGTGACAAACATCCATGGCATGAGGGCAGCAAGAGCCCCTCTCTTGGGAACCAGTTGTGGCCACT ATCTGCCCAGTGAACATGGGCTTCAGCCCCGAGCATGGGAGGGCTCCTGGTTGGGCATCTCCCTGGGAGTTCCTTGG TACTGCCTCCTGCAGGGTGAGGAGGGGTGGGGCCTACTTCCAGGCCTCTGGAAGCAGCATCGGCATGTCCTTTCTGG TGTGAACTCCAAATATCTGAGATGGTCTCAGTTAATTTAGAAAGTTTATTTTGCCAAGATTAAGGACATGCGCCTGT GACCCAGCCTCAGGAGGTCCTGATGACACGTGCCCCAGGTGGTCGGGGCACCGCTTGGTTTTATAGATTTTAGAGAG ACATGATACATCAATTAATATATGTAAGAAGTACATTGGTTCTGTCCAGAAAGGCAGGGACAACTCGAAGCAGGGAA GGGGCTTCCAGGTCACAGGTAGGTGAGAGTCAAGTGGTTGCACCGAGTTTCTGATAAGCCTCTCCAAAGGAGGCAAT CAGAGATGTCTTTCTCTCTGTGAGCAGAGGGATGACTGAATACAACGGGAGGCAGGTTGGCCCTGAGCAGTTTCCAG CTTGACTTTCCCCTTTAGATTAGTAATTTGGGGGCCCCAAGGTTCTCCTTTCATGCTGGGAGGAGGGTTTTTCCACA CGTCTCAGACCCAACTCTCGGGCTTCTTAACCCAAAAGAACTTCCACGCAGAAGGCAGCGAAAATAGTGCACTTCAT TTTCTAAGACATCTAAAGCTGCCACAATGACTGTGAGTTAGGTGAGCTCTATGAATTAGGCTAGGGATTTGCAACCA CTTAGCAAGTTCTAAGTAACTGTAAAAGATCCCATAGACTGCAAATTGTGTTTCATTTGGGGACAGATACCCTGTCT TGGGGATTTAAGTGTGTTTACCTGCCCAGAGTTGACACAGACGACTGTCCCTTAGCTTCCTTTCCTCATGCTGGTTT TAAGTGCTTCGAATCGGGATTTTCCTACCCATCTGATGCATTCCATTGAAAATTCAGGAATACACATGTATGTGACT GTTTATTGGCAAGTAATTGTGAAATAGGCCAGAAATCTACCAGCTTCCTTTAATTAATGTAACAAATACTTAGCAAG GACCTCCTGCATTCTAGGGATTGTGGGGGTGGGGGGGGGAGCAACAAACAAAACAGATAAACCCTGCCCTGAGGCGC CCCTTGTCTTGTCTGGGGGTGGAGGTGGGGCAGGCGTGAGACAGAAGAAACAGGTAAAATACAGTTCAAAGTCAGGT GCTGGTCAGTGTCTTGGAGAATTCTAAAGCAGGGAGGAGGGATGGGGTGAGTTTTAAATGTGGTGACTGCTGAAGAA ATGGCCTCTGACAGCCTGGAGGAGGAGCTGGAGCTGGGGGGGGGACAGGCTGGCCAGCTCCTCCAACACACACACAC ACACACACACACACACACACGCACACACACACACACACACACCCCCTCTCCCCCAAGGACCCACAAGGACTGCGGCC TCTTAGCGTGTGTGGAGTCATCACACTGACCCTTAGCAGTGTGGCCTGACTTCATGAGGCCCCCGTTGTCATGGAGA TGCTGGGAATGGGAGGATTTGCCACCCTCCAGTGAGGAGCCCCCATCCCATGAGTGCAAAGCCTGAACCGGCCCTTC CCTAATTGGCACCTCTATCCTATTTTCTTTGGCTGAGGAAATTCTCGTAAATGTATATTTAATGTGGTGTTGAGATT GGTAGTTCTCCCCCATCCCCCAAAGATCATCAAATCTCTGGGGGTCTTTCAAAACCTAAAGGTGATCTCCCTGGTCC TATTATGCTGTTTTGTTTTTGCTTCTTTTCTTTTTCTTGAAAGACCTAATTGTGGAGTTTTTTCCCCCTTCTATGAA TCCCAAGTAAGGAACTAAAATGGAAGACGGGCTTCTGGCTCCCGCTGCAGCAGATGGGATAATTCTACAGGTGATTG CCCTGGAGGTCTGCAAGGGAGGGAGAGCGGCACCATTAGACTAACACAGCTCTATTATTGACTAATGACGAACAGCG TCGCCTTGCCTTGCCACCTTAAAACAGACACAGGGATTTGCTACTCTATTTGTTTTATAAAATATGCATTGAGAGCA ACACCAAAATGCTGAATGACAGGTGACCCTCAGAGCACGCCTGGTATGCACTGCGTTAGCTTGCCAGTATTTCTTAG AGACTTATTTGATTCTAATTCAGTAGGATTTTTAACCCCAACATTTTGAAATCTTGCTTTGAAAGTCCATGTTATTC CCATTAACGTCAGTGAGTTTTTCACATATCTAAATATCTAATATCATGCTTTGAGAATTGAAGCCCAGCCTGCTCTT TAAAAGCAAGGGAGCTCACCACATCCTGGAGTTCTGCAGTGATTTGACATGTCCTGGAAGAAATTATCTTCGCAAGA AAGTAAGTTTAGTTGATTGAAATGAAATTAACACCACATTTCTGTGTCATAATGTATTAACCTGATTGGCTAGCTGG ATTCCAGCCTGTTTACAAACATCCTGAAGCCTAGATGGCCCCTTCCTCAGTGTCCTTAACTGCTGTTCTCGCCCTTA GCTCGCGTGCCCAACCCTAAGGCTGAAAACGCCCCCTGTAGGCTACTGTAAGCTGTAGCATTCAAGGCCTCCCAGGT GTCGCTGTAATTTCTTGTATACATTTTAGCTCCATCTGTGGCATAGGTACCATTCAATGTTATCTTAATACACTAGC TTTGGATTTTGTGGCTGCAACAATAACAAAAAAAAATCCTTGGTTCTGATGACTTCATGTTGTTTCAGAAGATACTC AAGGCCGGGTGCAGTGGCTCACACCTGTAATCCCAACACTTTGGGAGGCCGAGGCAGGTGGATTACCTAAGGTCAGG AGTTCGAGACCAGCCTGGCCAACACAGTGAAACCCCATCTCTACTAAAAATACAAAACTTACCTGGGCATGGTGGTG CACACCCGTAGTCTCAGCTACTCGGGAGGCTGAGGCAGGAGAATTGCTTGAACCTGGGAGGCGGAGGTTGCAGTGAG CCAAGATCGCACCACTGCGCTCCAGCCTGGGTGGCAGAGCGAGACTCCCTGTGTGGAAAAAAAAAAAAAAGATACTC AGATGTAGCTGTCTCTGCCTGGGTTGTTTTCTAAATGCGTTTGGCTGGAGATAGAACAGATCCTGCCTCTATCCACG GCGTAAGGGAGTTAGCTTCATGGCAAGCTCTCTGGAGAACACAGGCCATTGTACCTGCTCATGAGAACAGAAGTGAA AGTCACACAGCATGCATATTAGTTCCGAGGCTACTGGCATTATTATTTAATGATGAGTTAGTGCAAATTGAGGGGTG AGGAAGTAGCATGTACAAAGGCCCTGAAGATGAATGACTGTGTGAAATTTTGAAGAGCAGTTTAGCCCGAAAATATT CCATGAGTAGCTGCCAGGAGAGCTTTTCTGGAACAGTATTAAACTTTAGAAAAAGTGTTCTGACATTTATAGACTGA CACGAAAACAGAAGTAAAAGTCTAAATTGAACCAAAGTCCTCCTTAAAGATTGCCTTTGAAATTGAGTAATGGCGGA TGCCCAGCACCTGATGTTTGGGCACGGGCGACAGGACGTAGGGTGGTCATCCGAATATCCCTGCCCCACTCCCCAGC TCTCTATGGCATTAGTAGATGCTGGAAGATGAGGCCGTGTTTTCTCTTTCATCACCCGTGCAGTGAAGGATTTGCGT GGTCTTTGGTGCTTTTCTTCTAAATAATGAACAATTATTTCTTGCGACATTTTGGTTTTTTACTGCCAATTCCAACA GCCATTTGTCTTTTCAGAGCTAAGTTTATAACTTCCTCCTTTCTCTCCTGTCACTTTTACCCCATTCTGATTTTTCA TCTCCCTGCCAATTGTGGTTTCGTTTCTGAGCACTCATTTATTAATCCTTCTTTTTCATTTCCCAGAACACGTGCTG GTGTAAATCTTTTTGCAGTTAAAGTATTACATTAACCTTTTTGATAGCATGGGGTGGTATCTCGGCGGATGGGCGAG TGCTGTTCGCCTGTGGTCTGTCTCAGGGGTTCTAGTTGGAAGGCGTCCTGCAGCCATTTCTTCAGAGGCTAAGGTGT GGGGGAGCACCTTGGGGAAGAAGAAAACATAGTTTCTGCCCTTACAAAGCTGATACCCCATCAAACTTGAGATTAAA ACAGACAAAAAACCCAAGAACCTACAGAGCACTGCAGAGAGGCCTTGGGACCCTCTGACAGAGTCAGTGGGGAGTCG GCTGGGAAGGGCAGCTTTTCTGTCCCAGCAGCCTTGCTTCCTCTTCAGCATGCTGAGGGACATGGAGCCCTCCACCA TTATCTGAATTGATTCCATCTTTCTCTCCTGCCTCTGCTGTGGGTTTCCATAATGTGAAATTAATGCATGTGCTTAG GTTGCGGGGGGCCAACCCCTCAGAAATATGCAAAGACTTCAAGGGAGACCTTTTCTTTTCACAAAGAGGAAGATCCC CCACCCCCAACACACACACACACACACACACACGCACACACATGCACAGTTTGCATAGCCGGAGTAGGGAGTATCTC TTTCTGGGGAATGTTCGTATGTCACTGTTGATTTTACATTGTTTTTCCTTTCTTTGACTTGAAAATTTTTAAAGTAA CACAAATTTATTATTTTAAAAACTTCAACTCTGGAAGTACAGCCGTAAAATCCTCTTTCCAGAAGCAATCAGTCTTA GTCCTTTGGAATGCAACCTTATAAATCTGTTTCTGTTGTAAATATACTTCCCTGTTCTTACCTGCCTTTACCTGGAG AGTACATAGTATATTCTTTTGTGAGTAGGACTTTAACTTCCTAATATATCATAGGCTTTCCGCAGCTGGTTCTGTAT TATGGATTACTGTAATTTATTAACTTTTCCCACTTTGAGTGGAAATTTAGTTTATTTCCAACTTTTTTTTTTTGCTT TTATGGTGTTATGAACATTTGTGTATGTCTGTATTTCTGTGCTGTGTGCAAGTATTTCTGTGGGATAGACGTCTAGG AGAGGAATTGTTTGGCCGAAGGGCATACACATTTAAATGTTCACGGATGCAGCCCAGACCCCCCTCATAAGGCTGTA CCAACTCATACTCTCAGCAGTAATAAAGACGCGTCCATTTCTCACACCTCTGCAGAGGATTTCTAAAATGGCTTTTT ATTTTTCAAAAAGCTTACATTTGACAACTATTGATGTTGTGCAACTTTCTGTGTTTATTAGCCAATTATATTTTTTT CTCCTTTGATTTACTTATACATATTCTTTGCTTTTTTCGATTGTTTCTTTTAGTAACTCTGCAGTATGGCTACTAGT CCTTTGTCTAACAAGTTATACATATTTTATTCTAGTCTCTTTTCTTAGCAGTTTAGTGGTGTCTTTTAGTCACGCTG GAGTTTTAAAGTTTTCCGCAATTTAATCTGACGATCAATTTACTGGAGTTTCCAGTTTTGAGTCCTGCTTTGAAGCG CCACTGTAAGATTTCGAAAAAGGACTATCTTGACTTACGGTTTTGTTTTAATATTTTTAATTTACTGGTAATTTGCT TTCGTGTGACCTGAGAATGATCTGACATAAGGTTTTTCTACATAGATGGTTTTGCTACACCCTTTCCATAGGCTTCA CTGTCATCTACCCTCATCACTGAAATGTCCCCTTCATCTTATTCTGACCTTTCCTGTGTGTGGGTCTAGATACAGGC TCTGTTCTGTCCATTGCTATTCCTGGGCCAGCTCTTCCCTGATAGTAATGTGGCTCTGCAGACAGTTCCACGTGTAG AGGATGTGTCCTTTTTCATTCTTGTTTGTAAATAAGAATGGGGGTGGGGACACGGGAGGCAGAATCATAAACAAATA GCCTGACAGAACAGGGATAATAAAAATTTAAAGAAAAAGGGGGTTAGGGGAAGTAGAGTAAGATCATGCCCTACTGT ATAGGTCATAGGTAGGAATCAAAGGAAACTATTTCAAGCTCACAGACCAGGAAGTGGAAGATTAGGCAAGGAAAAAA AGGAATTAAAATAGGGTGACCAGTCATCCCAGCTCGCCTGTGACTGAGGGGCCTCCCAGGACACGGAACTTTCCGTT TTAACACTGGGAAAATCCTGGGTAAACTGCTGGGACAAGTTGGTCACCCTAGATTACAGACGCTATAAAAGATATAC ACACAAAGGTACCACTAGAATAAAAACACTTTACAAAATATTAACCTAAAAGAAAAAGCAAAGAAGACTAAAGAGAC ACAGTAACCCTCACTGCAATTCCAGCATCAGCCAACAGGACAAAGCGGAAGCTGTGTCAGGAACTGTCAGGGGGCTT AGCTGCTTCTGGAAATGAAATTTCACGTTGGCTTGGTAAGGCAGCCCGTAGCTCAGCACATGTGAGCAGCACATGTG AAACACAGTGATTCACAAGGGAAGGGCAAAGGGATGGGCGGTGATTAATCAGGCAAATGAAACCATAGGGAAGCAGG GGTTGCCATCTTGGGATTAGACCAAGCAGAAATCAGGCTAAAAAGGCATTATAAGAGACAGATGAGAACACCTTAAA ATGCTAAAAGTCACACTCATAATGAAGATAAAACCCATGTAACACAGAAACCACCTGTATAAAGCAGAACCTACAGC ATACGCAAAGAGAAATAAATAGCAACACGGAAATTGTCAGAGATGTTAACACACTATTCTCAGTACAAGACAGGTCA AGTGGCCACAAGTAAGGAATGATACAGGAGACCCAAACAACCTATCCCGTCACAGATACGTATTGAAATGCATTCGC TGAGTAGAAAATACGTCTGTTTCTCAACATACATGGAATATTTACAAAAGCTTATCAAAAATTAGGTTATGAAGAAA AGTTTCATAAAAGAATTGTTACAATCAACATTCTCTGATCACAGTGCAATAAAACTATAAATTGTTAACAAAAACAA GGCCCATCCACCTAGAGACTTAAAACCTATTCTTGAATGAAAGTGTAAATATAAACCAACGTAATAGAATGTCTGTA AAATAATAACTCTGTGTATCAAAGGCATAGTTAATGCAGTGATTAGAGAATTCATGACTGTAGACACCTATATCAGT AAAAATGAGGGAAGAAAAATAAATGGAATTAATACCAAACTCAGAAAACTATGAAAAATTAAAAGGGAAGCCAAAAA AGTATAGGAAAGGAAATAATAGAAGCAGAAAATAACGAAGTAGAGAAGGAAAAAGCATTTATTTAATCAGTAAATCA AATTCTAGGTCCTTTGAAAAAAATTTAAACAGACAAATCATTAGTTATTTTATTCAAGGAAAAAAATGGGGAAACAC AAATATATAAAATGAGAATGACAACAGGGAAATAAGTATTGATACAGAAGTTTTTAAAAAGCACAAGAGACTAATTT GCAAATAAATATGAAAACATTTTTGAAGTGCATAATTAGGAAAAATCCAGTTTTAGCAAAATTAACCCCAGTAGAGA TAGAAAGCTTAAATAAACCAATTTACATGGAAGAAACAGAGAACATTTTCAAAGAACTACCTCACAAAATGGGTCTG AGCCCAGTTGCTTTCACAGGGGAATTCTAGTAAATCTTTTGTGTAGATGATTCTAATGATACATAAATTGTTTAAAA GCATAAGAAATGAAGGGAAACGTCCCATATTTTTTATGCAGCAAGTACAAATTGAAACCTAAACCTGGTAAAGATAG TATATTGTAAGGAAAATAAAAACTAATATAATATGGAAATATTGATGCAGAAATCCCAATGAATATTAGTGAATAGA TTCCGACACCTCATTAGTAGTATAATATACCTCAACAAATATAACCTTTCTATGCCCAGGAATGCAAGGGTAGTTTG GTATTAGGAAATCTGTTCATTGCATTGCAGATGAATAATATAATCATGCAAAAAGGAAGGAAAAAAGTACCAATGCA AGTAACTTAAACACTGTACTCTGATGACATGTACTCAATTGTAGGGGGAAAACTACAAATATTCTTCTTAATAACTT TGTTTTTCATAGTGATGTGGAATTATTTCATGTGTATGTGGATTGAGAAAATGACTAAGTGTGTTGATGTTTGGGAG AACCCCCTGTGAAGAAGAGGGACACTTACATGGAGTAGGCATCAAGGAAGAAGTTGGTGCAGTTGACTTGGAATCAG CATCATCTATATGGACTCATTATTTCTCAAACATGCACATATGTACACACTTCTTCCAGCTCTAGCTAGAACTAAAA AGGCCTAGAGGCAGTAATACCCCAGTCACAAAGAACACACCTAGTTCCCAGTCTTATTTTCAAAATACCATGCACCA CTGAAAAGGATCTTGTGCAGCTTGGAGAAATGGCTGATTCCAGGATGGGGGCAGCAAAGACACAAAAGGAGCCTAGA ACAAGAAGAATGATAAGCAGGATGAGAAGGAAGAATACAAAATGAGCCCAGAATTAGCAGGGGGAAGAGAAGCCAAT TTTTAAAATGGGCAAAACATTGGAACAGGCACTTCACCAAAGAATGCATATAAATGGAAGATAAGCATATGAAAATA TGCTCAACATCTTCACCCTTAGCAAATGAAAACTAAAACCACAAGGAGATTCCACTACATGCTTATTAGAATGGCTA AAGTGAACTGACAGTGCCAAGTGCTGATGAAGATGCAGAGCAGCCAGAGTCCATTGCGGGGGAAAATGCTGAATTAC AGCCACCAGGGTGACAGTCAGGCAGGTTTAAAAAATAGAGTTGAACATACACTTACCATATGGCACAGAAATCTGAC TTAAATGTTTACTCAAGTGAACAAAAACAGATACCTACTCACCCACCCATCCACTCCTTCAGTCACCCACCCACTCC ATCACTCTCTCTCTCTTCACCCACTCACCCACCCCCCCACCTACCCACTCACCCACCTACTCACTCCCCCACCCACC CCCCAACTCACTTACCCCCACACCCGCTCACCCACCCATCCTCTCCCCTCTCCCAACTCTCTCTCTCCCAACTCTCT CTCTCTCTCTAACTCAGAAAAGTGGCTTTACTCAGAGTCTCCCCAAGCCTTAAACAGCCATTCCCTCACTTGGAGAA CTGAGTAAGTAGATAAGCTGTAGTTCATCCCTACCATGCAGTTCAGATCAGCCCTGAGAAAGGAGCAGACAATTGAT ACATACAACATCATGAATGACTCTCAAGGCATTATGCATTTGATAGTGGAAGAAGCCAGACACTGAGATGACATTAC TCCACTTACAGGACTGACTGTGGGAGGCAAAACCACTGGGACAGCAAATCAGTGGTAGCGAGGGATGGGATTGAGGG GGAAAGAGGTTTCCTATAAAGGACCACAGGAAGTGCTTAGGATGATGGAACTCTGGCTTGATCTTAGTGATGGTCAT GTGACTGTAGGTGTTTGTCAAAACTTACAGAACTAAACACCAACAAGGGTGAGTTTTACTTCATGTAAAAAATGTTA ATGTCATGAAAGACAAAGGCTGTAAAACTGTTCCAGCTTGAGGGAGACTGAAGAGACATGGCGACTGAATACAACGT GTGCCTGTACTCCAGGGAAAGTGTATTGTGGGAGAGACTTAATTGGGACAATTGATGAAATTGGCTATGGATTATAT GTTAGATAAAAGCACTGTGTTGATGTAGAATTTCCTCAGTTTGACAACTGTACTGTATTATGGTTACCTAAGAGAAT ATTCTTAGGAAATAAGATGTGTGATATACCCAAAGTAACTCTCAAATGGTTCACACAAACAAATAATAATGTTTGTG TGGGGAGGGAGGGGGAGAGAAAGAAAAAACAGTGGCAAGATGGTAAAAACAGGTGAATCTAGGTAAAGAATATACTG GTGTTCTCTGTATTCTTGTAACTTTTCTGCAAGTTTAACGTTATTTGAAACAAATTTTAACTATTTCAGTGTTCTAG ATCATATATCTTTTTCCATGCTTTTAGAATGCATTTGTCAACTTTCACGTTTTAAAAATCCAGTTACAGTTTTGATT CAGGGTGCATTCACTATGTAGATTAATTTGGGATCACAATGAATTTCTGTTAATTTTGAGAAAATTTATATTTCTGA TATTTTCCTATCTAGGAATATGCTGTTTTTTCACTTATTCAGCACTTCTTTTATGTCTTTCCATAAAATTTTATACT ATGAGTCATAGAACTCATATTTTTTGCTAAGTTTAGCCATATATATTTTTTAATGTTTGTTTTATAAATGAGCTCTT TTCACCTCATTGAAATTACTAATTTATTATTTCTGACATACAGAAAAGCTGTTGACTTTTGTACTTGGCCATTCTGC TAAATTCTCTTATTAGTTCTAACATCAATTTATTCTCTTTAACTTTCTCTAATAATACCTGGAAATAATGATAATTT TGTTTATTCCTTCCTAATATTTTTATCTGTTATTTCTTTGTCTTGTCATGCATTGACCAGAACCTAGACAACAATGC TGAGAGTAGTGATACTGTTGATGGGGTGTGCCTACCCAACAGTTGTAGAAGTTTTTGTTTCTAATGTTTGCTGCTTA TGAAACATAAGATGGTAATTAACAGGTGATTGCTGGAAGTTCTTGGCTTGGTTCCCACACCTGAAAAGCATTTGTGA TTTACTGAAAACCAGTGCATGTTGAAGGCTTCCCAGCCTTACATAATTGAGATTCACTTTGACTGTCATATTGCCAA AAATGGACTCAAACCCTGAAGTTGTATCCATACCATCTTGAGAATCAGTTGTTTGAAGCGTCACCCATTGTTTCTAA CCATTTTTGTTATAAAGATAATACACACAGAGAGAAGCGCCTGCAGTGAATCTTTGTGTAACCATCATGCAGATCAG GAGACAAACCATGGCGGCCCCTCAGAACTCTGCCACGTGTTTCTTCCCATCTTTTCCTGCTGCTGCTCCCAGAAGTA ACCCTATTCCGACTTTTCTGGGTTTTCTTGGTAATCAATTTCTGGTTTTTCTTTATAGAGTTGTTGCCTAAGTATGC ACCCTTCAACACGATACTGTTGTTTTGCTTGTACTTTTTGTTAACTGTACATATAATAAATTATGTTATATATTTCT TTATTGCAGGCTCCTTTAATCCAGTGTTATGTTTGGGAGACGCACCCATACAACTGCATGTCACCGTAGCTTGTTCA TTTCCAGTGTCGTGTAGTGTCCCTTCATGTGAATTTATCACAGTTTATTAGTATCTTCCACTCTGATGGACATTTGG TAGTTGGAATTTTCATTACTAATGATGCCCCTGCCTGTGGTCATTCCTGCCTGCCTCTTGATGCACACAGGCACGCA TTTCTGCTGGGTATGTCCTAGTTCCAGACTCACTGGTTATACGGTATGGATGTAATTATTGTTAGTTTTCCAGTGTG ATTAAACATCAGATTAGCGCCCATTAGCAATGTCTGAGGCTGCCTGTTGCTCCACTCGGGTGCCCGTTTGGTATTAG GAGCTTCTTCAGCCATTCTTGTGTTTGTGTTCATGTATCTCATTGTGGTTTTAATTTTCATTTCTATAATGACTAAT GTGGTTGAATATGTTTTTGTATGATTATTTGCCATTTGTATTTGCTCTTTTTAAAGTATTTGTACAGGACTTTCACC CATTCTCTTATTGTGTTGCCTTATATAGGAATTATTTCTATGTTCTAGATATGGATCCTTTGCTGGCCATATATGTT GAAAGTATCTCCACTCTTTGGCTTGCCTTTCATTATTTTAATTGTGTCTTGCTGAACAGAAGGTTTTAATGTCAAGG TAGTTTTTAGTCAATCCCCTCATTTATGATTGGTGCATTTTGTCAGGTTTAAGAAGTCTTTTCTCTCCCATAAGAAC GTGAAGAAAACATATTCTCCTATGTTTTATAGACCATAGGTTGGCAAACTTTTTTCTGTAAAGGACTAAATAGTAAA CATTTTAAGCTTTGTGGACCACAGATAGTCTCTGCTACATATTCATCTTAAAAAAAAAAAAAGAATAACCTTTAGAA GTATAAAAACCATTCTTAGATGCTGGGCCAGAGTGGGCCAGGCTGTACTTTGCCTGTTCCTGTTCTAGAAGTCACAG TTATTTGCTCTCACCTTTACAGTTATGATTTCAGTTGCAGTTGGTTTTGTTTTTTGTTGTTTGGGTTTACAGCATGA GACATGGGACATCTCTAAATGGATATTTATTCATGTTGAGAAGTCCATTTATTCCCCATGTCTATGCAGTGACCCCT TTGTCACAAGTGAAATGAGTCTGTTTCTCAGTTGTCTATTCCATTTTATTGTCCTATTTGCTTATTCTCCCACCATA CCGCACTACTTTAATTATTGTAGCTTTATAACAAATTTTCAAATCTAATAGAGAAAGTACTTCATTTGTTCTTTTTA CAACTGTCTTGGTTATTCTTGGTTAAGACATTTCCATTAGTATATAAATGAATCAGTTTGTCACATTTCAGTTTCAG AGTAATTTTTAAAAGAACTTTTTCTTTTTGAAATGTAGAGAAGGTTTTTAGAAAATCTTTTTCTTCTTGAAATTGTA GAGAAACATCTCTACAATTTTGAGTCATCAAATCTGTAAACATATTATAGTCCTCCATTTGTTGAGGTTGTCTTAAT CTTTCCCAATCATGACTTAAAGCCTTTCCCTACAGAAGTCTTGCATACATTTTGTTGGATTTATTATTAGGTAGATG AATATTTAAATATATATAATCTATTGTAAGTGTTATGCATTTATTAATTGGCAGTGCTTCCTTAAGTGTTTGTTGGA GCATGCTGCTGAAAGCATCTTGGCTTATACATTTCCATAGAAGATTTAAAATTATAGGACACTAGGTTTCCTGATAT TTTTGTTTTTTTAAAAATCAACTTATTTTGTTTTACTGCAATTTTTTTTTGTTAAGAGACAGAGTCTCACTATGTTG CCCAGACTGGCTTCAAATTCCTGGACTCAAACAATTCTCCCACCTCAGCCTCCTAAAAAGCTGGAACTATGGATGCA CACCACTGTGCCCACCTCTAATTTCCTTTTTTTCCTGATCTTTCTGGCTGGTTGCTTACCAATTTTACTCACCTTTT TAATGACCCCACTTCTGGTTTTACTGCTTTTTCTTATTTTTTTGTTTGTTTTCTGTTTCATCAGTTTCCTATATGAG ATCAACCCACAGACATACAATTTTATTTGAGCATTTGTATTGCTTAGAAAGCATTTATAAAATTTTATTAAATTCTT CTCGACATTTTTCTTTCAGCATGGCATTACACTGCAGATTAATAATTTCCAATTAAAGGTTGGGTGGAAGCTCTTCA ATTGCACAGTTAAAAAGACTTTGAAATATGGAGATTTCTTTTTGTACTTGCCTTGGGATCCACAAAAAACAAAACAC TACCAGAACAGTAATTTGTGCTCAGAAATTATATCCACTGTAAATTTCTGTGGGAATAGAAATCTGGAGAAGTAAAT GAACAGCTGATGTTTCTTATGATTCAGTTGTTACTTTTCATCACAATAACTTTACTGAATTTTAAGCATATAATTAC TGTTTTGCCTTGTAACTTTAGGTTGAATTTATTTTTAAAAAATATAAAGTCCGATTTACAAAGCTATTTAATGTTTG ATAACAATAGTTGAAGGAAATTCTTTTGATTCAGAAAAATTTTAATATCAAACCTGAACCATAAAAATTGCAGTAAA ACGTTACTACCTCTGCTAAGTCATTGAAGTGCTTTGTGATACAGTATGTCAGGATATCCAGCTTCAGTTTCTGACTA AATTTCATAGAAATGATTGTCATTAGGTCCGTGAGCATCAATGAAGTACACCATTGATTACACTCTTTAAATAATGT GCAATAGATTCAGATTCACATATTTTATGCAGAGTACCTGCTAGTAGGTAATATAGTAACCATAGGCCTTAACATTT TCATAAGTTTTTCAGTTTAGCCAACTAATCCTTTTTTGCTTCACACAATTTCACAACCACCACTTATAACACATCTT AGCAGATTCCACTTCAGGTTGTACCGAAGTAGTACTTTCTCATTTTTCTGAAAATCTTTTCTTTGGATTTAAAAATT TTTTCTTTGAAAATATTCTTGCCATGGCCATAGTTTGCCAGCTGTTAATCTAGCTTTCAAAATAAGAAACCACAAAG AAGAGAAAATTGAAACATAGACCTAGTAGAAGAAAGGCAATAATGAAAAGCATAAATTAATGTAATGGAAATAAAAA AAATTTTTGAGAAAATCAAAGAAACCAATAGCTTATTTCAGTTTTGAAGACATCAATAAAAATGATAAAACTCAAAC TGAGAAAGAGATTACAAATTACCCAAATTGATGTGGTAAGAGGAAATAAGTACAGATCCTACAGACATTAAAAGATT ATGAAGGACATATTATAAACAGTTATGCCAGTAAATGTGACAACAGACAAAATGGACAGAATCATTGAAAGACACAA ACTATCAAAGCTCTCTCAGGAATTCGTAACTTAGTTGCTGTGGTGCCTGTATGACTGTACATGTCAGTACTCATTGA ACTGTATGTATGAAAAGATTTAATTTTTCTGTATGTGAAAATTATCTCAATTTACTTGACTTTAAAATATTGTTTAA TGCTGTCAGTCATTTGAGCTACACGTAGATTTACCATTTTTATTCTTTTCATCCTTTCTGTGTCTGTAGCCTTCTTT ATGTGATAATCCTCCTTCTGCCTGAAGAATACCTTTTCAGCAGCAGCAAGCTGAAGCCAGCCAGCTCCGAGAGCCAG TTCTTTAATTTACGAGAATTTTATGAGCTGGCTGTCAAACACACCCATTAGTAAAAATCGAATTACATAAATTTACA GTTAAATACATTATGTTTGGAAAGAGAACACACATTCAAAACTGATTCCTTCCAATTATTGTACTAATTGTGCTGTT ATCCATACCTTGGAGGCCATTTTTATGATGCTGTGATACTCCACATTTAGTGCTGTCACCTTGGTAGCTTGAAGTCA GTCCTGGTAGGAATATTTACACAGCAGAAATTAGCAAATGCTACTAATTAGAAGTTTATTTGATTATCTAGACCAGA GGTTGGTAAACTATGGCCTGGGGCTGGGGCTGGACATCTTTTTTTTTTTGGTAAATAAGTATTTGTCAACACAGCCA CACTCATTTGTTTATGTCTTGTCTGTGGCTGCTTTCATAGCTCAGTAGCAGTCAAGTGGGAGCAACTGAGACTTCCG GCCCACAAAACACAATATATTTACTATCTGGCCCTTTGAGAAAATGTTTGCCAACCAAAATCTAGATTTCAAAATGT GATGGAGAAGATGTTAGTAAGGTGCATTCATTTTCAGATGTCTTGTGTGTAACTGTTACATTTTGAATAGCTCCAGA AATTTAGCCCCTCTTCCAGTGGTTAAAAGTATCATCTCATTCAACAAAGAAATCGCTCACGTCATTGCCGAACACGT GAAGTTCTGACATAACATCTTCATCACCTCTGTCTCGTCACTTTGCAGCATTCATGTAGAACTGTGTGTTCACCAGT TGCAACCTCAGATTGGCTATGGACATGAGTTTGGCAAATATCAACAAAGTCATGCTATAAGAATCAGCTGGCTATAC AGAATTTACAACAAAGAGTATTGTGTATTGAATTATTTGTAAATTGTATACTTCACATCCTTTATATCAGTAGAGTT TATTCTTTAAGAAATGCACATCTACATGAATACTTGTTTTGGAATGCCAGCTAAACATTTATCAGTACACCATTGCC TTTATTTCATTTCACAGGGAATTGCTGGCAAGTTCTGGTTTCAGTTTCTTTTTTAGAAAATGTCTTAATTGTATCTG TATTTTTATATCATTTGTTATAGGGGTCTAGGTTTCCAGTTATTTTATTCAGAATCCAGAGATACTGTGACTTTTTC TTCAGGCTTCCATCATTCTTCTTGAGAAGTCAGCTCTTCTTTCAAGTAATGTCTTTTCTCTAAATTGAGATCTGACT AGGTGTGGACACCTTTTATTTATCTTGCTTTGAGATCACAGGGATTCCTGAATCTATAGCTCAATGTCTTTCAACAG TTTCAGAATGTTCTCATCTCTTACTTCTTCAGAGGTTATTTTTGCTCCATTCCCTTGAATTTCCTTCTTTGAACCCA TTTACGCATCGGTACACTTCCCTGTATCTTCTAAATCTCTTGTTCTCCGTTATTTCCCATTATTTTATATCCGTGGG GTCCATTGTGTTGATTTCTTCTGATCGCTCTAACAGTTCATTAGTTTTCTTTGCTACTGTGCCTAATTTGGTTTTAA ACCCATTCATAGAATACATTATTTCAATGATTTCTCAATTCTAGTATTTTCATTTTTTTAAATAGTTGGTGATTCTT TCCTGAATTTGAGATCTTAGCTTTTTTCCTGCTTGAAGGTAGTAAAGCATAGTTATTTTACATTCCAACACCTGGAA TCCCTGTGATCTATTTTTTGTCTTTATTTCTGCCATTTTTGTTCATATTGTCTTATCTCCTCATGGGTCTAGTTGTT TTTTATTTTGTGCCATATTAGTACATTGGAGAAACAGTGTGTAGAAATGACGTATTGCCCGGGAGGATGTTTTCTTC CTCTAGCAGTGCTTGGGGCACCGGCAGTGTGGGATCAGCTCATTCTAACCCTAGGGATTAATACGATCAGAGCAGGG CTGTGGCTCTTTTGAGGTTTGCTCTAGTGACAGCTCACTTTTACTCCTACAAGGTGGCCATTCAGATTCTTCCCCCA AGTTGAGGGTGCTCAAAGGACCCTGCAAGACACTGTCTGTTGCCCCAGGGCAGTCACCTCGCAGGAATGGTGCTTCA TCCCAGGGTAGGGGCAGCTCCTGTGCTGCTGTTTCCTCCTGTACGCTGGCCCAAAATTGTCGCTGTCTGCTCTTAGA ATATGACCCACTCCTTTCATAAAGCTGAGTTCAAATCCCACATCCCAATTTAAAAAAAAAAATCATGTTATAAGCAA CACTAACAACAAATCCACTTTTCTGTCAGCCCTGCCCACCTCCCCATCTTCCTTTCTGAGACATGCAGCATTTCTCT GCAACAAGCAAAATTTTGTATGTGCAAACACACCCTCCCACCCCAAACTTTATTTTAGTCTCTGTGTCTTGGTTAAG GTGTCTTCCTCGCAGTGCCTGCCACCTTGCGGTCGAGCCCAGCTGGCAAATGAAGCTGAGCTCCAGTTCTGCCTGAT GCACCACCCCATGCCTTGGTCTTCTGCTGGAGGCTGGGGGAGGTGAGCACTGGCCAAGGACCAGCCCTCTGGTTCTG TCCACATCGGCTTGATGCCCATTCAGGGGTTGCAAGTTCTCCTGGTCTGGATCTATTAGTTGAAGAAATTGCCACCT CGTAATTTCAAATTAGTGGGAATTAAAAATTTAATGGGATGTATGTATTTTTTGGATCATATGAAACTATGTTTTAT GTGGTATTTAATGTGAGTTTAAATATGCTTACTAAATATGACTTTTGTTAATATCTCAGTTGATGCTCGTGCGAAAA AAGTCTGCCTTTCTACCTTTCTTTCCTACCTTTCTGCCAAACCCAGTCCTTTTACTAATATTTTAAAGTATTGATTT GAAGCAGCAGTGTGGTTGCTTCTGTCTGGGTTTGAACAAGTAACTGAATTTTAATTCCTGAGACCTCTTACATATAG CAATTGTCTTGGCTGTTGTAGGAAGGCAGCACCCTCATTCCTCTGATTTAGCTCTCTTTGATTCTACAGGAAGTTGT TGCCACTGTCTCTTTTTATTAAACTAAATGCCAGAATTCTTTCATGTCATCATAAGATGTTAATGCATATTGCTTTG GGGACCAAAGTCATACAATTAGAAACCACTCAAATGCTTTTTTATTCTAATTCTGAGGTTACCAATTCCTTAAAATT AGTAAATTTTCACTGATTTTGCAAGCCAGTTGTAAAAAAAAAAAATAGTATAAACTCCTCACTGACGGTAGTTTGGA AGCTGCATTGTTTGGATGTGATGTTTCAGTGCCACACACGTTAGCGGTGGGAACTGGAAGCCAGTCACGAATCGGCT ATCTGCTTCAGGGATCTGGCTTTGCACTCCTGCCCCTGCCCCTGAAGTGGCTCTAGGGACAGCTGTGGTTTGAGTGG ACTCTTGCTCCTTCCTGACCTCTTAATGGCCACATGGACCCCCTTGCTTATCTTTGAGAGCAGGGCCTTGATGGAAA TGCAAATGTGTTTCTCTTTGGTAACCCAGATACCAAAACCAAGTGCAGTCCTGGAAGGTGAAAAGAGTTTCCAAAGG AAAAATAAAAGACACATTTCTAGGAAGCATGGGAAAACCTTGGTGGCTTTGTCCTCTGGTGACAGCAGCCTGGGGGA GGTGGAGTAGCTGGGATGCCCCCAGCTTTCGCCTCCCCTGGGCTCTATCCTGCATGTTCTTGGTCCATAGCCCTCTG TGGGCCATATCTTTCCAGCATCAGTACCTGTTGGGGTCCGTGCTAGGAACACAGCAGTGAGAGATGAAGATGTGGCC TCCCTGACCGCCTGGAGTCCACAGTGCAGGGGAGGAGGGTGACTTTCAACAACTAATGAACAAAGCGTGGCTCAGTC GTAGCTGAGAGAGGCACTGCCCAGGAGAAGTATGAGGCATCGTGGGAGCATTTATCAGAGTCAGAGGAGGCTTCTTT GAGAGGTAGCTTTTAAATGAGATCTGAACCACGTGGAACAAGTAAGAGCTCACGAGTGCCTGTGAAGAAGGACCCCA CCTTGCACTTGGGGGACCCGAGGAGGACCTGTGTGCTTGCCGTGCAAAGCAGCAGGACAGAGGACCCAGCTGAGGGC CAGGCGGGAGCAAGGGCCCAGCACACTGGGAGGTTTGAGAGGGTGTCAGGAGGCCATTTGGATGGAGAAGCCACGGG CAACCAGAGGAGTTTCGTCTCGAGTCCTCACCCTGGCTGTAGTGTGGTGAGCACATTGGATTTGGAGAGGTTAGGCA GATGCAGGCAGGCCAGTTACTGGACCATCATGGTGGTCTAGGCAGGGAATGACTGGGTTTAGACTAGTAGAAGGATG ACAGCAGTGACGTCTGTAAGTGGACAGATTGCCGGAAGAGTTAGGAGTGAAAACGAGGACTTTGTGATTAAATAGGG CCAAAGAGGAGGATAAGGCAGGCGTGGGCCCGTGTTGCTGGCATGTGTGACTAGCAGGAGGGGAGTCCCCATCAGAA GGGGAAACAGAGCAGGAAGCCAGGAGTGGCGGGAACAACGCTTCAACCTTGGGCCTGCTCTTGTTGAGGTCCAGGGA ACCAGTGGGTCGGATCCGTGAGCATGCAGGCATGGAGCTCAGAGAAGCAGCATGTGTCAGAGATATGGCCTGAGAGC CACACACCCACTGCTGCTGCTGTGATCTCCTTGGGTGAGAGCATCAGGGAGAAGAGAGAAAGACCCAGTAGGTGGTG TCGCCAAGGGAGCAGGCCGTGGTGACAGAGGCTGGTGGAACCATCGGGAAAAAGGGTGCCAGAGCCCATTTCCCTGT GGCAGCCACCACCCCCTCCTCACAACACCCACCAGGTCCCTTTTCCTTAAATCAAAACCTGGTGGATTTCAGGGGCA GGCGCTGCTCAGTTGTGGCCTCTGCAAGGTCCCGGCCATGTGTCACCATTGAGTAGCTGCTACCTGGCACTGCGCCG GGCTCTCATGAGCACATGTGAGTGAGGGAGGGAAGGGGCTCCATTGGCTGAGCAGGGTGCACCCTACCTCTCCTGTA ACTCCCAGGAGTGGCCGTCCCACACCCAGATGGGGAGTCGGGGTGAAGCCACCATCCTGTGCGTGAATCAATGGAAG GCAAGGCTGGACTCACCCCCGCCTTTCCCCAGGGCATTGGGCCGGATGTTACTGAGCCTCCTTCACTTCCTCTTCCC TGTGGCCGCCCCCCGACCTTCATTTCCTTGGTAATGGGACACTTTGGCCGCTGTCATGGTTGGCCAGGCTCGGTGTG GGCGGCACCCACCAGTTCCTTCTGTGAACATACAGGTTGATGGCAACAGCGCTGGGGCCATGGGGATGACTGCGGGG AGAAGGGCTCATGGCAGAGCAAGCGCAGTGGACCCTCTCCCTCTGGCCAGTGTTCTTCTGTGAAGAGGTGCATCTCT GCGTCTCTGCGGCGTACTCTGCGAGGGTCCCTGTGGAAGTGGCTGAGATCAGCAAGACGACGTGTTTGCAGGGGTTG GGCCACACCAGGCTCTGCACGTGACATGGAGCCTGCAGCTGGAAGAACAGTCTGTTTAATAAAAAATAACCATTTGA TAATTATAATCACTTTTAAATTGATAAATGGATTCTTTTAAATAAAAGAAACCATTAAGAATGATTGTTCTGCAGAA AAAGCACATGAGGAAATGAAATTTTCTATCTCATTGGGAATTTCTTGGTAAATATGCAAGCAGATACATACATTACA TTTAGATTTTAGAAGTAAAATGACCTCATATACTTTACTTTTTTAGCACAGAGAATTCTGTATAGCATAAAGCAGTA AATCACAGATACTGGGCATTATGAGTGTATTTTTCTTTTGGAAAAAAAAACATTGAAAAAGCAGAGTTATTAATTGG AGTCCTCAAGGTCCTTATTTCAGTAAATCTGAAATGGTGACCATCTTACCCATAGCTAAGTTGGGATGCCAAAGCCA TTTCCACCATCAGCGTGCTAGTAGTAACCATCCAGGGGCAAAGCGGCTGATTCTGCAGCCTGGGCATGTGGTATGTG GGTGTCTCTGATGGGCCAAGGGAAATGACAGGCCCTTGTGCTGAAGACTGATAGGAGTTGATTTACATGAAACACAT GTGTTTTTTTTTTAAAGACAATTTTAATGCACATATTTTCATTTTCAGCTTTATAGTGTTTTATGTCTTTTGCCTTT GTGATTTAAATTGTCTTATATTATTTATAAGCATTTTCTATTATTTATAATTATTTTTAATGATTTTATGTAATACC ATTTTATTTCTAGCTTGACCTGAGTTGGCCTATGCTAACACATTTAAGCTTTCCTAATTCCCAAGGTTACCATAAAT CAGCAGGTCCCTAACTTCTGTATTCATCTCTGCCCTGTAGAGAATAGCCAACCTCAGGTTTTCGCAGCCATGCCTCA TCTCTCTGTTTCTCTAAAGGGAAGCCATAGCAGGTGCCTGGGTAATGTCCAGATCTGAAAAATCCCATGTAACCTGG AGTTGAGGGCCTGTCTTTCACCCAGTCTGTTTGTAAGCAGTGCCTCTGCCCCCACCATGTCCCCACCTGACAGGCCA GCTCAACACCTGCCTGCCTCCTCGTCCCTGCTCTAACACTAGTCAGGGCGCACAGCCCAGCGAAGTGCTCTGTCTGC TGGGAGGAGGTACTGGCTGTGATCGGACTGCCCCCCACAAAGCCCTGAGCAGGTGAAGGGTGTGGGCCAGCCGGGGG CGAAGGAACAGGTCACCGAGGCCACTGCCAGCACCACCAAGAATCAGGCCAGGTTCCGGGGGCATCTCTGTCCCCAC CAGCAGCACTGCCCTTCAGCTTTTTGATGAGGCCGGTTGTTGGCCATAAGAGGAGCGGTGATAAGTTTAGATTGTTT TGGTGTCTGTAGGTCATTACTGGAATTACACCAGCCAGCCATGAGGTCATAAAGTTACCTTGACAGATTGTGAATGC CGAGTCCACAGTAACTCTGGAGGGCTGCCTGGCATCGTCCTTCATCATTGTCCAGAAACGCTCCTCTCGGGAAGGCT GGGCGTAAAACTGAAAAGAGGAGGCTCAAGGAAAGAACGCCTCGGTGGCTCCATGCAGGAAACATTATTTCTGATTT CAAGCTGGAGAGAGAAAGGACTTTGGGGCCCCTGTTTTGGAGGCCTGGAGTGATGAGTACTGTGTCTCCAAGCTCAG AATGAAGCCACCAGTGGTGGCTGCCTTTGTTTCTGCACTTTCAGTTCCTGCAGGTGCAGGAGCTTGCCAGGGCTGCT GTCAGGGACACTTTTCCAGGCCCCGCTGCCCTGGCTGGGTTTCCTTCTCTGAGCAGGAACAAGTGCCCGATGCTGTT GCTGGTGCAGATTGGAGGGCTGCCAGGGCTGGGTGACTCCCTGCCGCATTTTGCCAAGCTTGTGTAGCTGCTTCTGC CTCTTGGAGGGGCTGTGTTAGAAAGCATGCATCACCTCCAGTTACCTCAGGCAGCAGGAAAGACTTTTAACCTACTA AACAAGCGTCTTCCCTGGGAAAATACATCCTTTGGTTGAGACTGTAGGAGACACACTGTAAGTTATTTATCTTGAAC CCTAAACTGCATGTAAAAAATGTAACCAAACCCTCAGTGCCTGGGGCGAAATCCACTCCCTAATGTTTTAATGACAC AGGATCCACTATGCTACGTGTGCACCGGGTGTAGACTTGGTCCAGTGCATGTGGTGCTAAGCCATAAGGGACTGTTA GGAAGAGCCGGGCATGGTGGCTCATGCCTGTGGTCCCAGCACTTTGGGAGGCCGAGGTGGGTAGATCACTTGAAGTC GGGAGTTCGAGACCAGTCCCGGCCAACATGGCAAAACCCTGTCTCTACTAAAAATACAAAAACTCGCCGAGCGTGGT GGTGCACACCTGTAATCCCAGCTACTCGGGAGGCTGAGGTGGGAGGATCGCTTGAACCCAGGAGGCAGAGGTTGCAG TGAGCCAAGATCATGCCATTGCTCTCCAGCCTGGATGACAGACTGAGACTCCATCTCAAAAAAAAAAAAAAGAATCG TGATATTCTTGATAGGAAGTAAATGTTAGTCATAGGATTACAAGATTTTATTCTAAGCTCTTACAAGCAAGCAGTTC AGATTAATGTGTTTTCTTAGAAAACTTGATTTGATTAAATTTCATACTTTTTATCTATTCCCCAAAATTTATGCGGT CCTTGTGTGCTTGAGGGTTCTAGGAACAAAGTGATTGGGGAAACACCGGTCCCCTCTGCTGTGGGACCCTGCGGGCT TCCAGAACTGGCGTGAGGTCCGAGTCGCTGTGGGACCCTGCGGGCTTCCACAACTGGCATGAGGTCTGAGTCCCGGT GTTTCACAATATTACTTGACCAAAGAGCGTTTTTTTCACAAACACATGAGGCAGCCCATGTGACTCCAGGGACCCGC AAAGCACAGCTTGAGAAATGTTGGTATGTTTCAATGGAAATGTATGTAATTAAGAATATTAGTACAATATTTATTAA AAGTTTCTGTCTTGAATGAAGTAATAGGATATCCTTTAGGAAGCCTGATGTCGGGACGTGCTGTGGGGTATTTTTAT GTTAGGTGTTAACATTCAGCAAACAAATCCAGGCTCTACTTTTATCCTTTAATGAAAGATTTTATTTTTTATTCAGC ATTGGTGCATTGAGGACTTACAGCCATCTTATCTTACCTCGATGCCATTGAAACAAAAAAATTAGTCATAGAAAACA AACCTAATGCCTTCCTTTGCAAGTTCCAGTCAGAAGTGTCGCATATACCAGACAACACATCATTTTTATAGTTATAG AGAGAACTCCTATGTACTTCATGGGAATACAAAAATGTCACAAAATTAAAAGGAATTTTTCCAAAATTACTGTGACT GAACAGATCATTCCACGCTCCGTTATACCATTCTGATCCTAATCCCATAGTTTAAGTGTAGAGGCTGGAAAATGTCT TCGATTTAGAAAGGAAAGACAGGCGAGTGCTGTACAATGGTGCAATTCAGTGGCCAACGAGCCCAGCAGTCGCAGAC CCCATACATTCCTCTCGTTCATATCCTATCGATTTGTGACAGCGATCACATGCTATTGTAGTACAAGGAAGAGGTTT TTTTAACCGACTGTATGACTTGTAGACTTTTCTGTGAATTTTCATTAAGGTTGGTGAATTGTACAAGCTGAGGAAAG CCAAGACAAGCTAGTTAAAATCTCCTGGCACACAGGTCAGCCTGAGTTCAGATTTTATTTCGCGGGCATGATTTTGG GGATCCCGTGCTAGATTGTAGTTGTGTTGTAATAAAGCCCCCTTTCCAGCGCTGCAGTGGGTTGTGGAAATTGTTGA GAGGAGAAACCACCTTCTCCTAGGCATCTGTATTTGGTTACCCGCCAGCACTGAGACATGCAGGCATGGAAAGGCAG ACTCAGGAAGGTTCAGGAATTCTACCGACTTTGGAGCATGCTCTCCCCCGGATCTGAAACACTGGCCCCCGTCTTAT CCACCCACCACTCCTTAAGACATCCAGGCGTGGAAGGGAAGATTCAGGAAGGTTCAGGAATTCTACCGACTTTGGAG CATGCTCTCCCCTGGATCTGAAACACTGGCCCCCGCCTTCTCCGCCTCCCGCTCCTTTAACCAGTCGTCAGGTATTT CCTCAGGTACCCGCTCTGGGAAGCCTTCCCTGACCCTCCTTTGCCCCCGTGGGGACGTGGCTGCTGCTTCCCCCGTG TGCCTGTGGCCCCTTGTGCCCAGCGCCATCGCCACTCCGTGAGGGTAGATGTGGGTGCCGGCCGTGTCTGATGCCTC CCCACAGGGGCCTTGGGCACGCTGTGTGGACGCTGCCTGTGCGTGCTTCCTGAGCGACCCCATCAGTAAAGCGTCGC CACCATGCAATGCTGCTGGCAGTCCTTGTACTGAGACAATGTGGTAGCTGCCATCCTGAATTTCCCTCTGAAACTGC TCCCACCACCAGTGCTGCCTGTGCTGTGGCCCTGCTTTGTGTCCTGTGGCCTAACACTGGAGCGCCGGCTGCTACCT GTCTGTCTCCTGTGCTGGACAGGAAGCACCATGCAGGCGGCGTTGTCGTCCGATGGTCTCCACCTGTGGCCGTAGCA CCGGGTGCGCTGTGGACTGGGACACTTCCATGTCACTCCACACGTGTGCCCCGCTGTGGCACTGTAAATATTCATTT GAGCTGGTAAGGAAAATGACATTTTAAATGCCATGATGATATATAGTGTATTTCTCATGTGAATCACGTTTTCCTTA GTATGGCTCAGCAGCACGCCATGTTTCCGTCCCATAGAGACCATGCTTCCTGTGGGGACGCCCATGGTCCTGGCTAC CTCTGCTGAAAGACGGCCAAGGTGACTCTTCAGCTATAAGAGAGATCACTCATCCTGGAAACTTGTCAGAGCAGGAG AATTCCAGAAGGATCAATATTTTTAAAAAATTCTGTTCCTAAACTTTTGCTCTGCAAAAGGTCTTGTAAAAAGAGAA CAGAGACAAGTCAGCCCAGGAGAAAATACCATTGACCTTTGAACAACACAGACTTGAACTCTGTGGGTCCACTTACA TGTGGATTTTTTTCAACCAAATGTGGATGGAAATATAGTGTTCACAGGATATGAAAACCGTGTATATGGAGGGCCAG CTTTTCATATACACAGAATCTACAGGGCTGATTGTAGGACTTGTGTAGGTGCAGATTTTTGTATCCATGAAATCCTG GAGGCACTCACCAGCATATACCGAGGAACAACTGTATTTGCAAATCCCATATCTGACAGAGGAGTTGTATTCAGAAC ATGAAACCAACTCTCTAAACTCAAAAATAAGAAAATAAACATTCCAGCTAGAAATTGGACAAACAATCTGAACAGAG ACTTCATCCAAGAGGAGATACGTAGGACCATAAGCACAGGAAACAATGTTTATTGTTAGCCAACAGAGAAATGCAAA TCAGAGCCTCAGTGAGGTTCCACGCAGAGACCACACACTCCTACAGCCACTCGGAGACCACGTGGCCACTTCCCAGA AAGTTAAGCATCTGTTTCCACAGGAACCGGAAGTTGTACTTCTGCTCTTGTATCCTAAAGAAAGGAAAACTTATGTC CACACAAAAACTGTACACAAGTGTCCATGTCAACTTTATTTGTAGTGACCCCCAAATTGGAAGCAATTCAGATGTCC TTCCAAAGATGAAAGAAAAAGCAAACTGTGGTCTATCCATACAATGGAATACTTATGAAAACAGAATAAAAAGCAGC CAACTATTGATACACGGTACAATTTGGATGGATCTAAAGGGCATTAGGTGGAGTAAAGGAAGCTAATCCTAAAAGAT AGGATTTTTTTTGTATGTAACACTCTTGAAATGACAAGCAGTGATGGGGAAGAGATAAGGGTTAACAGAGACTGGGG ACAGATGACTTCGTAGGTGTAGCCTGACAGGTGTCTTTGTGATGAGACAGTTCAGTATCCTGTCTGGGGTTTTGTGC ATGTAAATCTAAACACATTATAAAATTTCATTTTAAAACATAATTTTTAAAAGTCCATTAAAAATAAAAATACATAA GAATTTAAAATGTTTGTAAAAACTGGTGACATCAAATAAGATAGGTAGTTTAGTTAGATGTATTGTATCAATGCCAG CTTCCTGGTTTTGGTAACGCATGATTATGTAGAAAGTTAAGCTGAATGAAGGTGCCTGGGAACTGTCACTAATATTT TTCTTGTGAATCTTCAATTTCAAACTATAAAGTTTAAAAAAATTTGTGCCTTTTACATACCAGTTTTTTGTTGTTTT TGAGACGGAGTTTCACTCTGTCACTCAGGCTGGAGTGCAGTGGCGCAGTCTTGGCTCATTGCAAACTTCATCTCCCG GGTTCAAGCGATTCTCCTGCCTCAGCCTCCCAAGTAGCTGGGATTATAGGCGCACGCCACCATGTCCGGCTAATTTT CATATTTTTGGTACAGATGGGGTTTCACCATGTTGGCCAGGCTGGCCTCAAACTCCTGACCTCAAGTGATCCACCAG CCTCGGCCTCCCTAAGTGCCGGGATTACAGGCGTGAGCCACCACGCCCAGCCCATACCCATTTTTAAAAAGAGAAAA TGGACAAGAGAGCAGGGAATGGCGTTGGCTTTGCTGCTGTGAGTCTTGGAAAACCCATTTCCAGTGCAAGTGCCTGC GTAGGAGTACGGGGGCAGCATTCTTGTAATGAAAGTGAGCCCTAAAGCCAAAAGGTGATATTCCCCCTGAAATTTAG GAAAGAAAGGAAACTCTTAGGCTGGAAAAATGTGGCTGAACTTGATACTGTTCATTTGATGGTTCTTTGATTAGCCT CATTACCTAGTATTTGAACAACATAAAAAATTGGTTAAGAATAGCCAAAGAGAAAATGCCCGGGTGAGTGCTAGGCG TCCATACACATGGCAGCTTTTAACAACGTGCAGCCATGAAATATGGAAAACTTCCTGACGTTGATCACAGTTGAAAC TTCATACTTTCTTAATTCAGCCTCTTATTGACAGTAATATATTTTAACTCAAGAATGTGTTCATTCAGTGTATATTG ACTTGGCTTGTTGAAATGTTCACAGTACATGTGAACACTGGGTTTCCTGTCATGATGACTTAAGACAGGAGGACAGC AGTGAGTGATTCCTGCCAGTCAAGGAACTTTCCCTGGAACCCCACTTGAATGGTAATAATCTGCTCCTATAATTGCT GTGGAAAAGGAAAGCCCTCTGGAGATTTTACATCTAATCATTTATTTATAAATCTGTAGATGGCAGTCTGCAGAAGA TGTGTCAGGGGTCAACTTTGTGCTCAAAACAGTTGCCTGATGTTTACATTTCACAGTGTATTTTTTTAACAGTACCT CCAGCCCCCATCATCACAAAAGGACCCTGGCTTGCTGGTAGCTGCTCCCCACTCATCCCACAGCCCAGACACTTCAT TACAGATGCCTCGGCAGAGGCTGGTCCCCTCTGTATTTGCTGAAATATGCATGTTTTTCCATCTCATTAATTCAGTC TACATACAATTAATTTTTGCCTATTAATAAACCCCTTGGTGTTAGCGACAGCTATCTAAACCACTTCACCTAGTGTG GAATGAGCAAGTGTACTTGCAAATTTCCATCCCTGGTCTGCATTTTTTAGTGTTGTATTTGTGGGTTGGAGAGTTTG GGTGCATAAATCAAGCATTGTGAAGAAATATAACTGCCGAAGACTCTGGGTTCAGACTGGCTGATGGGAAGTTTGAA ATACGAATTAGTTCCACATTAATTGGGGATAGAGGGAGATGCAGGGGGGCCATCCCAGCACGTGGTAGTCAGGGAGG GTCTCTGGCTATGGGAAAATTTGTCAGCCTTGTATGTGCGTGAGACCAACTTTCTTTTTCCACAAATACAAATCCTC TCCAAATTGGACACTTCTCAAAAGATATCTTTTCTGTGTGTTTTCAAATCTCATAATTTCTTAAACATCTAATAAAG TCTGTGAATACACGTAAGTGATTGTGTATGTGGTAACTACACCAGCCAACAGCATTGAAAGGAAAAAGGAAGAAAAC ACAAAAATCAGAATGGAGCCTTGAAGTTGAGATGAGCACCACCTAGCTCATTTAGAGACATCCACAGGAAAGGAGGT TCCCCAAGACTTTTGTTATGCTCCAAAGCCCTGAGACAGATCCATGTCACAAGGACACCTTTCTCATGGTTCAACAT CACCAGCCAGGAGGAAATGCAGAATTCTGTATAAATGTTAGGAATTCTTAGATTTCTCACCTGGATTTGTAAAAATT GCAGTTCATGGCGAGAGACATCCGGGAGATCCAAATGCCATCCTCCTAGAACTTGCTGGAGGAACCAGATTCTTTCT AAGCGATTTGCATCTTGATGTGATGCTACAGTTCTATGACAGGCCCGAGTAGCTGATGAAATTCTACGTGGGAAAAG CTTTTGAGTGCCTGTCCTGGTAAACCTGTGACAGTGGCATCACATAAAGGTTTCCAGAATGTTCTGTGAGGAGATTG AGCCAATGTCGTTGGTCAGCTTAATTGGAAGCAGGTGATTGAAAGTCAGATAAACATGCAAGATTTGCTGATTTTTA AATATGCCATATGTGTCAAATGTATGAATTGTGATGATGGACAAGAACACTTTCGCAGCTTTAATGGGAGCATGTAA TGACTTGAACAAGACTGCTTAGTTTTGGTTACTGATGATCAAGTACAGAATCTTGCTGGTGTCTCCAAAACTTCCTG CCTGGCCTGGGCAGCTGTCCTGGCTCCCTCTGGCCAGTTCTCTGCCAGGCAGCCAGTGTGAATCTGGAAGGGGCTAG TCCTGTCTTCCCCTCCCTGTCTAGTGCCTTTAACGTCTCCGCTGAGCCTGCCACCTCCTGGCCTCCTCGACCCTCCA CCTCCCCGAGCCGTGGAGGTGAGTCCTAGACCTTCTTCTGTGGGCTCCTCTCCCCGGGGCCCTTTCGGCTCAGCCCC ACTTCTCTTATTCACCCACTTGTGTTCTCTGTAGCTAAATGATACATAACAGGAACTCGTTAAGTAGCTTGTGCAGT GAATGAGTTAATCCTAGGTGTTTTCAGAACAGTGAATTTCAGGTTCCTGACTCCGCTTTGAGCTCATTCAAAGAAAG TCATGTAAATAAGACCTAATCATTGCAAGAAGTCTAATGAAGAAACCATTCATTATCTCTGGAGATGGGCAGGTACA CCTCACAGAAAGTGAAGTCTGTTGCTGATGAATAGTCTGCATGCCCACATCTTCCTCTGGGTTTCTAAGTAATTGAA TAAGAAACGTTTCTATTTATATTCTTATTTATGTGCAACTGTATTTAATTATTCCCTAGTTTTGAGGATTGGCCAAT AAACCTTTTCTTCCCTTTTGCCATTGATTATTCTTAAGTTTAAGACAATGCCCAGTGGCAGATGTGCTTAACCGCCA TCCTTCATCTAGTTCATGTGACTTTTTAATGTCAATTATAAAGAAAATTACTCCTTTGGCTTCAGAAGTTTATTTAA ATCTCTTCTGAGAAAATTGGCAGCTCTTCGGAGTTAATGTCCAGAGCAGCAGAAACAGAAACTGGAGGGCACAGACT GGTGGATATGTGAACAGAAGCACTTTTTTTAAACAAAGTTAAAAAAAAAATGTTATGCTATTGCTAATAAATTGAGT CAGGGGAAAGAAAAAAAAAAGAGATCCCTAAATCAGCTTCCAAGCTGCCATTAAGATGGGCAAGTAAGATAATTCCA CATAAATAAGACCAGAGGCCTTGTCTCTGTTTTTATTTATGTATTTATTTTATTATTTTTTTGAGACAGAGTCTCGC TTTGTTGCCCAGGCTGGAGTACAGTGGTGTGATCTCCTCTCACTGCAACCTCTGCCTCCCGGGTTCAAGGGATTCCC CTACCTTAGCCTCCCAAGTAGCTAGGATTACAGGCGCCCACCACCACATCCGACTAATTTTTGTATTTTTGGTAGAA ATGGGGTTTTCTGCTGCTCTCAAACTCCTGACCTCAAGTGATCCACCCACCTGGGCCTCCCAAAGTGCTGGGATTAT AGACATGTGCCACCGTGCCCGGCCTGCCAGGGCTGTTTTTAAATGAGGATTTCTCCATTTAAGGAGGTCACCTGTCC TGGACGGTATTTCCTAAATGCCTGGCATAGGTGACATCATGCGAACAAGTGATGGTTCAGAATACAGAAGTCATGAG TTTGAAGGCTGTGATAGAGGAAGGCCGGGAGAGAAGTGAGAACAGAACGTGCTTGCCCTGGGCCTGCAGCTGTTGCC AGCATCTTCTGTCAGCTGATCTGGGCAGGGCGTGGGGGTTCTTCTCAGGCCTACCTCCTAAGAACAAAAACATGACT GACCACGAGCCTGTCCTCAGGATGCAGCCTCCATCCTTGGTGGGCACAGCTGAGAGAGGAAGTTCTGAGCTGCTTTG GGGTAGGGCTCTGTTGCACTCACCCTCCCATCTCCTTAGTCGCTGCAACCCTGTGTCACAAATAGTAGGTTCTCAGC AAGTGTGCTGAACCAAGGGGTAAGAACAACGTTTTTATTTTTTTATTTAATTTATTTTTATTTTTTGTTTTTACATT TATTTTTTAATCCATTTGGAATTTTTCTTTTTGAGATATATATAATAGGGATGAACTTTTATTTCATTTTTCTAGAC AGGTGTACAGTTACCTTAGGTACATATATTGAATTGTTATGTCTCACCAATGCACCACAACGTAGCAGTCTCTCATA GCCCGACGTATCACCCAAAGTTCTTTGTCTCACGACCAAGAAAGTTAAGGAGCGCCGACGCCAAGGGTATCACTGGA CTGAAAATTTAATAAGCAAAAGAAGAAAGCTCTCTGGTGCACAGGGGGGACCCAGAAGAGGGTTGCTGTTTTTACAG TTGAATGCAAAGGCTTTTATAGGAAACTGATGAGAGCTGGGCATCTTATTTGCATACGGTGCAAATCTGTGGTAGCT CCACCCCGTCCTCCTAGTGCACACGTAGGCCCTTAGCTTGAGTTACTCCATATTGCTTTGTTTCCCTTACTGTGCAT GTGTCAGGGGACAAAATTTTTCATTGTGGGCATGTCTGGGAAACTCACATGTGTAGCCCTTTTTTTTTTTTTTTATA CTTTAAGTTCTAGGGTACATGTGCACAACGTGCAGGTTTGTTACGTATGTATACATGTGCCATGTTGGTGTGCTGCA CCCATTAACTCATCACTTACATTAGGTATATCTCCTAATGCTATCCCTCCCCCAGCCCCCCACCCCACAACAGGCCC TGGTGTGTGATGTTCCCCTTCCTGTGTCCAAGTGTTCTCATTGTTCAGTTCCCACCTATGAGTGAGAACACATGGTG TTTGGTTTTCTGTCCTTGCAATAGTTTGCTGAGAATGATGGTTTCCAGCTTCATCCATGTCCCTATAAAAGACATGA ACTCATCATTTTTTATGGCTGCATAGTATTCCATGGTGTATATGTGCCACATTTTCTTAATCCAGTCTATCATGGAT GGACATTTGGCTTGGTCTTTGCTATTGTGAATAGTGCCACAGTAAACATACGTGTGCATGTGCCTTTATAGCAGCAT GATTTATAATCCTTGGGGTATATGTCCAGTAATGGGTTGGCTGGGCCAAATGGTATTTCTAGTTCTAGATCCTTGAG GAATCGCCACACTGACTTCCACAATGGTTGAACTAGTTTACAGTCCCACCAACAGTATTAAAGTGTTCCTATTTCTC CACATCCTCTCCAGCACCTGTTGTTTCCTGGCTTTTTAATGATCGCCATTCTAACTGGTGTGAGATGGTATCTCATT GTGGTTTTGATTTGCATTTCTCTGATGGCCAGTGATGGTGAGCATTTTTTCATGTGTCTGTTGGCTGCGTAAATGTC TTCTTTTGAGAAGTCTCTGTTCATATCCTTCACCCACTTTTTGATGGTGTTGTTTGATTTTTTTCTTGTAAATGTGT TTAAATTCTTTGTAGATCCTGGATATTAGCCCTTTGTCAGATGGGTAGATTGCAAAAATTTTCTCCCATTCTGTAGG TCGCCTGTTCCCTCTGATGGTAGTTTATTTTGATGTGCAGAAGCTCTTTAGTTTAAAGACTTCATGTCTAAAACACC AAAAGCAATGGCAACAAAAGCCAAAATTGACAAATGGTATCTAATTAAACTAAAGAACAACGTTTTTATTCTGTATC ATCAAGGAGGGAACCCAGCACGCCTCTATCCTTTTAAGAGACACGGCAAGCATCAGACCTGAGGGACATCATCATTT CCTTGCAGCTCAGAATGCACTTAAGTGTCATGTAGTGGGTTTTCTGTTTATGGGTTTGTTTTTTTTTTAGAAAATGT GTTCTTTTCTATCTTTTGTTTGTTTTTGAGACAGGGTCTCGCTGTGTCACCCAGGCTGGATGGAGTACAGTGGCAAG ATCTCAGCTCACTGCAACCTCAGCCTCCTGGGTAGCTGAGACTACAGGTGTGCACCACCACGCCCAGCTAATTTTTG TATTTTTTGTAGAGATGGGGTTTAGCCACTTTGCCCAGGTTTGTCTCAAATTCCTGGACTCAAGTTGTCCACCTGCC CCAGCCTCCAAAGTGCTGGGATTACAGGTGTGTGCCACTGCGCCCAGCCCAACCCTGTCCTTTGTTTCTTACAATAT TCAACAGTCAGTCACTTCTAGCTTTCACTTTGTCCCATAAAAATATTTCATTGAAAATTGCAAGCCATGGCAGTTTG CAGTGTTTCTAAGCTGAGGAGTTCAGCTCCACACCCAACAGAGCTCCAGCTTCTGGTTTGATTCTTAGAGATAGGAG TGACTTTTTTCAATCATGTACATCATAATTAGGAGGAAGGCATTCAGTCTTGAACATGGGGACAAAAAAGTGCTGGA GATAGTAGCTTGAGAGTTGCAAATATTTATTTTGATTCTGACTTTAATTCTTAAAAATGTTTGTCAAGAAGACAGTG GTGTGATGGAGCAGGTCCTTCGGTTACCACAAGCACACACCCTTTCTCTGTAGTCTTATAGCTTGTTTTCTTGGTCG ATTGTGCCAGCTCTTATAAAAATATTATGCTCCCAGGCAAAGGGCCATTTCTGTTGGAATTGTTGAGAAGATTCTTG GCTTAACTCTTGATCCAACTCTGATCAGCTTGGCCAAGACTAGACTTGACAAGTTTGCTCTGAATTGCCTCATGCTG CTGTGTGGGGTTTCAAATCATTGGCTTCCCAGTGCTTTCTGGGCTAGACCAACAAAACAATGCCTGGGAAAAGAGAG ATGATAGGCCGTGATAAAACTAAAACTGCGTAATACTGGAATTAACTGAGTTGGCCATGTAGATGGCAAGATATTAA AATTGAGTCCTTGTGTGCCAAAGTCGTAAACTCATTCAGATAGGCCCTAGGTCTGTGAATGTTTGTTGTTGAATCCT AGGCTCTGGGTGGAACCGAAAGCTGAAAAACATGAAATTCCCCCTCTGTCCTTTGGATCTTATTCAGACAGTCATTT CCTAGCTATTTCAAGTTTTGATCAAAACAGACACGCAGTAGAAGCCCAGTCTAAAACATCGGTAGTTTATATCACAT ATTTACTTCCATGTGTCTTAAGTGGTTAAGTTGTAGAATTATGTCTTTTAGAGAATGGATGAAGAAGTCTAGGAGTA CAATAGGCAAGAGAATATAGCAAAGTAGTTATATTTTGTCAATTTTAAAGTAAATTCTGAATCATTTTAAGTATATT CAGTAACACCCGTTTGCCCCCACCTTCCTTCCTTTGAGGTTTTCACTTATTCACTCATTAATAATTCATCAGTCTTT GCTGTTTGTGGCATGAGTATGTACAAAAGGCACTGCGGCGTCCATTGCTGTGAGTAATATAGAGATGTCCAAAGGTG TGGCTTTACCTGTGGAAACCACAGGACCATACCCAGAGCATTTGGAGGTGCCATATGCTGCTTAAGGGTGGCACATG GAGGGGAGGCTGGGCTGCACGCATGCTGGTCCTGAGGTGACCCTCTGGCCGCAGGAGAGCTGGAAAGGTGCCAGCCG TGGGTGCCATGCACTTGTCTGAGGCCAGGATGGGGAGACCACATTCCAGGTACAGGGATAAGAGGAGGAAAGTCCCA GGAGTGGGAAGGCCTGGGGGAAAAGGGGAGAAGGTCAGGGGGAGGCAAGTTGGCCAGATCGGCTGGAGCTTGGGATT CAGCCAGGACAGAGCCTGAGCCCCAGGCCAGACTGCAGGGCTGTGCCCAGCACTGGATGCAGAGTTTGGATCTGATT CTGAGTATGTGGTGATGACTCGGGGAGGCTTGTGAGCAGGATGGTGACAACCAGGCAGGATTTTAGGAAGGTTTGTC TGGTTTTGGCAGGTTCTCTGGATGTGACTGGAGTGTGAAGAGGCCAGTTTAGAGGCTCTGGAGGTTGTTCAGAAGTG GCAACAAAAGGGAATGGAAATAAGAGATGTTGCAAAGCAGAAACCAACTGACATGGAGTGCGGGAGAACTTGAAGGC AGCAGTGGGAACTGGGAGCTGTTCCCGGCGTGGGGAGAAGGCTGACGTTGATGTTGCCTAAGGAGTTAGAGGTGATG ACCAGGTTCCAGGTGGCTGATCTGGATAGGCAGCTGCATGGGGCAGGAGCCCCAGTGTGGCACAGCTGTGTCTGTCC CCTGCCGGTCCTCAGAAAGTGACACCTAACACTGTCCCAGTCCACACAGAGCCTTGTCCAGTAGTCAGGGTGAGGTG AGTGGAAGCAAGAAGAGGAGCTGGCAACAGGACTTGGGAGAGGCGGAGAGCACAGCAGGCAGCTGGGCCCAGACGTC AGCCCCAGGCAGTGTCCTGAAGCAGCGTGTGCACCTGGGCAGTGCAGGCATCGCGAGTAAGAAGAGGGTGTTAGCTC GGATAACTGGGGCTCCTGAGCAGCCTTCAAGAGGACAGGTTCCTTGGGGCTGTGGGTTTCAAATAACATCATGGAGG AGGGAGCAGAGAGGCTTGAAAATAAACGGCGGTGGCCGGGGGGAGCACAAAGAAGCCAGGCCTGGCAGTGGCACAGG TGTCAGGGGTTTCATGAAGGAGGGGCCCGGGAGTGTGCCTGCCACATGGACACTGGAGCGAAGGTGCACCCTGAGGC AGCCCACAGTGAGGAATTCAAACGCAGCTTCCTGGGCTGGATCCTGCAGGGCCTGAGTTCTCTGTTCCAGGGGCATC TTCATCTGAGGATTTGGGGTGTCCGTGCCCTCTCCTGGTTGAAAGTGTTAGAAGCCACGTTGGAGAGGCCACCACTC AGGTGCTAAAGTTAAAGCTCTAGAGTTTGGTGCCTGCCACTTAGCTGCATGGCCTTGGGAGTTATTCACTCCTCTGC ACTTTGGTTTTCTCGTTAATCAAACTGGAATCCAGATACTCACCTCCTACCTTGTTATGGGAACTAGACGTGGGCGG TGCACGTGGGGGCACCGAGCACAGTGCCCAGCACCCAGTGGGTGCTCAGGGGATGGCAGCTGCCATGATTTTTGGGA CTGAATGCTTTGATACCACCCAAATATATGGTCTGAGGTGGTTGTAAATAGAATTAGCAGAGGAGATGATACAGACT CAGAGTTGAATTAGGGTTTGAAGAAGGGCTTAGGTCTGGAGCGTTACAGGTGGGAGGACCAGCAGAGAGTGGTCAGG AATCAGGAATGACAGGACACACCTGGGGAGCCTGAGCGGCGGCTTCCAGGCAGGGAAGAAAAGCTCGGGGCAGTATG AGTCCAGACCAGGGGCCTATCAGGCGCCTTCTATGCAGGGTCAGGTGGTAAAGAATTATCTCAGCCTTAGTGGGCTA GAAGATCTCTGTCATAGCTATTCAGCTCCGTTGCTTTCTGAGTAAACAAATGGGCGTGGCTGTGTTCCAATGAAACT TTATTTACAAAAACAGATGGTGGGCCAGTTTGGTATGTGGAGGCATGTTGACTATGGACACCTTGAAAATCCCATGT GGCAACAGATATGAGCCAAGTGGTGACGTGGAATGCCCCATCGTTGAGGGATGGGGACGCAAGGGCAGCGAGGAGGT CCTGTGGGTCCGGGTGTGGCGTGGGCCCAGCGTGGCCATGGCATCTGGGGCCTCAGCTGCAGGGTTGCAGTGGAAGG AAGGGGAAAGAAGCTCAGAGTGCATTCTGAGGGTCAAACTGGCCTGTAAGTGACAAACTGAGGTCACTTCACATGTA CATGGAGGGAGACAGGCTGTCTTTGGAGCAGTGTCCATGCAAGCCTGCCTGGAGGGAGCTGCCACCCTCAGCTGCAG CCCCAGACCTCGCGGTTGCTCTCATCCGTCGTTCCCAGTGTGGGCAGTGACGCAGCACCACGGTAAGTTCTGTAGAG TGGACGCCACTCGCTGGCAAAGCCCAGCAGGGCAAGGAATAAGTGTCACTCAGTCTTTATCCAGAAAAATCCACCAA TGTACTTTTAGTGCAGTATTAACACATGGTAGAAAATGGAATTGCCTAGAGGATTTTAATCTCTGATGGATTATTCT TGTACCTGTACCTGTCTGATGGTCGTGTAAGTCCATGTTAACAAACCTGGGACCACAGGAAAGGAGAACTGATGCGA ATACAAACAGGTGGAGGATTTCCAGGCGTCAGTGGGGTCTGGGAGACTTTTCCAAGAAGTGTTTTCATTGCAGTTAA CATTTTTAAAGATGAATATCTCACTATTATAAAGGTCAATGCCACTTCTGTAATATTAATTTGCAATTGAAAGGTAT TTTCTTTTAAGAAGTCCCCTTTTTCAAGTTTCTCAAACTGGAATTTTCTTGAGCATCTAAGAATCCTTTCCTTTCAA AAGATCCCCAAGTTACCCCGGTCTAAGCTAAGAAGGGTTCAGCGTTGGCCGGAAGCATAACTCTAGCTCTCCAAGGC CTTGGGCTGCGGCAGGGTTTGCATGTCCAGGCAGTAGGTGGAGGCTTCTCTTGGTCAGTGTGTCTGCTCAGGGGGAG GCCTGGCTGGGGAAGCGGGTAGCAGTTTGGGACCAGAGCTTAAAAGAGAAGGAGAGACCGGTGCGGTGGCTCAGGCC TATAATCCCAGCACTTTGGGAGGATGGGGCAGGTAGATCACAAGGTCGGGAGTTCGAGACCAGACTGACCAACATGG TGAAACCCCATCTTTACTAAAGATACAAAAATTAGCAGGGTGTGGTGGCGCACGCCTATAATACCAGCTACTCAGGA GGCTGAGGCAGGAGAATCACTTGAACCCGAGAGGTGGAGGTTGCAGTGAGCCGACATCATGCCGCTGCACTGCAGCG TGGGCGACAGAGTGAGATTCCATCTAAAAAGAAAAAAAAAAAAAGTGAGACTTTGAAAGTGATGACAGTTTCCACAG TTCCCATGGGCAGGTGGCTCAGAATGAGGTGGCCTGAGGCCCACAGTCTGTCCTTGGGGACTGGGTGGCCCCCACGT CCAGGCAGCAGGGAGAGGACGTGCTGGCTGCCAAGATGGGGTGGGAGAAGCCCAGGGCATCAAGTGCCACGGAAATA AAGCTGGTTGCCTTAGTTGAATGGCGCCTTTGAGTTCCCAGAAGCTCTTCTCAGCGGGAGGCTCCCTGTCTTTCACC TCTGCTCTTCTGAGGTACCAGTTGAAGGGTTTGGGGGGTGAAATCAAGGCATAGGGCTCCTGGCAACACTACCCCTG GCTCCGGGGTTTGCATGCCGGGGCTTCTTCCTTGTCCTGGCTGTCAGAGAACACCTGGAAATAAATGCTGCATTGTT TTGCTGGAAAATCCTGACACCACCTCCTGCCTTCCCCTGGGAGGGCTGAGACCTGGCCTAGGCATGGAGCTTACGGT CCACAGACCTGCCTGCCTGCAGCATGACAGCCTCCCAGAGGGCTGTATTGATTTTTGAAGAGGAGGAAAAAGGCATA CAAAATTGGACTTGCCAGCCTTCTTTGAGTAGAAATTGGTGCTTCCTAAAGGGAATCTTAATTGGCTAGCTTCGAAG CTAAAATGTTTTCTCCCCCTTCCCTTCTCAGAACTCTCCAGCCCCCCTGTTTGTTCTTGTGAGACTTTTCCAAGCCC CAGTTACTTTTCTTTCCTGCTTTGGAACATAATTGGATTCTTCGCTGGGTAGAGTTTTGCTTGGAAGACCTGAGGGT GTAGCTGAACCAAGTTTGAGCACCCTGGAAGGAAGACAGAAGATGCCGGGAGACCAGCCAGCTCAAAGGAGAAAGGG AGGGGGACAGCATCTGAACTCTGGCCTCCAGCATGATTTCATCCTTTAAACTGAAAACCCTGAGTTTCAGTGCCAGC GACGACACTTGTTGAAAAAGTACAAATGTTTTCTGCTTCTTGTAATCTACTTCTTGCAAATATTAGTACTCTGGAAA AAAGATTTATTTTAATAATGTGAGTTTCAGATTTTTTTCTGTAGTTAACGTTGTTTTATTACTCTATATCCTTGCCA GAAAGCGTGTTTTAAGAGTTTCAATTCAAAATTAAATATGACCTCAGTGTTTTAAAATACAATTATATTAACTGTCC ATTTAATAGTTGCTGAGGATTTTTTTGGCCACTGATGGATAGTCAAGATACTTGTCTGAGATTAAATGCAGTATTCT CAACTCTGCTAACCAGCTAACTTGTTCCAGCTGCAGCAATCAACAGGAAAAACAAGGGCTTTCTATGAAGTGAGCTG GAGAAAGTTGTTCCCGGATAAAATTGCAGTACTATTCTATAAGCTGTGCTTTTCTTTTAAAAACTCCACTGTGTTTC ATAATAGGGAACTATCTATTATTTATTTAGAACTGTACAAACCAATTTACAAGACAGGTAATTTAGTGACAGAATTA TTTATTAATGAGCCCAAGTATACAAGTTAATGGGACCGAGCCCCGTGGAGGTCAATCCTCATATAATCCATGCCTTT TGGAAAGAAAAGTATTGTCTTCAGAACATTTAGTTATGATTGTTAAATTTAAATTACGATATATTCTCTTGCTAAGA CAAAAAATAATTTTTTCTGAATTGCATGATGACAGAGTTAGTCTGTAAGCTGTGTGGAGATGAATTGTGTCAATTAG GGGTAGGTACATCTTAGCCCTGTTGGTACCAAAAGTATTATTTCTCATTGCATGGGCTCACAGGAGAAAGCAAGCCT GTTCTTTAATAGAGACGACAAATCAGAAACCGCTGCCTGCCTGGGAGATGGAACAGTCGTGCAGGCGAGGAGCTCAG AGGGCGGGCGTGGCTTCCCAAGCTCTGGCACAGCCTGCAGGCCTTATCAGGTGCTCTGCTTCTGGGGTACTCGGCAC TTTGCTCTTCCGGTGGATGGGGGAGGGGGGGGCTGTTCCATGTGACAGCATGTGGGCTTGTCATGATTCGGGGTGAC CACTGGCTTCCATTTCCCAGGAGTGGCTTTGTCCTCGCGGTCTTACGGTATGTTTCCAGTAGATGAGAAGGCATGCC TACAGACAGGGCCTGCTGGTGTCTGCTGTGTGTCATGGGGGGAGGCAAGGTTTTCCTCACTGGGACCTCTTCACTCC CCCTTTATTAATGACCCCCTGGCTCCTCCCCAGAGGCCCAGAAGCCTAGAGGAGAAATGAGGGTACAGCATAGATGC CTTAGTGTAACGAGTGGGGCTGCTGGAACTCAACAGACTATTTACAGTTACAGCATGAAGGTGGTGCTTGAAGGATT TGCTGCTTCGTTTCATTTTTCTCATTTCATCTCATCATGAAGTCGATTGCATTATATCAGGGGGGGGGAATGGAAC AGACACAGAGGAGAACCCACCAAGTTCTGTGTCTTCAAACCTGCAGCATTTCCAGGTTCCGACTGCAGAGTCCTATC AAAGTAAGCAAAATTGGAAGTGATGCCCATTTCCTGGGCTTTCACAAACTTTGTTATTCTGCAGTCTACCACAAAAT CTGAAAAGGCAGAGAAATGTAGCTTTCACTGTTTAGAAAATCTTTGTGAGTTTTTCTTCCCCCTAGGGAATGGTTTT CAGCACATTATTCATTGGAAAAATGAAATCTGAAATGTAGGTGTATTTTCAGTGCACGTGCTCCGGAGGAGCCTCAG CACCCTTGTGTCTTGTCTACCCATTCGCTCAGTGGGCAGGGATTGAGCACTGGGAATGTGCTGGGTCGGAGCCGAGG GCTGGAGGCAGAGTTGGGACCAGCCCCAGGATGGTGCCTGGCTGTTTGTCCCAGGGCTCACTGGAACAGCCCTCCTG GGCAGCCCTTGGTTGGACTTCTTTACGCAGCCCAGTCCACACCTCACCTGTGCATTCGTCAAGCCATTGAGTGCAGT GTTGTGGCCTGAATCACTCCAGGCCTTGCTTTGGAGGGTTGACAGTAGGGGACACGGCAGGCCGGGGGCATTCTGGG ACCCAGGTCTCCTGCCTATGTGGAATACTGATGTGTGTTGTGTGGACAGGTCACTGATGTGTTTAAATGTAAATCTG ACCTTCCTTTAAGAGCAATTGGGCAGCAGTCTGGGAGCTTGAGACTGTATGATGTGGACACCTAGTATCTCTTTCTG GAAGCTTCTAGTGTATAATAGAAAGTAGGTTGGTTACTCATTCCCATTGTCTTTGAATAATGGGGCAGTGGGCCTGG ATTGTTGTCCTGTGGATTGGGGAAGAGATCATAGAGATCATAGAAGTAACCTTAGAGTAAAAGAAAGTAAATCAAAA TGCTATTCTATGTAGAATATATGCCATCAAGGGCAGAGCATGTGGGCGTGTGGACTTGTCATGATGAGGAGTGACCA CTGGCTTCCATTTCAAAGAGGAGAGCTGGAGTGCTTCTATTCCACGGAGATGCCCCAGACTAAGGTCTTTGGAGTCA GGCTTTCATTCCATTCCTGGGTCTGTCCCTTATGCGTTTGGTAAGTTGTTATTACATAACCTCCGGACCTCAGTTTC CTGTTTTAGAAATAGAGATAATGGTACCTCCCCCAAGGGTCTTTGGGAGGAATAAATAGAACAGCTTATAATGGAAT GCCTGGCACATGTTAGGCACTCAGTAAATAGCAGCTGTGCAGTGTTGTGCGAGAGCTTACATCGAGCTGTTTTCCCA GAGTGCATTGATCCTCAACCGTGTTCATGTACCCCTGCCCAAGGTGCCATATTGTGTAATGGAGATGTGACGTCGAG GCGCCATGTTGCCTGGAACTTCTGGAGTCAGCCACCTTGCCTGTGGCTGACCTTGGCTGTGTTCCTGAGAGAGTGAG GATGTGAAATTGCATGACACAAAGTCGGTCATCTTGTGCCCGTCTCATCTACTCTCACTGGTGGTTCAGTTCTTCTC TGCCCCTAAATTCTTACATCCCAGAGCAGGTTCTTGGTTGAGACACAGGTGCTTGCCTCAGGTTTCCTTGGAAAACT CCAGTGGCACCAAGCGGTCAGTAGCCTGTAGCGGCCACTTGCACTGTTGTCCCCTTTTGTGGACGTGGACGTTGACT CTCCATGTCTGGTCTGTGCAGGAAAGAGTGAGTCCTCTCTTTCTCACTCCAGAGCCTGCAGGGGTACCCACCCTCAG CCGGGCAGGGCAAGCCAGGACAGAGGCTTTGAGGGCATCTGAGGAGGAAACTGCAAGGTGTGCAGTTTGGCCCAGCA GAGAGAGACCAGAATGCAGAGGGTACTCAGGGCAGGCGGTTGCTACTCTGGGCTGTGTGCGTCATAGCGTTTGCATG ACAGACACCAGCGGTTGACCAGATGCCCCATTTGAAGCCCATGTCCAGGCATGCAGTGTTGATCTCTGTGTATAGAT CGACGTGGCTTCTTCTCTAGGGCTGGGGAAGAGAACTGTTTAATAATGCACAGTTGCCTAGCCTCAAAGATCCTTTG AGAAATAGCTACTCTGTGCAAGTTTTCAACAATTTGTTTAGACTAATGGAATGACTCTTTAAAAGTTTATATCTTTA CAGATATACAAGCACTTTATTTCTAAGCAACTAATTTAAGCTGGGAAAGAAGAACGTGCCCTCATGTGTGTGTAAAA CGTTAGAAAGCAGCTCTGTTCACTGCCGTGGTGGTGGAAGGCATGTGCAACACAGACATAAGGCTATTTGAACTCTT TATTTGCCACATTTACAATATTAATAATAGCGTTTCTAGAAGTTGTCACATCAAGTAAAAGATCTTCATTCCAGGCT GTCTTTAGGGGCCAAATTGAGACTGGATGCATGCATTTAATAAATTGTAGTCTCACGTAGTCATTTTTGTAAATAAT TAGTTTCAGTGAAAGAATAAGTTAGCATATTGTATGCATCTAATGTTGCAAATGTACATACAGCAAACTTTGCTATT AATCAACAGTCAGGCACCGCAAGTGGGGTCTCATACATAATGAATTGTGCTTAAGCCTCATGGGCTTCTTGATAGAA AAATAAAAGAAAACACAAGTGCAGTAAGCTTTTGAATAAAATTTAACTAGATTGCTCTGCATCCTGTAATTGTTTTG GAATCTTTAGGGACCTGATCATTCATCTATAGTTTTGGGGTGTTTTTATCTTCATCTGTCAAATAGTAGAGACTTTT AATGATATGTTAAAATGTTGATAAAATACAATTTTCCTTTTAATGATTTGAACATTTGGAGGGGGGAGGTAAATAGG CTTTTTAAGGCTTTCTGATCTGCCAAGTATACTATTTGGGTTGTCTTTTAAAAATATTTTCATTATTTCCTGTATTT TTAAGAATCAATTATTTTTAAAAAGAAAAATATATATAGTCCTTATGGGGAAGAGTTGAAAATTTACATAAAGTGTT CTCTGTATTTTTGGTGGGTGTTTTAAAATACTATGGTAAATACCTTTGCAGTTTTGTTTAGGATCTGACATTAATTT GAGCCCCAGATATTGAGGGCATAGCGTGCCGGTTAAAAATCGGTATCCAGTTTTAGCAAGATACCTACGACCACCCA GAAAGTAACTTGGAACCTAACTTAATTTTAAATGGCCTCTTTCTCCTCTTCACATTATTGACATTAGTACATGAACC CGTTGGTGGCCTATAATAGGATCATAAACATAGGATTCATTTTGGGATGGGGTTGAAGGCATAAAAGCAAGGAGTGA GATTTATGTCCACCTTTATTATGAACCACACAGTAAAAGTGCAGTAAAGATCTGCTGACTTGACAGCCAGAGCTCCT CACAGCCCTCCTGCAAGCACTCATGGAACCCGTCCTTCTCCAGGAAGACCTCCTGTTTACTTCTGCGCTAGGAATGG GCTGTGCTCATCACTTACTTCCCTGTCTTATATGATGTCCTTTTGTACAGAATGCATCTTTAAAATAGGCCCTACAA CTAAACACATAACAGTCAATCAGTAGACTCACCTGTGATAAGTGGGAGGCCCTCTTGTACCAGAAAGTTTTAAAAAA AAAATACATTACTCATACCTGTCATTGTTTGTTACGTAAACTTAAGCATATTTTTGATGTTTTGTGCGTGTTTATTC ACTTCTTCCTTTCATAGTTGAACACATCTTGTTCTTGAGGTTGCGTTGGAAATCAGTAGGGTGGCGCATGAATCACT GAGAACAGCCCACGGTGTGTGGTCAGTGCCATCGTCATCATCGTCATCAGCAACGGCAGCTCAAGACCAGCAAGGCC GCGGTTGTGTCTGTCATGAGCCCGTTGGCATGCCGTTTGTTTTTTATCTTTGCCACAGTTGCACTGTTGAGATCCAT GTTTCCTATTACTAACATCAGCACTTTTAATTTTCCGTTTCTACTCAGTTTCCTAAAAGAACTATAGAATATTCAAA TAATTGCATGCGCTTTGTCAAACGTACATGGTCATAGTGCCCAAACAGTTGCTGGCCACCACGCAGAGCCACGGAGC AGTCACTGCCATGTTCCTTCGCAGCCTCCTCGGGGCCTCCATGAAACATCGGGGCCAATGGAAGGCGGAAGTGCTGT TTCTGATGTTGACCTGTGTGTTTGACCCTCACCTTCCCTTCCTGCGCAGTCGGCTGTCAACTCCAGAGGAAGGGACA GCCCTGAGTCAGTATTCTCACCACTAACCGCATGCATTTCAGATCCTCAGTAAATGATTGAATGAAATTAAGCCACT GCATTTGTCTGAAATACAGAGTCAAAAGGTTTTATTCAGCCTCCTGTTTAAAATAAAATGATCTTTATTAAGAGCAG GTAGCATAGTTTATTTCTTTTCTTCAGTCTTACCCCTGAAAGAAAACATCTGAGCTTTAGCAGGAAGTTATAATTAA ATGCAGGACAAATCCATCAAACACAAGACACTCTGCTAGAGATCTCTAAATGGGACATAATTGTGCATTTACCAGTG ATATTTAGCAAGAGTCTCCATGCAGCGTGGATAATCTTTGGCTGAAGGCATGTTCCTTCCTACATGAGCCCCGGAGT CTGCTGCTCTGCCCTTCAGTCCCGAAGCCTCTCCTGGCCCTCCACACCAGGTTCTGGAAGCCAGAGGAGGTGGGGTG CTCACTAGCTGGGTTTGGAAAATGTTGCTCATCACCTGAGCATCTGAAGTGCTGTGTGTGGCGAGGCCACTAAAAGC TTTTCAGATCCCCACCAGTTTCCGTGCAACCTCCTTCACAGCCTCATGGAAGCCTTGCGTCCAAGCTCGGCACCTTG CCAGATTCCAGAGGAACTCAGAGGAGCACCTGTCTTTGGAACGAACTCTTTCCTTGGGTGACCCTCCAGGGTGGTCA GGTAGCATTCCCAGACCATAAGATGAAAACGTCGTCCATGGAGAGAGAGAGGAGGTGTTCGGGTCACAGGAGAGGCA GAGGGTACACAGCACTCCCCATCTGGAGTGTCCCACGGTCAGCCCGATGGTGCCTCAGATGTGAGTAACTTATGAAG GACTCTTGGCCGATTTTCTTAAATCAAACAGGATTCAAGCCAAGTACATCGTGTGTTAATGTCTCTGGGGAGTAGAA TTCATTCAGAAATGGACATTTAGTGATTCTCTACTGCCAGTGGAATCTTAAGGCACCCAAAAATCTGAATACCCAAA TCTCCCAGCTGGCTGGTCAAGTTTTAGAATGTTGAGCACTCTAAACTGGGAAGAGCCTGGTAGCCGTGGTACCAGGA ACACTCACTCTTCCTGCTTGCTGCTTTCCTCATGCTGAGCTGGGCTGAGATCAAGACTCCTGGGGCACTTGCTTCCT CTACCCTTTGTCTGTGGCCAGGTGGGATTCCCACACAGTCAAAGGAAGCCCGTGTCCAACAGGGGCCATTTCCCTTA AATTTCTCTCATCACCCCCAGCTCTGCTGTGCCTCAGGTGGGCCGCTGCCACTCTTCCTTCACGTTCTTGATAATAT CAGTGTCTTGAAAGGAAGCTTCTTGCAGGTAGGGAGGACGCTTTTCCCTGGAATAGCTGCTGTGCTCATATGAGTTT GTGCTGGAACATTCTAACCACCTTTCTGTGCCCTGGTTTGGGTTGAAGGGAAGGCGATTTAAATCAAAATAAATCTG CAAGGCAGTTCATCACTGGGACATTGTTTTTCCAAGCCGGGGAAGGCGAATGGGTTAGGGCAGCTTCCCACAGACGG CAACTCCGGGAGAATATCACCGGGGCCTTCCAGTCTGCCGCAGCCCCGGGAGCTTCTACCCAGGGCAGGTCAGTGTT GTCCGGTTTGATTTTAAGGAACCCCTGGCATTGCCAACAGTTGTGTTTTTCTTAAAGAAATCCTTGAGCCAGGTCCA CATGGCTCTAGCTTTGCTGTGTTAAGGTGCCCGACGCCCTGTTGTCACATGTACACACGCCCAGCAAAGCTGGGCTG CTTCACCCACCAGCCACCATCCTCTCGTGCCAAGTCAAAGAAAGTGAAAGCCACCAGTGTCATGATATTTGCCTCGG GATTATTCTGTGGGTGACACGTGATGTCCTAGGAGAGGCCTAGGGGAGGTGCGACTCTGATGGGCTCTGAGTGTTTC CCCACCAATGCTGGGAGAGGGTCTTGTCTCCTGCTGGGTTCAAGGGATGGGATAGGAAGGGGCTGAGGTGCCAGGCA AAAGTCTTGTCTCCTGCAGGGTTTGAGGGATGGGACAGGAAGGGGCTGAGGTACCAGGTGAGGGTCTTGTCTCCTGC ACTGGCTCCTGCTGGCATCATGAGCTGGCATCCGTGGCAGCCCCCGGAGCTGCAGGATTTGGGCTTCCGAGCAAAGG TGCTCCCCCGGCAAGGATGGGGCGGACCACAGGGCCGGCATTTCAGTGGTGGGTGAGTTGCAGGGCCCCTGGGGAAG ACTGGGACGTGGCATTTCCATGAGCGTGGGCTACGGAGCCCGTAATTGTTAGTGTTTCAGGGTTTGCCAGTGGGGAA GCTTGAGGAACTCCCCCGTGATAAGCGCCGCCGTGAGAGAGGCCATCACCCCAGCTCTTCTTCCAGGGCCGAGCGCG GCAGGGAAGGAGGAGAGGGCAGGGCAGGAGAATAAATTTCATTTTACTGTAGAAATGGAAATTTGTGTCATGGCTTT AAAAATCTGGTTTTATGTGTGTGTTTAATGCCATTCATTTTAAATGTAGTATCATAAATCATTGCTTCAGAATCAAA GCTGTTTAATTACATTTCACCCATGAATAGTTATCTAATGCCAATAGAGAAAGAGTTAAAAAGGAGAACTACAGAGT AAATCAGAGGTTGAGATCTTCAGCACAAGCATAAAAAATCAATTTAAGATGAATTTTACTACTATAAAAATTCTTCA AATATCCCTTTAAGAGTGGGAACTGCTAGGAAAGCCAGCTCACATTTCAATTCCCTCAGCAGCATGAGAGAAGGACG CCCGCGTGGGCAGAGGCTTGGTGTGCACCCCGTTTTGCTCAGGGGTGATGAAGGAATCCTAACTCTGGAGTCTGAGC AGTTGCTGGGGGCACAGAACCTCCCAGCTCTCGTGGTAGAATGCCCCCTCTCCCACAGTGTACCCTCGCTTCCCTGA GAAACCCCATCTGCGGGGTGTGATGGCCAGCCAGACCCCGCTAGTCCTGAAGACTAACCCTGACCTTGAGGTGCATG CCTCGCCAACCAATCCCACATCCCAGTCTTACCCGGGGACCGTACAACTCACCCACCACTGAAACGGCAGCCCCTGT GCTCCACTCCATCCTCGCCGGGGGGGCACCTTTGCTTCGGAGCCCAAATCCTGCAGCCCCAGGTGCCACCACGGACG CCAGCTCATGACACCAGCAGAGGTAGTGCAGGAGACAAGACCCTCACCCAGCGCCTCAGCCCCTTCCTGTCCCATCC CTCGAACCCTGAAGGAGATGTCAGCTGAGCTCTTGCTGCAGGAGGTGCCAGGCCCAGGTGGCTTGATCAGGGGTTTT GTTTCCTCAGTTGAAGGTCGGGGCACATGGGCCCCATCACGCTTGCTCTTCCTGTCTGGGCAGTGGTGGTTGACAGC AGCCAGCTCTGCATCACTCAGGAGGGAGCCGGGGCTAACCCTCACTGCACAGGGCTTCCACCCCTCTGTTCGGCCGC CTTCCCCAGGGATCAGGACAGCAAAGTACATTACATATTTCTCCATCGTTCTTCTTAGATAGCATCAGTACACTGTT TATTCGGTTAGCAAAGAGCAGAGCAAGAATTGAATGACTGAAGGTGTGTCTCTGAAATTGAATAATATTTAAGCCAA GCAGAAGTTCTCCTTTCCGTGGCCAGACCTCACTAACGGGGAAGGAAATTGGGCAGTGAAAAGACAGCACTCCCATG CCCTAAGGAAACTCTGAGAGAGGCCACTTCGTTGCCTGCTCGGCAGGCCCATTCTCTGCCTGCAGAGTGAGCCCGGC TTCCCCCAGGGCCTCTTTGTGACGGGACCGACAAGGGTTTCCAGGCAGTGGCTTGGGCTGTGGAGACCTCAGCCTGT GTATTAAGGGTACTGGGCTGAATGAGGGCACTGTCTGCGTGAGTTCCCTTGGGCAGGGATCTGGGTAAGGCGGCAGT TTGGAGAAGACCGGGGCATGTTCTGTCTGGCCGCAGTGTCCACGGGGTCAGCGTAATTTAGCCGGCTCTGCTGGGCT TGGTTCACAGGTCCGACTGCTGGTCACAGTTATCCGTGGCTGTCGGTCATCCTAGTGAGCTTCCTTCTTTTTCCCTT CATTCTCTGGCTCCTTCCTTAAAACCGTCAGGATTTGTGTGCTTGGAAACCTCTGACCACCCTCCTGCTCCACCGTG AAAAACAGTGTATGGGGGCCCCTATGTGCATCTCACCCAAAAAGGTCCATTTTTAGAAAGACCCGAGGATCTCGGCA GAGACTTTTACACCCACAAAATGCTCCAGCCCAGAGACCCAGCCTCCAGCACAGGACAGCGTGTGAGACTGGCCCGA GGTCTTCCGTCGCCGCCCCTGCTGTCGGATGACATGCACATTTCTGCACCTGCAGGACCTCAAAGCGAAGTAACCCT GGACACACCCTTCACTGGGTCTCTTTCCCCCACATCTCCCCCAACAATGGAAGGCAAGCACCGCTCCACACGAAAAT AACAACACGGGTGCAGTTCTGTGCCTCTCCTTAGCTTCTCCCTGCCGCCCCGTGGGCTTGGTCATGGTGTCACCACG CACTGTAGATGTCGCAGACGCAGGCCCATGGCCGTGTGTGCCCCTGGGCATGTCTGCTGTCTTCTGGGGAAATGGAA ACGCCACCATAGGCATTTACTCAGGCAGAAGCTCCAGAACTTTAGATCCCAGCTTTGCCGTTTTTAATTGTCTCTTG TTAAAATGTGAGTATCCCAGATGGAATGCAAAAGAGGTTCGTGCTGCTGAGGCCCTGGTTTCTTTTCTGAATGGATG TGCCAGGGTATTTCCGCCCACAGTACACTTTAAGCCAAAGTAATTTGTATCATCTTTAACACAAACCCAAAACACGA AAGGCTGTGTTTGTTTAACTAGACGTGTAAGCTATAGTTATCTTTATTTCCGCTTTAACTGCATAAGAGAGGAAACC TTTTTAACTATAAGGAAGGTGTTCGGCTTCCTTTTATCTCTTGCCTCATTATGTACTTTTGACTTTATTCAGATTTG TACAAGCTTGGTTTTTACCTCACAGGAAAAGCGAGAACTAATCGCTCCAGAGATCATCTGAGCTCTTTGTGTGAAGG TGTTTTAAGAAGTTGTGACTACATCTTCTTTTCTAAAACAGCCTCCAATTCTGTGATACAAAGTGAAATGCCAGTTG TTTGCAGCTCCGGGGCTGTGGTCCTCCTGGACACCAGCGGTAGCAACAGGCCCCATCCACACAGGGCTGGGGAGACA GGTCCCCTTCTGCACGGGGCCCAGGAGACAGGCCCTCATTCATACAAGGCCAGGGAGACCAGCAGAATCAGCACGGG GCCAGGGCAACAGCCCCATCCACACAGGGCCGGGCAGACAGGCTGAATCCGCACAGAGCTGGGGTTGGAGCTGAGAG TCATCCCTGACCCCAGCTTCATGGTCCTCCAGCTCTTCCCTGCACCATTGCCATGTTCTTACTGCTGCAGCCCTGCG TCAGGGCAGCTGCGGTGCCTTCTGCCTCTTGCCAGGGGCCCCCAGCCCCCACCAGTCACACTGTGGGCCGCACTCAT AGGACAAAGTGCCCTTCCCGCCCTGACACGCACAGTCCTTGCCCACCTTTCTGTGAGTCTCAGTCCCCGAGGCCTCC ACTCTGCGTCTACGTTCACACTGTCTGTCCTACGTCCGGGATGGCTCTGTTGCCTCCTCTCCATGGACTGGCCGTGC ATACCTTGTGTGGACAGAGTTGGGACGGTGCTCCCGGCTGCATCGGCCGCCTGTGCTGGGCCACATGTCCAGGCAAG TGAAGCCTTCACTGGGACCCTCCCAGAGCAGCATGGGTGTGTCGAGGAGAAACATTCTGTAGATCTCAGCGCACGCC CCCCAAGGCAGCCCAGGAAGGAAGGGTGAAGGGCCCGCGGGAGCTGTGCGTCCACAGCATCCACAGTGCAGTGACGT TTCCCACCTTTTCACAGAAGCCTGAGGAGCAGCACTGTCTGCAGAAGGAAACTAGAAAACTTCCGTGCTCCAAGCCT GGGAAGTCCCGGGGAAGCATGCCGTTTGTCTGGGGCCTCGAGAGGCAGGGAAGGAAGGAAGGGAGTCACCTGAAGAA ATCGGACCCAGGGCCAGGGCTTCCCACGGGGGTCCACAGCACTTGAAATCACAACGGGATGTGTCATGCACTCCACA GCCCCAGGTGGCAGCGGGAGACCTCCCCTTCAGGGCCATGTCCTCAGTCCGTGGAACACAGCCCCAGAAAATCCACC CCTGCTGGAGATGGGGAATCCTTTCCATGAGGGCCCACCAGGTCGAAGCCACAGATGAATGAACACCCCAAACAGAA GCAGCCACAAAACAGTCTGAAGCGACTCCCAGAGGTACAGGTTCAAACTGCAGGAAATCAAAGGGAGGAGAGTGTCC AGAAAGAACCAAGAGGGCCGCGCAGTAGCTCACACCTTTAATCCCAGCAGTTTGGGGGGCCCACGCGGGCGGATCAC CTGAGGTCAGGAGTTCGAGACCAGCCTGGCCAACGTGATGAAGCCAACATGGAGAAACCCCATCTCTACTAAAGATA CAAAAAGTTAGCTGGCCGTGGTGGCAGTCGCCTGTAATCCCAGCTACTAGGGAAGATGAGGCAGAAGAATCACTTGA ACCCGGGATATGGAGGTTGCAGTGAGCCAAGATCGAGCCATTGTACTCCAGCCACGGCAACAAGAGCAAAACTCCGT CTCAAAACAAACAAACAAACACCAGGAAGGTTTGAGAAAGAACCAAGTAGACACAGGCACACGAGGCACAGGGCTGC CCCCGAGAGGACAGACTCACCGATGAAGGAAACACAGAGTAGGCCCTCTGGAGCGTGGGAATCAGGGGACTGCAGGT AAACCCTGAGGAATCCCCTGAACACAGCACACGGCCATGGAGGAGGCAGAACGCGTGGATGTGGCCTTGCGTTGTTG GACTCGGGGTGGGGTGGGCCGTGTGGTGCAGTCTAATGACTGTGTCGATATTTCTGGGAACTGTTTTCAATAGTGAG TGCTTGATGATTTAGGTGCAGCCGTGCCATCTGTAAGTCTTACAAAGGGACACTGTCACTTGGGTTGCCTTGCGCTG TGATGCAGACTCTCAGAACACACGTCCTGGGAGGCCTGAAGGTGGAGAGTGGTTGCGGGGCCTCGGTGCGTCCTTGC CTCACCAGTCCCCCTTTCTGCTGCACAGCTAGTTGAGACGTGTGTGCCCATGAAGCAGCCACAGGTGTTTGCCCGTT TAGATGCAGTAGGTGTTTGCTTTTCCGATGTGTGGAGGCAGGGCCCAGAGGTTTACTAAGCCCCTGTTCTCACTTTT GCAGTGCCGTGGAGGTCCCAGCCCCCGCTGCGGTTCTCGGAGGTCCGGAGCCCCTGATGCAGTGCACAGCCTGGCTG AATGCCTATTTCCACCAGCCCGAGGCTATCGAAGAGTTCCCCGTGCCGGCTCTTCACCATCCCGTTTTCCAGCAAGG TCGGTAACTAAGCCATCTGCGGTGTTTCCTTTGGGGAGCTTGACTTATTAACGATCGCTGACATCACAGTTCATTTT ATTGAGTATACCAACTTGGTATTTTTACATCAGCTAAACAGAGGCAGCGTTTGGCCGAGCTGGAGGGACGGGGGTTC GCCGCCTCCACCCACTCCAACACTTGTGTTAGTTTTGGCACAGGGTTGCATAATTCTTGGCAAAGGCAATAAAAATG AAGCATGCAGATCGACTCTTGACTCTCGCTGGCTGAAAGGTTTAAATAGGAACACATCTGAATGGCAGTAAATTTTT CAATAAGCTTATTGTGAACTTCAACTATCTGCTTGCCAACAGCACAGAAAACGAGACTTGTGCGTGGACATTTAGCT ATTTCCATACACTCTGTTGGTGACACTTACATCATAGCAGGTAGCAGCATTGGAGCTTCTCAAATAATTTTACATTT AATTTCTCAAACGTACCAGAGTTAGACATATTCTTTCTTAAGAGATGACTTGAGAACTTACCTGTATGTAGCCTGCT TAAGGCTTGTGATAATCTAAAACATTTCCCAGACATTTCTTTTAAAGCTTGTGTTTGGCTCTGCTCAATACAGAAAT TAATTACAGCAACTAAAATCATTCCAGACACATGCCAGAAATTTATTTTGCATAGTGAGTTTTTCATAATCATTTTT GTGTATAAATGAACATATATTCATATATGATGTATATATGGAGTTGTACACTTATATATCCTTAAAGGGAAAAATTA CCTTGAGATTTTAGATGTGGTGAATTTAAAGCAATTTTGAATTTCAGATCAGATTTGCTGGGTAAGCTTAACAGTAT TCTAATTGCTGCGGTGCTTCTCAGCACAAAACAAACTTGAAAATGGAGAGAACTTTTCAAGGGAAGCAGGTAAAGAA ACCCCTGAAGGTTGGGCTAATACCTGAGTTCACTAACCAAGTCAGACAGGCGAACATATGAAGTCATGAGCACGTTT TGTGCATAATGAACTGAAGCTGTGCAGCTATAATGAACCAGGCACCTTGCTGTCCTCTGAATCATACAGAACTGTCT CCAGAAGGGTTCAGTGGGGATCTCTAGGATGGGCAGATAGGAAGCTAGAGTGGGTGGGCCTTTACATGGAACCACAA ACGTCCAAGAAACCTCTCATCATCTCTGCCCACCAATGGGCTGCTGCCAGGACAAAGGCACTACCAAAGCCTCCTGG GCTGCCGCCAGCTGGGGGCCACCTCTCCCCAGCGCCACAAGCCAGTGAGCCAATTAGACGGTGTGGGGGACCTTGCT CACTGTGCACCTGATGGGCCGGGCACAGGGCAGGATGTTGCTGAATGGCCCAAGGAAGTCAGAGATTGGTTTTGTTT ATTAAAGTTGGGGCTTGGGGATCTTAGAGTGGTGAACTCTTCTCTATACGATCTCTTTTTGGGGGTTCGCCTGCCAG GAGGAGCAAGGCTGAAGAGCTGTCCAGAGGCTTTTCTTCTCCTTAAGCCTGTGAAATATGTGAGCTGAAATGTAAGG TCTCAGGACAGAAAAGTTCTCTTACAAAACCAGGGCAGGAGGTATCTGCATAATCATATGGAGGCTGGGAGAATGAG CCTGCAAACCCCTGAAGTTTACCTAAGGTTTGTTGGGCAACTTCATGAAAAACATAGGGGCAAAAGTTCCATGAAAA TCGTTAGTTTTCTCCAAGTCATATGGTGGCCCTGGCCATGGAGCTAGACCCTGCTGGCCTGGTCTCACCAGGGTCCA GAGAGTGGTGTGCTCTCAGGCAGGCCAGGAAGAACCGGAGGAGGAGGCCTCCGCAGCTGCTGACAGGAGCTCCAGGG CAGGAGTGGCCAGCAAGGAAGGTGGCACCGGAAATAATCAGACACTCTCCAAACCACCCCTGCAAGCACTGAACCCC CGCTGAGCCTTTTCCCCCTCACTTCTGCCCATGGCAGTGTTTGCTGCTCCTAGAGCCGAGGACAGGCGGGCCCCTGG GGCTTCTCAGTCAAGTCCCTAGTGCTTAAGCAGAGTTGGGATTGGCCACACCTACCCCTGCCTCCCTGGCTTTCAGC CCACGCCAGGCCAGGCTGCTTCCTGGGCTGGCAGGTCATGATAGGTCTTGGTGACCAGGAAGACCTCAGAGTAGCCG CCAGGATACTGGTAAAGGCTGTCTGGCTCCCCCGTGGCCCTGCCCCTCTTGGAAAGCCCTACAGTGCGGGTGGATAC CTCTAGCTGGGACGAGGTCCACTCCAGCCAAGTTTTGGGATGGTAGTGCGACAGCCGCTCACATCCTTCTCTCTTGG TGTTCTAGAACTCTGAGGCTGGCTGCAGACCCAGGGTGCTGAGCTCAGGGCCTTCTCTCGAGGGTAGGGGCTGGAGT CCCCTGGGCCAGGCCTGCCTGCGGATGGTTAGTGGTTGCTGTGGGGGCTGGGATTCCCCACCACAGCATGTGTAAGC CAGGTTTTTAACATTTAGCTCAATCGTTTACTCCTGGGCAGGGGCCAGGTGTATGGATTTTACTGTTTGAAGAAGGG GAGGTGGATGGTGGATGGTTGCTAACAGGGAGTTAATTGGTTCTCCCAGATGTGGATACGCCCCTCTCTGTCTGGCA TGAGTTTGGTTTGCTCTCTGTCCAGGTTGTTATCTTGTAACATCAGTGAAATCAACAGTGAGGGGGCAGGTCTTCTA GAGGAAAAGTCTTTTGACATCTCAGAGCCGCCTGGAAGCTGTGGAGTAACAGAAATCAACCTGCTTTGCAGACTGAG AGGAGCGGGTCCATTGTAACATGGAATGAACATTTCCTTGACCAATTCCTTTTTCTGCACATTTTAATTTCTGTATA TGTTTAACATACTTTTGCATATCATTTTTCACCATAGTCTCACTTCTGAGATTGAGACCAGGTTTATCTATTTCAAC CTGGTTTGTCTATGTCAACATTTTTAAAAATGTGATTGTATTTGAGCTCATCCTTGAGTTCCAGCACATTGACCATT TCTTTCTGAAGGCCTGGCTGGTAAAACTTCTGACTGCGCAGTACCAAGCCCTCATCCCTTCCTCAGGCCTGTCCTGC TGCTGAAAGACCCTCTCTCCTGCACACGGCCTCTTCGCGGTACCACCTCACCTTCCAGGATTCCTCTCTGGAACGAA CATGCTGTTTGTGATTTGCTTTTTAAGGCTAACCACAAAAATATGCATTACGTTGAACCATATGAAATTGCTATTTT TTAGGTTAAAACTTATCAAATACCAGAAATTTCAGATGGTTCAACTTCTTATCTTGGGGAATTTCCAAAGACAGGTT AGTAGCTAGGTAGCTGTTGAAGTATTTCTGCCAAGGGACAGTGAAGCTGCCTTTCCCGACCGGGTGTCCGGAGGTCC CCGGGGCTGCCTCATTGTGAGGTTGGGACAGGTGGGATTTCCCAGTGGGAGGGCGCTGAGGCTCTGGAAGGAAGCCT CATTGTTCTGCTGAAGGGATTAAGAGGAAAGCTGAGCTGTCCAGTGAAGCATATTCTAATTTCTCGTTCAAGTGTTG TTTTAGTCAGGTCATTTCCTAAAATAAAATTAGTCAAAGTTTTCTTGGTTTGGGGTTTTTTGGCTTTTTTGGTTTGC TATTCTGGTTTTTTTAAAGTGTCAACAAAATCCATTTTCTAGCTACTGTGTGACCGAGGGCTAGCATCTTGTCGTAC AACGTAGCTTTTTAAGGAGGTAATTTTTTCCCATAAGCCTCTCGCAAGGGTCAGCTTTGTATTTATTTCTAATTCAT TTTTCCTCAAGAAATACTTATTTAATGAAGCCATTATTTTTGAAATACATTTTTACTTTTTTCTTTTATAATGAAAT ATCATTTAAACTTTGAACACTCCCTGATTTCTTAGTGTTTATTTATGAAAATGTTTAGCTTCTTTATATAATGTGCC TTCTGGAGAAGCTGTAGGGGTCAGCAGCCAATGCAGCTACAAGAAATCCTTTCTACCTTAGTTTGCCAAAAGCAGCT TTTTACAATGAGTTCAAGAAAAGCAGACCTACGGAAAGCGAGGATGGACTTTCAGATACAGAACCCATCTGGGCACG TCCTCAGGTCCCTGAGCCCTCCCACCCATGGAAACCCTGCCAGCAGGTATGGCTGACCCCAGGCTGCTGAGGGAGGT CCTGCCAAGGCAGGACCAGGCCTTGGGGCTGCCCACGCGAGACTGTGGGGAGCCTAGCTGGGACCCCAGCCTTCTCA CAGTTGAAGGTGTTCAACGGACGAGTTCTGAGTTTTCTTTGTAAAGTGACTGCAATGTTCCCTTTTAAATGAAATAT TTAACACTTTAATAATTCCTTCGTCACAGCTATTGGCTTACAGCTATGAAATCCAGTTGCATGACAGCAGTAAAATC TCCCTTTTTTAACACCTGCTGGTAGAAGTAAGTTTTTGTAACTTCTATTATAGAGCCTCAGAAAGGATTCATATTTT TGTATTTTTGTGTCTCCATCGAATTCCTCATTTCAAAAGCGCCTCTAACAAAAGCCCTGCCCCAGAGTTAAGGGAAA GGGCCTTCAGGGTGAATTCGTTAAGGTTCCCACCGTGTCCTGGAAGATGGGCCCTCTTTGCTGGTGCTTCTAGTGAG GACTGCTTGGGTCCTGGAAGGGGCATGTCCCGGGAGAGGATGACGAGGGAGGAGAGGAGAAGAGAGTGGCGTCATTA CTTGGGTCCTCACCGGAGCCAGCCCTTTAAGATTAGAAATCCTTCTTGAAGAGCCAAGCAAAGGCTCATCCAGCCCC CTACAACCCCATCCTGCTGCCTACTCACATCCAGGAAAGAGCCCACCCCTGATGGGTGCCCAAGTAGATGGCCTCCC CTGGAAAGAGGCATATTAGCCCTCCTCACCCGAGGGTCCTAGGGCCCGTTTGGGTGTTCTTAAAATGTGCCTTATAA GTCGTGATCCAGCCTGAGTTTTTCTACAGAGACACTGCAGCCAAGAGGGGATGTTTTTCTTGTAGCTTCCACATAGA TCACGGCAGCACGCAGGCTTTGTCCTTTCAGCACTTTGTACCGATATTTTCCCTGAACTTAAGAAAAAAATTACCAA TTGAAAGAGAAGAGAATAGCTAAAATAGGAGATGCATTTGCCACCACGTGTGGGTGGCCACCGCTGTTCCCCTTGAT TTTAAACGAGGGCTCATAAATATTGTTGACCTTGCTGAGATATTACCTGGTGGAGCTGGAAGGTTTGTAAACCTTCT TCCGATGCCCGTTTATTGATTAGAACAAGCTAACAACACTGCACTTAAGTGGAAAAAACAGCTGGTAAAAATGTAAT TCTTTCAGCCTTAGGGCTGCTGTGCTCCTTTTCTGGAGAGCAAATGTGGAAATCAAGATCTGTGGCCTTCTGGAACC TTCACCAGGAAAGGTGAAAAGAAGAAGAACCCATCCACAGCTGAGAGTGGATGGCAGGCCCGCGGGTTTCCAGGTGG CCAGTAGGATTGTCCGATGTCTGGAATGAGTACCGGGGCCGCCACCAGGAACACTTGTCATTTCTACCATGGAGAGG AAAGCCCAGTGCATTTCTGTGGTTCAGAAACTTGACACAAAGAGAAAAGCTGGAATGTTTAAAAGCAAAAATAGGGC AGAGATCAGTGAAAGTGCAGGATGTGTGTGAAACAAGGGTAGAGTGAGCACTGGTGGGGATGGAGGTGGTGAGGGGT CTTCTGAGCTGGGGACGTTTACTTACACCAGCCCTGCCTCCCAAGAACCCATCCCCTGTGGGTCCAGAAGACCAGAT CCCCGCCAATGTCCTTCCCTTTCAGAGCTGTCTGGAGGAGCATGCCACTAGTTCCCAGGGTCTCATCTGCCGGCACA CGGCCTGACTTTCATGGGAAGTCCCCATTGATGCTGTTCCCTTCCCAGTGAGTGGGCTCCCGTCACCCGTCCTGGCT CATTTGAATACCTGCATCACCTCCAGCCCCTCAGCAGAACAAGAATGTCAGATAATCCAGAATGCTGTTGAGAGCTG CTCCAGGTTGGGGGCTCGCAGCCCCAGCATCCAAAAGCCTGGTTTCAGCAGGGCATGCCCGCAGAGCCCCTAGGCGC CCCGAGCTCTCCTGGTTTGCCCGGGCTTTGCCTGCACGGGCTGGCCCCGTGGACTGCCTGGCCAGGCCAGCCCAGTA ACAGCGAAGCACACCACTCTCAGCTCCTGAGCTTGGCTGACCAGCTATACTCTGGCATATTGGTGAATTTCATGGGC CAAAGAACCTGAGGTTCAGATTGTGTCTTAGTTCATTGTTTCATATTTGAATATGCAGTTTCCTACCTAGCAATTGT CATGAGTACTTTCTTGCTGTTTATACTATGAACAACATCTTGGGCTAGGAGAGAGTTTTTAAAGTTTCAACAATGAT TCATTCAAGCACTTTCCTTTTTCAAGTTACTCATATCTCAGTTCATTCAATGGGGTTGGGGGATTTATATCAGAATC CTCTAGACATTTCATTTATAATATTCTACCTATAAATTTTTATACTTCTTACCCCTCCTCAAGATACACTAAAACCT TAGCATGGGCACACGCACACACATACCCTGTTTCTGAGAATTATTGTTCTAAAGGAATTTATCAAAATGGATGTAGC TCCTATGAATGCTTTTGCTGTGTGCTTTACCCTCTACTAAGCCTAACATTCCTAATTTAATAGCTATTTTTGTTTGA GACTTAAAAACTGTGCGCATTGAAGGAATGTTTTGCCGTTGAGGAAATGCCAGCCCCTCTCCTAGGAAAGGGGTGCT CGGCTCCTGGTCCACTGGCAGTGGCTGGAACAGAACCACAGCCTGCTGAATCCCAGGAAATTCATGATGTCCCTGTG CAGAGCCCTCTGACTAATCAGCGATCCCACAATGCCTGTAGCAGAAGCATAGTTAGGTGAGAGTTTTATCCTGAATG TAAGAGGTGGCCAGGTCCTTAGTTCCCTGAGGTTCCGTGAGTCGGGGGTAAAGGAAGCAGCCCTCACACAGAGTAAT TTACCAAGCCTGAGAGGGAACCAAGAGGACTGTTTGAGAGTCAGCCACTTCCAAACCTTGGTGGACATAACGAGGGT CTCTACTACAATAAGCAGGACTTGTAATATGTAAAATTATTATGAGTGCTGCTTTTATGGGAAAATATTCACATTAA AATATAATTTAACTCTGGTGAAGTAATTAAACAGTAAATCAGTGATGGCTTCTATTAAAAATTAAGTCATCGTAATT ATGTGAATGCCTTTAGAAGGATTTTCCGCAGTGTCCTGGCGTTGGCCTTGAGTGGACTTCTCAAAAAGTAGAAGTAA CCAGGTTTCTGCCTGTGAGGAAATGTAAATTGCATCATTGCTTCCTTTAATAAATTTTCATTTTAAATGGGCTTTGA AAAATAGGAATTTTCTCTCTGTTTTAAAGTAAAAAACACACTTTTCACTTAAATATGTTTCTAAATTTCTATTTCCA CTGTAGTCATTAGCTGGACATGTGCCGCTCCAAAAGAGAATGTTAACCTTCGTCTCTTTTGTCGTCATAAATGCACA TTCATGTTTTACAGGTAATGTTCGTGCATTTGAAATAATTCCAGCAATAATAAGTAGAATTATCTCCACTACCTGTG TTTATAGAGAAAATGATGTTTTAATAACGTGTGCATAGAATTGGACTATGTTATCAATACGTTAAATGTGTAAATAT TAGTATAAAATTAATAGTGATAATGCTGAAAAACTATTGCAGGAGCTGAAAGTGTAAGAACTATGACTTAATGTAAA TGCTTTCACACATACGGTTTTTGCCTGCAATCCTTATGTTCAGGCTGACTCGGAATATAAGATTCATGAGTCTCTGT CCCTCTTTATATGTTGTTTCATGTGTCAGAATGGAAAAAGCAAATATTTACGTAGAGGGAACTCCTCCCTCCTGTTG GAGGTACGCGGCGGTCAGTGTAGCTTCTGAGGCCGCGTGGAGATGGGAACATCCTCAAGACAGAGCAGACTTCCTGG AGGCTCAGCCGGAACGTCTCCAGCTCTGTAGCACGTTTTAATTCCATACAAGAAGTTACTCCCAAAGAAGTAAATTG AAGAACGAAATCGAGGAAAAGAAAGTCCTTTTTTGAAAGCTCTTAAACACTTGACTCCGTTTAGTTCGGATCAGGCC TTCTCTGCCCTTCCAAAGATTCAGGTTAGGTATTGGTAACGCCCAGGAAGCACCCACTCTGGCGAGCCCACCCTCTC CGCCAGTAAATATATACAGTGTAGCTGTTACTATGACAACGACTTTTTTTTCTTGAGTACTGTTTTTAATTGTTGCA CAAACACATATTGTGTAAGAAAGGGGAATTGTCCATAGTCTTCCACGTGTGGATGTGTGTGCCCACACTGTCTGCTT TCTTTAAAAATGCACATTCCTTTCTGGATTGGGCTCCGCGATCCCCCGCCTGCCAAGCAACCTGATTTTCTCTTCAG CCTTTCCTCACTTAGATGGTTTTAGTAAGACCTAGCAACCGAGCTCAAGAGACACGTCAGGACTTACTGCTTGCCCA AGACATATACTTTTCATAGAAAATTCGCGTCTCTTCCTCTTTTCAGAATAAAATATGCAAGAACCAACAGAAATGGC ACATTCCCCTGCTTTTCCCCAAGAATTGGGCCTTTGATGTTCAAGAGCAGCTGATATTAAAGGCTATCCCTAGAAGG CTGTAGAAACTGTACCTATTTATGACAAATGTAAAACAGCACAAATCTAGCTGAATGTGATGGTATCATTAGTTTGT GAATCGCATCCTTGAAAATAACTGTGAAGGAGCCAAATCGGTTTAAAAGAAGATAACAAAATGGTTTAAGCTACTTA GGTTGAATGCCAATTATATTTTAATATTCAACTGAGCATATTTTACTAAGAAAAAAGGCCGCATTGACGCATGCATA ACTCATTGGCAGCGTCGGCCAGCTGTGCCGCTCCACTCTCCGAATCACTTTGTGCATTTTAGTAGCATGGTAATTTA GTAGAGGACTACCTGAGTGATGGCATTTTCAATGAGCAGGTAATCTACAGAGAATTTTTATATGGTTATGAGTTCTG TGCTTCAGCCCGGCAACACAAAAATACATCAAGACCAATTACGGTATCAACTTTCAGTGTGATACCCTTGCCACGCA AGTGCATGTATTTCTGCCCCAGGCATTTCAAATTGCATCTAATTTGAAATCTTTGGGGTTTTAATTAAATTTCAGAA TATATGGAATTCTTCATTAGTACCTGCTCTGAATAGCAGATCATCCTTCTCCCAGTCTCTCGTTAAAGAAGTAGGCT GTGGTAAATAGCGTGTTCAGTAGCTGATCATTTGTGGGACCTGGGTATTGGAACAGAAATAGTGAAATGCAAAATAA TATCAAAAAGATTATTAGTCCAGGGAGAGTCTCTTGATTTGTATTTTAATGGAATTTTACATTTCTCTTAATGATTT GCAAATTGTCCTCTGATTATAAGATGCATTAAGCTTTTCATTTTAATGGCAAAGACACAGCCATTAGCAGAATTTTT TTTTCTGTCTTCTTTTTAGAGTGCTTCCCTGCAGCAGATAAATATTGAAACCATTAACACCTTTTGATGTATGGTAC AGTCTGCATCTTAGACCCACACATGGCTGGCCGGCTGTGGTCCCTCCGTGCCGCACACCTGGCCGGGGACCCTGACT CTTCTCTGAGGACAGTGAGCAGCAGTAATGCCTGTTTCCTTTTCTGGAAAACAGGATTCTTTTTGAAAATTTCATCA GAAGGTGGTGTTTATTTGTATTAAAGCAATGCATTTAAATATTATTCATGGCCCAATGTGTATTTAAAAAGCTGGTC TTACCAGTGTTAGGGTTGACGGTGCCCACAGCTCCTGCCTTGCTCTGGTCTGCGGGGCTGGCCTTGGTGATTTTGGA AATGGAATCTGGCCTTGCCCCCAGGATGTTTCTCTGTCAACCCATGTGCTGTGAGAGACACACAGAGCTCTTTCTGT GTTAGCCAGCTGACCACAGCACGACCCCAACGTGGGGACACTTGACTTTGGTTTGGCCTCTGAGATAATGTCTTGGT TTTAAGGCCAGGACTTCTAATGCCCTAGAAGATGAATATGATTTACACGACCAGAGCTACAAGGCAAAGCTCATCTC TTCTGCTTCATCTGCTGAATGTGCACAGGGAGCTTTAGGCTTCGACCTGGCATGCAGTGACAGTCTGTGAAGGCAGT GGCGCTTCGGGCTAGGTGTCTCCTTGTGTCGGAGACCTGTGGAATCCAGCAGCTCCGTCTGATCGTATAGTTAGGAA AACCAAGGGGACTAGAGAATGGCACTGCTGAGTGCGGGCAGTGGTGGCTGCCCCCCACCCCCACCCTGGGCAAGTGA GGTCAGGCCTGGCCCTGCTTGCCCTCCATTTCGAAGGGCAATTCTTCACTCCAGGCTTGCACAGCTGACCCGAGAGT GAGTGTCTCTGAGCAGCTGTGGCTCTCAGTCACTTACCCCCTCACCTTCTCACTTCTCTTCATGGGTCTTCCAGGAT CTGAGGGATGAAGCCAGACACACCTCCTGCCCTTCCTTTGTCCTCTCCTGGTGAGTGTCACCTTCCCGGGCTGTCAA GAGCTGGACCATGTGCCCACTCAGGTGTGTCACCTTCCTGGGCTGTCTAGAGCCAGTCTGCATGCCTGCTAAGGCGT GTCACCTTCCGCTCAGGTGTGTCACCTTTCTGAGATGTCTAGAGCCAGTCCACGTGCCTGCTCAGGCACATCACCTT CCTAGGCTGTCTAGAGGCAGTCTGTATGCTTGCTCAGGCATGTCACCTTCTGCTCAGGCATGTCACCTTCCCGGGAT GTCTAGAGCTAGTTCGTTTGCCCGCTCAGGTGCATCACCTTCCGCTCAGGTGTGTCCCCTTTCTGAGATGTCTAGAG CCGGTCCATGTGCCCGCTCAGGTATGTCACCTTCCTGAGATGTCTAGAGCCGGTCCGTCTGCCTGCTCAGGCGTGTC ACCGTCCCAGGCTGTCCAGAGCCGATCTGTGTGCCCATTCAGCTGTGTCACCTTCTGCTCAGGCATGTCACCTTCCC GAGGTGCCCAGAGCTGGTCTGTGTGCCCGCTCAGGCGTGTCACCTTCTGCTCAGGCATGTCACCTTCCCGGGCTGTC TAGAGCTGGTCCGTGTGTCCACTCAGGTACGTCACCTTCCCAGGCTGTCTAGAGCCAGTCCGTGTGCCTGCTCAGAT ATACTGTCACCATGTGGGCCCTACTCTTGTGTCAGGGCCATTAGCTGGCACATGCTGTGTGGTTGCCTGGTGCGCGC TGGGGCAACCTCGGGAAACACTCTTAGCCTTTGTATTGATCTGTGCAGGCTGCCAAAACAAAGTGATGCCAACTGGG GTCTTATACAACAGAAATCTTTCTCAGCTCTGGAGCCTGGAAGTCCGAGACCGAGGTGCGGCAGGGTGTCAGCTACT CAGACCAAGGTGCTGAGGCTGTCCTGCTTGCCCTGCAGATGGCCGTCTCCTTGCTGCGTCCTCACTAGGCCTTTCCT CTGGGCGTGCATCGCTCGGGTCTCTATATCATAATCTCCCCTTCTTAGAAGGACACCAGTCAGATGGGATTAGGGCT ACCTGAACAACCGAATGAGAACTTCTTCACCTCTTAAAGACCCCATCTGCTGATACAGTTGAAATGCCGAGGGTCAG GGCTGCAACATACGAATTTTGGCAGAACATAGTTTAGCCCATAACACCCTTTCCGAGCCTCTGATTATCTGTCTGTA AAGTGGGGACAGTAGTAACAATGTGTAAAATGTCATGAGGGTAAAATGAGGCCACCAAACAGTCAGCAAAAGAAATA CCTGCTTATTTCACAGATAGTCTTTTCTCCAAAATCCCAGTGGTAGTTAGCAAGTCAGGACAGCTGACTCCACCTGG TCCTTTGGAACTCAGGGAAGATTGGGCCGTTATTAGGAAGTGCTGCTCTTTGCAGCCAACAGAACTTCCCAAGGACG CCCGCCCTCCGCCCTTGCTTGCTATGTGTACGAGTTACAGGAAGTGTGGCTGGTATAGCCCCGCAGCTGTTCAGAAG GAGTGTTTTGGTTTGTCATCTCCACATGAAATGAATGGAGCCAATTCATACTGTAACTGAGAAAAGAACATTTTTCA ACCATTATTTCTTCTCCCTACTCACTGTTAAGCTCTAGGCCACAATAAATGGCTGCCTGCTGGGACTCCTGCACTCT GGGATGACACGTTCAAAGCGTGTGCCCATGTAGGCTGCTGCAAGAGGGTAAGCATGATTGGAGTGGGGTCACTGGGG TCTGGGGAGCCAGCCTCGGCCCCTCCTGGCTCAGCACAGCCCTCGCGGCCTTGGGGGCCCACAGGGTCACTCTCCCC CAACCCTCCCACAGCACCGGGCTGTCTGCTCTGTGCTTCACTCTGCACTAGCTGGTTCCTGAGTACCAGGAGGCATT CTCTGATATGCTATGGATACAGTTATGGACAAAATGGACTCTTAGGAAGGCAGCAAGTAAGGGGAATGGAGGGGCAA AGAGCACACAGCTAAAGATTGCCTGACTCAACTGTGGTAGTCACTGGTGCACTGCAGGTTGGCATTTGCACCCTGCT AGCATGTGCTCCTGAAACTGGGGCCGGAGAGCTTTCTTCTCTGTCTGAGCACTCAGAGCAGTGCCTGCCAATGCTGT GACAATGAACGAATGAATAAGCAAAATGTCAACCCATTTTCAGAGTTTTGTTTAATGTCCCTGGACCTGGATCTCTC TTGAGAGTGAGCATTGAATGGGCCTTCCCTGCCCCTACTGAGAGCTCAGGGCATGGACCCCAAACGCTTGGGTCTCT CCTCTTCCCTCTTCTGTTGTAAATTTAAATGTCAGGGGGAAAAAAAAAAAAGCAAGAAAAATATGTAAATAAATACA TTTGCAATCATATGTTATCGGATGAGAAGGGTAGCGGTTTCAAGAGTTACATTCAGAGTAATCGTTGAGCACATTGA TGGCAAGTTGATAGTTTCGTTATTATGAAATATTTACTTTGGACAAAGGAGTATTCAAAACTGACTTACGAGGTATA AATAATAAAGGACAAAGTCATATATATGCCACCCAGGTGATGTAATAATTTGTTTTCTTCCCTTCTGTCAGTAGACA TTTGGGTTCTGAAGTTTTTGCCTTTAAAACTAATGATGTTACAGATATTCTAGGTTGTGTGCCCTAGTGCTCCAGCT GGCTGGAATTCATGGGCGGAGTTCGCGAGAAGAGGGAACTATACAGAGAAAGAATTCCAGAGGTCTGCATGGTATCC CATTGAGTCTGTTGCAGATTACAAAGTCATACATGCATTTGTAAACCACATGAAACCAGACAACTATTGGGGAACTA TAAGTTGAACAAATTTCAGATAAGTGAACCTCACTAGAACTAGAAAATATGTGGACAAGTATGAAAATTTTCTTCTA TTATTTTATTTAAAAGATGATTAACTGTTCATGATAAAGTTAATAAAGATGTATTTTGTAGTTTATAATACACGTAG AAGGAAAACATATGACAACAATAGCATAGAAGATGAGACTGGGGAAATGGAAATACATTGTTCTAAGTTTCTTACTT TATGAACAAGTATAATATTTAAGGGCAGACTTTGATAAATTATGAATGCATATTAAAAATCCTAGAATACCAGTAAA AATAACCAGAATCTATAGCTCATGGGCCAACAGAAAAGATAAAATAGAATGCTAATTCTTTTATTAGAATTAGCATA TTAGAATGCTAAAATGTAAAAGAAGATAGGGTAAAGGGGGAACAAAGAACAGATGGGAAAAATAACAAGTTGGCAGA CTTAAACCCAATCATATTAATAATTACATTAAATGTAAATGTTTTAAGATTCAAATAAAAAGACATAGATTAGTAGA CTGGTTTAAAAAGCCAGAGCCTGTTATATATTTTCTACTAGACAAAAATAATGTAAAATGATGACAGAGTCCTATGT AAAGATGGAAGGAAAAAAAAAGGAATACATTGACAGAAAGATATAAGTAAAATTGTATTTATTTTCAGATCACATAA TTATTTACATAGAATATCTTGAATAATGTTGAAAATAACTATTAAAACCAATAAGTGAATTTGAGAAGTTTGAGGAT ACAATTTTAACATAAAATGTATTCTATTTTTATATAATGTAATTAAAAAGTAAATTATAAAACAGTTGCTTTATGTA TTTAACATTAGCATTATTAAAGATTATTATTTAAAGATATGCAAGGCCTCTCTACTAAACAGCATAAAAACATGACT GAAAGAAATTAAAGAAGACCTAAGTAAATGGATCTTTATTAGTTATTGGAAGAGGCGGTGTTACGGAGAGGTCACAT CTACACAAATTGCCCTCTGCATTCAGTTCAGTCACACTTTTAAATTATTTCAAAATGCAAAGAGCCTAGAATATTTA AAACAATCTTGAAAAAGAAGAATGAATTTGTAGGACTTACATTACCTGGTTTCAAGACTTCCTACAAATCTGTGGTA ATCAAGACACTGCAGTAAGGATCAAAACTTAGAACAGTGCAACAGAGAGAGAGACCAGTGTTTTTTCAGTTCTTGTA TCTTTGAGAAAGACACAAAGTAGATCAATGAGGAAAGTAAAGTCTTGTTGGCCAGGCATGGTGGCTTACGCCTGTAA CCCCAGCACTTTGTGAGGCCATGGCAGGCGGATCACTTGAGGCCAGGAGTTCAAGACCAGCCTTGCAAACATAGCAA GACCCTGTCTCTACTAAAAACACAAAAAACAGCCAAGCATGGTGGTGCACACCTGTAATCCCAGCTACTCGGGAGGC TAAGGCATATGAATCACTTGAACCCAGGAGACAGAGGTTGCAGTGAGCTGAGATCATGCCACTGCATTCCAGTTTGG GTGACAGAGGAAGACTCTATCACAAAAAAAAAAAAAAAAAAAAAAAAAAGTCTTGTCAACTAATGGTGCTGAGCAAC TGGATATCCATTTTTTTTTCCATTCCATTTTCAGATCACTTTAATGGTTAGAAATTTGTTCCATAACTTATTTATTT CCATAGGTTTTTGGGGAACAGATGGTATTTGGTTACATGAGTAAGTTCTTTAGTGGTGGTTTGTGAGATTTTGTGCA CCCATTACACGAGCAGTATACACTGAACGTGATATGTAGTCTTTCATCCCTCACCCACTTCCCAACCATTCCCCCTG AGTCCCCAAAGTCTATTGTGTCATTCTTATGTCTTTACCTCCTCATAGCTTAGCTCCCGTGGATAACCATTTTCAGA TAAATATTATTCACCATGACCTTGACCTCACACCATACACAAAAATTAATCTGAACTATATCATATACCTAAAGGAG AAGCTGAAACTCTAAAGCTCTTAGAAGAAAACATGAGTATTTTTCTGATTTGGGTAGGCACACATTTCTTATAACAC CAAAATAAAAAACAATGAAAGAAATTATTAATAAATTAAACTTTATTAAAAGACTTCATTAAGTAAATGAGGAACAG GCCACAGAATGAGAGAAATTTTTACAAAACACATATCTGACAAAGGACTTCTAAGAAGGGTATATGAAGACTCTGAT AACTCCATAAAAGGACCAACAACCCAGTAAATAACTGGACAAAATATCTCACATTTTCATCGCAAAGACACATAATA CACAGATTGGCCCCTGAGCTCATGAGAAAGTGCTCGGCATCATCAGTCATTAGGGAAGTACAGGTTAAAACCACAGT GAAAGACATCTGCATATATCCCAGGGCAGCTCAGATCAGACACCACCAAGTGTCGCAGAGACTGCCGCAGCCTCGCC TCTCGTATACATTGGTGGGTGTTAAAATGTTGTAACCTCTTTGCAAAAGGTCTAGCAGCTGCTTATAAAACTAAGTG TTCTCCTACCCCGCTACCCAACAATTCCACTCTAGGGCATTTATCCAGGAGAAATTAAAACCTACGTCCACAAAAAC GTATTCAAGAGTGTTCACAGCAGCTTTGCTTGCTTTATTTATAATTGCTGCAATTGGGAATTGCTTGTATGTCCATC TGTAGGAAAGTGGATAAATTACCTGAGGGATATCCATGTAGAGCCTGTTCCTATCTGTGAACTTAGCATTGAAAAGG AATAATCCACAGACACACACAGCCTCGTGGATGAGTCTCGGTAACGTCATGCTGAGCTTAAGGAGCCGGACACAGCA AGAGCCTGCCTCTGATTATATTTATTGAAGCTCTGCAGTTGCCAAAAACAATCTGGATAGGGAAAAGTTAGAAGAGG AACTGCTTCTGGGGTTGTGCAGGCAGTGAGAAACTGGGAAGGGGCATGAGGGAATGTTCTAGACCATGACGGCCATG GTCTATATCTTAACAGGTTAGGTCACATAGGTATCTATCTGTGTTTGTCAGAATTCATCAAATGATGTTGAAGATGG TACATTTCACTGTGTGTGTAAATTCCACCTTAAAGGAAAAAAGAACCATAAATGGACATTGAACTCTTAATGGTATA TGTGCTGAAGGACTTGGAGAGAGTACACTGATGTCTGCAGCTTATTTTGAAATGCAGCAAAAATAATAATAAAATGG ATATGGGGTGGAGAGATGGATAGATATATGATAAAAACAAATACAGGCTAAAATGTCAATTATATCATCTGAGGTAT AAAGCTATTCATTGTAAAACTCTTCCAACTCTATGTGGCTGGGGTTTTTCATAATATGTTGGAGGAAAATAGTAAAT ATTATGGATTTTTATTCCTTGAAAGCAAATTTGGGGGAAAGATCATGAAAACTGTGGCCTCCTTATCCCAGATGGTG AAGATACAACCTAGTATGGCCTCAGCGAGATACTGAGTGCACTCTCAGTTTGCACCTGGAGGGCAGGGTGAGTCTGG GAGGTCTGTGAATTGTCAGTGGACCTCCCGGTCCTCTCCAGAGCCCTGCAGGATCGGGTGGATACACTGACCTGATG GACAGGAAGAGGAAGCCTCTGGGCCAGACCTTTGGACACTGTTGCCTTACTCTTCTTCTCTCCAGCCAAGCGAGTGG CCTTGGGAGGTGAGTGTGGTGTCGCCTTGCAGCCTTGCACTCAGCTTTGCAGCCGTCCCTGTCCAGCCAGCTTCCAC GCAAGTGGAAGACACACAGAATCCACAGCCCAGGCAGCTGCTCTCACCTGTGTGTGGAGCACAGGGTGCCCATCCTC AGAGACCCTGCCCAGCCCCTCGCTGCCATCCCCTCTGCTAGACCAGGCATGTGGGTCAGCGCTGCCCTGTCTGGCCC GAAGTTCCATGTCAGTAGCCGTGGATCAAATGATGAAGGCAGAGTTATCTAATTACGGAGTGTTTTCTCTAATATTT CCACAGCCTGCTGCTGTCATGGAACATGGAGATTCATTACTTAGAATGTCAAATTAATAGCGTTCCTGGACCTGAAA CATCATTGTGTCAACTTCTCCACCTTTTCCAGGTGGTGGTTTGAGTTTGTGCACATGGCATGCCTATTGCCCCAGCA CGGCCACAGCTTTCCAAAGTGCCGCCCAGGGCTGGGGTCTGCCCACTTCCTCGGAGGTCTGTCCATGCTCTGGGCAG GCTACAGCCTGCAGGATGCAGATGCCCAGATTGGAGCAGCACCCTGTGCCCTCAAGAGGAGCACAGCTCACACATCC ACGTAACTCTTGTCCTTAGCAGTAGTGAGGGGCTTCTGCAGGCAGAGGAGTCGGCTCCACGGTCCTCCATGTAAACT ACCGGGATCAGGAGCCTAGGGTTCAATTCTGCTGTCACGTGTCTGCACTGTAGCCTGTTCTGCCTTCTCAACCAGCC CCTTCTAGCTCCTGGGGCAGTTTCTCTTTAGCTGAAACTTCCCTTCATCTTCCACCAATACCATGTTGCGTTACAGT TTCCCTCTTCTCACAGAACGAGCCTTGGGAGAGGAGTGTGTTCTGTCACACAGCCTGGCCATGGCTCAGGTCCACAA GGTCAGCTCCAGACTCTCAGTGCAATGAGGGACCATGAGTAGCTTCTGCTTGCTGAGTGCTTTCCAAGTGGCGGGGC CTCTGCCAAGTGCTTTGTGATCCTCATATCCAAGTGGAGGAAACTCAACTTTAGACAGTGACTGAGCTCCAACAGCT GATCCTTGGCACAGATGAGACTTGAACCTGGGTCCTTCTGACTCCAGAATGCAAGCTCATAGGAAGGGGTAAATTTA CTGGGAAGATCTCTGCTGGCCAGGTCCTTGATGGCACAGGGCCACGTGCAGGTGGAGTCCAGGCGAGACTTGTCCTT GGGAACACGAGCTGGTTTTGAAGCTACTGTAGTCCTGGGTTGCCCGCCCATGGGTGTTGTGAGGACGCTCTCCAGCA TCACTGCTGCCCACGTGCCCTGAGGGGTCTTAGGTTCCACCCCAGGTCACATTCAGTGTTTTGTCTGATTCTTCACC AGAAGGGAGCAGCCTCACGCAGACTGAGCAGGAACAGTGGCATTGGTGTTTTCCACAGATCTTTTGGAAGAATTTGA ACTTCTGATCATGTATATATGACACTTTTTAAAGTTTTAAGTGATGCATGGAAACTTGATATTGTAAATTTAAATAT CAGTCATTTTCAGTTTTGTCTCTTTGCTGCTCAAAATGAAAAATCTTCTCACTCTTCCCCTACTCCATAATATGGTC ATGGAGTTTTGACCTAATTAAAAGCATCAGAATTAAGTTGCTAAGTTTGAATGGGAATGTAGTGGTGTTTAAGGGGA CTTAGGAGACCCTGTCCTCATGTCCTTTCTGTCACTATAGGTTTTGTTACTGTTTAAAGTCCATCTGCCCAGCTTTT AGATAATTAATTCTAATTTTGAGAACTTGGGAGATGTTGCAAAAACTGTTGGAGCTGATTTTAAGATTGGTGTAATA TACCTGGTATTACTAGAGTCAGTCAGTGAAGTCATAGATGAAGTTGTGACATTTGGCCCAGGGTTCCCTGCTGAATT CTGAAATACCATGATGCTATCAAGAGAAGAGCCATGGGTTAGCCAGTCTCCATGTGACACCCAGTGAGCTTCACTGC TGGTACTCCCACTCTTGTTCCTTCTCGGATGGAGTCAGGTCTGGCCCCAAGCTACAGCAGGATATGGAGGAAGTGAT GGTGTGCGACTTCCGAGGCTAGGTCATAAGAGGCCTTGCAGCTCCCAGTGTCCTCAGTCACCTGCTGTGAGGGCAGC CAGTACCATGTCAGAGGACATACAGGCAGCCCCAGGAGAGGCCCATGTGGTGAGGAGCCAGGGAAGTCAGCCCTGTT GGAAATAGATCCTCCAGCCCCAGTCGAGCCTTCGGATGAGTGCAGCTATGCAGAAGACCCCAAGTGACAACTGCTGA GCCCGACCCTTCTGAATTCAAGGCCATGAAAGAAAGGTCATTTGTGTTGTTTGGGGCCACGAAGTTGGGGATTATCT GTTACCTGTCTGTAGTGACTGGCACAAGATGTGAGGCACTCCCCAGTAGTTACTTATTCATCACACTTCCTTTCATA GCTGGTCCTTGTCCTTTCCTCTGGTGTAAAGTACAGACTGTGAAGACCCGCCCTCTGTTCCTTCCAGCTGTTTTTGG CTGTCTCTTGTGTACAAATGCTGTAGGAGATGCAAAGGTGACTCGCAGCATCCCCCAAGAATGCCTGGGCTTGGTGC TGCCAGAAAGGTATATGAGGAGCCCCGGGTAAGCCAGCACTGCAGGCAGCAAGGTAGCCTTCAGCTGTGTGGGCTGG GGAGAACTTCATGGAGGAGGTAGCATTTGCACCAGACTTTGAGGTAGATGGGATTTGAACACATGGAGTAAGGGGAA ACAACATAGACTGAGGCTGGGCCTGTGTGTGAAACAGCAAGCAATCCCTTCTGGCTGGAGCAGGGGAGGGTGTGAGG AGGGGCTGCCAGCCTCCCTCCAGGCCAAGAAGGCCATCAGGTCTCACTGGGGGACAGTGAGGAGCTACTCAAGGCAT GATGGGAGCCAGGCTGGACTTGAACAGGACTCATTGGACTGTCCAGGTGCTGGGTGAGAGAGGGAGGAGGGGACATG GAGCCAGCACCAGGGGACAAGGGGGACCTGAAGCAGCTGTGACCGTGGATGGCAGGGAAAAGAAGAAGAAGGGATTC ATTTTGGCATAGAGTTGGGAATTGCAGCAGTCACTTGAGAATGACAGAGATGGGAAGGTTAGGGATTAGGGTCAGTG GCATGGACGTGAGCGATGAACCCATACAAGTGGGTGAGAAAAAGGCTGAAGAAGGTGAGGCAGCATAGGGAGTGGGT GACGCCAGTGATGGCTGATGTGGTGTGACCAGAGGAAGGGGCCAAGGGGGCGGACCCCGCAGGGTCCATAATGGTGG TGATTGCCTTGGGGGAGTTCAGGGGTCGCAGAAGAGGACCTGATTATGCCATCCTCACTTGTAAATTCTGCTTGGTC TCCTGACGCTATCAGGGTCAGACCCAGCCCTCTCATGGCCCGCTGTGTGGCATGTGCTGCTCCCTGGCTCTTGCCCA TGCCCCTCCTCCTGGCCAAGCCACACTCCACCTGCATCAGCCATAGGCCCTCCCGCCACTGCCCGCCTGCAGGTCTC AGCACCAGCGTTGCCTCCCCAGAAGCCTCCCTGACCATGGTCCCTGTTGTGTGCCCCACCACCCCCTGTTCTCTGTC CCCCTGGTATTGGTTCGTCTGCTTGTGGTAACTGCTGAATGCCAGCCCCAATGCCCCCGCCTCCCATCGCCATCAGC GTCACCAGCATCACAAAGGTCAGCACGAGGTAGCTGCTCACAGAATATTTATTAAGAATAAGAAATTAATAAAGGGA CTAATTGGTAAATCTTAACATGCCCACACTGGGTCTTTTCCCCATGTCACGTGAGCCTGAACTTGGAACATCCATAT TTCCAGAAGACATCAGGCTCTTTCTCTAGTGACCTTAGAAATCCCCGCATTGAAGGGAGATGGCCCTGGCATGGGGC CCCTGCCACTGGGTGGGGAGGGGTGGGGACCAGACTGTGCCAGGGACCCCAAGGAGTTGGAGGGTGCAGAGCTTCTT GACCTGAGTGGACAGGGAGACCCTCTGAGCTCATCCTCTGTAACAGGATGAGCATGGACTCTTCAGGGGACAAACTT CGTGCCTCGTGTGAAAAACGAAAGGGCCCCACGGGCTGTGTCTGATGGTGTTACCCACTGCACAGGGAAGGCACCTT TGCACCCCAGTCCCAGCCAGGAGAGCAGCAGGTCGCAATGTCTTGCTAGCCTGGCCCCTCTGCCCTCAATGACTTTG CAAGCACCTTGGCCTCCCTGTCCCACTCCCCTGCCGGCACCTGCGTGTCCCTGTCCTGCCGAGCTGCCAGCCTCACC TGCGTGCCTCTCGTCCTCATTTGAATAGGTGAGCAACCAAAGTCAGCTGTGCCGTTGGAGCCGGATTCCATCACTCA AAATCCAGGCACAGCTCCTTTTGAATTCCTCAGCTGCCCCGAGGCAGGGGCTCAATGTTGATACTGAGATTAATCCC CAAAGAGCTTCTCATTTCTCTGCAGAGAAATTAAAGCTTGCCAGTTTCCTTTTGCCCGTCCTTCTGACAGCTCTGTC AGTAATGATATGCCTGCCGCGTGGCATAATCCGTGTCCCGTGGTAAAGAATAATTCATTAAGAAATTTAGGGCCCAG CTCCTTTCCGTTGGGTTGGTCTTCAAAAGTTAACTAATGGCGGCAGCAGCACGATGATCAATGGAAAATTATTGAAC AGAGCTCAGGGCTGCTTCAGACCAGCTCAAGGAGCCACCTGGGTGGAGAGCAGTCAGACCCACCCACCCCCTTAGAT TTGTCAGCATTCCCTGAAACACAGTCAGACGGTGTTGATATGAGGTGTCTGCTGGGCGTGGACAGTGGGGTGGATGG GGTACTGCCCTAGTTTGGGAAGCAGCTTATTTTTAGCCTTGTAGAAGCAGCGTGAAGTGTCTACTGGTAAAGCCAGC ACGACTTCTCCTCCCTTCTGAACACCAGCAAGAAGCTTCTAGATGTTTCTGATGAACAAATAGGAGTTCCTGTACTG GCTGAGAGGGGCAGCCTACATACTTAGGTTCTTTGGGGAGGTCAGTGCGTTTTTAGCAACCATTGGCGCATTGAGCA TGAAATGGCGTGGAGCTGAAACTCACTACCAACTGCAGTGAAACCAACAAATGGAAGACGTGAACTGATGCTGGCCC TAATGACTCTGGGCAAGACGAGGGACATTATTGTTTTGCATGCATTGATAATGTGTCATCTGGAATCAGATTTTCTA CTTTCATGTTGTTCGATAACAAGGTTGTGCCCTGTGAGTCTGGGATTGTGTGAGGCGAGCGTGCGTATTCATTCTAC TGCAGAGGAGGCTGGGGAGGAATCAGAGCATCCTGTGTCTGCAAGGTCTGGCGTGTTTCTAAGGGAAGGCAGAGAAA GCCAGTGCTCCAAAGACAGCAGAGCAGACGCGAGGTTTGCAGGCATGAGGATGACAAATGAAATTCGCAGAATTCCT CAGACTTGATTTCCCTCCCTTCTATAATTAACCTCAGGGATACCTTGACTGCGCTGAGGTCCATGTGCTTGAGCACT TGCTGTCCTGCTTGCCCTGCCCTCCTCTGATTTTTTTTTGCACAGCATGATTCTATTTCTGCTATTGTTCAGAAACC ATTAGCACCTATTCAGAAGTCAGTTATTCAGCTTTGAGCTGAATGACAATTATTTGAATGGTAAAGGGTGTTAATGT ATAATTATTCACATTCATACCAGGACAGTCACAGTTTAATCATTTCTCTGTAGGCTTCCTTAAGTTTGTGCTTAAAG TCTTAGGCATAATTCTTTTGTTAAATAAGTTTAGGAGGCTCTAAGTATTGGGAAAGTGAGTATAAATACGCCTCTGG GGGAGCTTCAAGGATGTGGTGCCTCACCTCCAGGAGCGAGCCTCCTAGGTGAAACTGTCACTAGGCGCCCCACACTT CAGCCAGGAGGAAGGTCCATTTCCGAGGGCTGGTAGCATAATCTGGCCTCCAGGTGAGCTCTGAGGTCGTGTTCTGG CGTGCCCAGGACTAGATGGAGCCTACCGGGGCATTCCTATGTGTGACACAGAGCCCTGCCAGGCCCGGTCGGGCTCA GAGTGGGCTTAAATTAACCCTTCAGACCCTCGATTCCTCTGGACCCCTCTTTAAGATGATTGACGACCCCAAAGAGC TTTTGATGATAAGGGCTATATTGTGCACATTTGCCATATTGGAAATTAAACCTAAGACTTTTTTTTTTTTTTTTTTT TTTTTGCGACGGAGTCTCGCTCTGTTGCCCAAGCTTGAGTGCAGTGACACGATCTCGGCTTACTGCAACATCTGCCT CCTGGGTTCAAGAGATTCTTCTGCCTCAGCTTCATACACCCTGCATATGCCGGCTGCCTCCTCAAGCAGTACAGCTG GGATTACAGGCACCCGCCACCACACCCGGCTGATTTTAGTGTTTTTAGTAGAGTTGCGGTTTCACCATTTTGGCCAG GCTGGTCTTGAACTCCTGATCTTGTGATCCACCTGCCTCGGCCTCCCAAAGTGCTGGGATTACAGGCCTGAGCCACC ACGCCCTGCCCTGAGACTTTTTAAATGTATTAACTTATTTAAAAATAACAACAGTAAACCTATGGCAGGATATCATA GGTAATATGCTTCTGGAAATGAGTTTTCCAAGACAGACACTTGAGGAGAGTGGCACTGTTGTCCATTTTTGCAGAAT GGAATGCCTTGATGCCTGCCTCAGTGGAAGACAGCTGGGTTCTCAGATCTGCCTCTGCGTTTAATCCGTTGTGTTGT CACATCACGTAGCCCCCAGAAAACTCTTTTGTCACCTGTAAGAGAATGAGAATCTAAAAGGCAAATAACATCCTAGT ATTGCTATGGAAATGATTTTGACCTCACAAACCCCCTAAAGGGGTCTCAGTGACCCCTGATGATCCCTAGACCACAT TTTGAGAATCTCTGTTCTAAAAAGTCCATTTCTTTTACTCTAAAATATTACTCACATTGCCTGATATGTTGTGGGCT CCTCCTTTTTTAAATTTTTTTTATTATACTTTAAGTTCTAGGGTACATGTACACAATGTGCAGGTTTGTTACGTAGG TATACATGTGCTATGTTGGTGTGCTGCACCCATCTATTCGTCATTTATATTAGGTATTTCTCCTAATGCTATCCCTC CCCCAACCCCCCACCCCCCGACAGGCCCCAGTGTGTGATGTTCCCTGCCCTGTGTCCATGTGTTCTCATTGTTCAGT TCCCACCTGTGAGTGAGAACATGCGGTGTTTGGTTTTCTGTCCTTGTGATAGTTTGCTTAGAATGATGGTTTCCAAC TTCATCCATGTCCCTGCAAAGGACATGAACTCATCCTTTTTTATGGCTGCATGGTATTCCATAGTGTACACATGCCA CATTTTCTTTTTTTTTGGCATTTTTTTTAATTTATTATTATTATACTTTAAGTTTTAGGGTGCATGTGCATAATGTG CAGGTTAGTTACATATGTATACATGTGCCATGCTTGTGCACTGCACCCACTAACTCGTCATCTAGCATTAGGTATAT CTCCCAATGCTATCCCTCCCCCGTCCCCCCACCCCACAACAGTCCCCAGAATGTGATGTTCGCCTTCCTGTGTCCAT GTGTTCTCATTGTTCAGTTCCCACCTATGAGTGAGAATATGCAGTGTTTGGTTTTTTGTTCTTGCGATAGTTTACTG AGAATGATGATTTCCAATTTCATCCATGTCCCTACAAAGGACATGAACTCATCATTTTTTATGGCTGCATAGTATTC CATGGTGTATATGTGCCACATTTTCTTAATCCAGTCTATCATTGTTGGACATTTGGGTTGGTTCCAAGTCTTTGCTA TTGTAAATAATGCCGCAATAAACATACGTGTGCACGTGTCTTTATAGCAGCATGATTTATAGTCCTTTGGGTATATA CCCAGTAATGGGATGGCTGGGTCAAATGGTATTTCTAGTTCTAGATCCCTGAGGAATCGCCACACTGACTTCCACAA TGGTTGAACTAGTTTACAGTCCCACCAACAGTGTAAAAGTGTTCCTATTTCTCCACATCCTCTCCAGCACCTGTTGT TTCCTGACTTTTTAATGATTGCCATTCTAACTGGTGTGAGACGGTATCTCATTGTGGTTTGGATTTGCATTTCTCTG ATGGCCAGTGATGGTGAGCATTTTTTCATGTGTTTTTTGGCTGCATAAATGTCTACTTTTGAGAAGTGTCTGTTCAT GTCCTTCGCCCACTTTTTTGATGGGGTTGTTTGTTTTTTTCTTGTAAATTTGTTTGAGTTCATTGTAGATTCTGGAT ATTAGCCCTTTGTCAGATGAGTAGGTTGCGAAAATTTTCTCCCATTTTGTAGGTTGCCTGTTCACTCTGATGGTAGT TTCTTTTGCTGTGCAGAAGCTCTTTAGTTTAATTAGATCCCATTTGTCAATTTTGTCTTTTGTTGCCATTGCTTTTG GTGTCTTAGACATGAAGTCCTTGCCCATGCCTATGTCCTGAATGGTAATGCCTAGGTTTTCTTCTAGGTTTTTTATG GTTTTAGGTCTAACGTTTAAGTCTTTAATCCATCTTGAATTGATTTTTGTATAAGGTGTAAGGAAGGGATCCAGTTT CAACTTTCTACATATGGCTAGCCAGTTTTCCCAGCACCATTTATTAAATAGGGAATACTTTCCCCATTGCTTGTTTT TGTCAGGTTTGTCAAAGATCAGATAGTTGTAGATATGCGGCGTTATTTCTGAGGACTCTGTTCTGTTCCATTGGTCT ATATCTCTGTTTTGGTACCAGTACCATGCTGTTTTGGTTACTGTAGCCTTGTAGTATAGTTTGAAGTCAGGTAGTGT GATGCCTCCAGCTTTGTTCTTTTGGCTTAGGATTGACTTGGCGATGCGGGCTCTTTTTTGGTTCCATACGAACTTTA AAGTAGTTTTTTCCAATTCTGTGAAGAAAGTCATTGGTAGCTTGATGGGGATGGCACTGAATCTGTAAATTACCTTG GGCAGTATGGCCATTTTCACGATATTGATTCTTCCTACCCATGAGCATGGAATGTTCTTCCATTTGTTTGTATCCTC TTTTATTTCATTGAGCAGTGGTTTGTAGTTCTCCTTGAAGAGGTCCTTCACATCCCTTGTAAGTTGGATTCCTAGGT ATTTTATTCTCTTTGAAGTGATTGTGAATGGGAGTTCACTCATGATTTGGCTCTCTGTTTGTCTGTTATTGGTGTAT AAGAATGCTTGTGATTTTTGTACATTGATTTTGTATCCTGAGACTTTGCTGAAGTTGCTTTTCAGCTTAAGGAGATT TTGGGCTGAGACAGTGGGGTCTTCTGGATATACAATCATGTCATCTGCAAACAGGGACAATTTTACTTCCTCTTTTC CTAATTGAATACCCTTTATTTCCTTCTCCTGCCTGATTGCCCTGGCCAGAACTTCCAACACTATGTTGAATAGGAGT GGTGAGAGAGGGTATCCCTGTCTTGTGCCAGTTTTCAAAGGGAATGCTTCCAGTTTTTGCCCATTCAGTATGATATT GGCTGTGGGTTTGTCATAGATAGCACTTATTATTTTGAGATACGTCCCATCAATACCTAATTTATTGAGAGTTTTTA GCATGAAGGGTTGTTGAATTTTGTCAAAGGCCTTTTCTGCATCTATTGAGATAATCATGTAGTTTTTGTCTTTGGTT CTGTTTATATGCTGGATTACATTTATTGATTTGCATATATTGAACCAGCCTTGCATCCCAGGGATGAAGCCCACTTG ATCATGGTGGATCAGCTTTTTGATGTGCTGCTGGATTCGGTTTGCCAGTATTTTATTGAGGATTTTTGCATCAATGT TAATTAAGGATATTGGTCTAAAATTCTCTTTTTTGGTTGTGTCTCTGCCCAGCTTTGGTATCAGGATGATGCTGGCC TCATAAAATGAGTTAGGGAGGATTCCCTCCTTTTCTATTGATTGGAATAGTTTCAGAAGCAATGGTACCAGTTCCTC CTTGTACCTCTGGTAGAATTCGGCTGTGAATCCATCTGGTCCTGGACTCTTTTTGTTGATAAGCTATTGATTATTGC CACAATTTCAGCTCCTGTTATTGGTCTATTCAGAGATTCAACTTCTTCCTGGTTTAGTCTTGGGAGAGTGTATGTGT CAAGGAATTTATCCATTTCTTCTAGATTTTCTAGTTTATTTGTGTAGAGGTGTTTGTAGTATTCTCTGATGGTAGTT TGTATTTCTGTGGGATTGGTGATGATATCCCCTTTATCATTTTTTATTGCGTCTATTTGATTCTTCTCTCTCTTTTT CTTTATTAGTCTTGCTAGCGGTCTATCAATTTTGTTGATCCTTTCAAAAAGCCAACTCCTGGATTCGTTAATTTTTT GAAGGGTTTTTTGTGTCTCTATTTCCTTCAGTTCTGCTCTGATTTTAGTTATTTCTTGCCTTCTGCTAGCTTTTGAA TGTGTTTGCTCTTGCTTTTCTAGTTCTTTTAATTGTGATGTTAGGGTGTCAATTTTGGATCTTTCCTGCTTTCTCTT GTGGGCATTTAGTGCTATAAATTTCCCTCTACACACTGCTTTGAATGCGTCCCAGAGATTCTGGTATGTTGTGTCTT TGTTCTCGTTGGTTTCAAAGAACATCTTTATTTCTGCCTTCATTTCATTATGTACCCAGTAGTCATTCAGGAGCAGG TTGTTCAGTTTCCATGTAGTTGAGCGGTTTTGAGTGAGATTCTTAATCCTGAGTTCTAGTTTGATTGCACTGTGGTC TGAGAGATAGTTTGTTATAATTTCTGTTCTTTTACATTTGCTGAGGAGAGCTTTACTTCCAAGTATGTGGTCAATTT TGGAATAGGTGTGGTGTGGTGCTGAAAAAAATGTATATTCTGTTGATTTGGGGTGGAGAGTTCTGTAGATGTCTATT AGGTCCTCTTGGTGCAGAGCTGAGTTCAATTCCTGGGTATCCTTGTTGACTTTCTGTCTCGTTGATCTGTCTAATGT TGACAGTGGGGTGTTAAAGTCTCCCATTATTAATGTGTGGGAGTCTAAGTCTCTTTGTAGGTCACTCAGGACTTGCT TTACGAATCTGGGTGCTCCTGTATTGGGTGCATATATATTTAGGATAGTTAGCTCTTCTTGTTGAATTGATCCCTTT ACCATTAAGTAATGGCCTTCTTTGTCTCTTTTGATCTTTGTTGGTTTAAAGTGTGTTTTATCAGAGACTAGGATTGC AACCCCTGCCTTTTTTTGTTTTCCATTTGCTTGGTAGATCTTCCTCCATCCTTTTATTTTGAGCCTGTGTGTGTCTC TGCCCGTGAGATGGGTTTCCTGAATACAGCACACTGATGGGTCTTGACTCTTTATCCAATTTGCCAGTCTGTGTCTT TTAATTGGAGCATTTAGTCCATTTACATTTAAAGTTAATATTGTTATGTGTGAATTTGATCCTGTCATTATGATGTT AGCTGGTTATTTTGCTCGTTAGTTGATGCAGTTTTTTCCTAGTCTTGATGGTCTACATTTTGGCATGATTTTGCAGC GGCTGGTACCGGTTGTTCCTTTCCATGTTTAGTGCTTCCTTCAGGAGCTCTTTTAGGGCAGGCCTGGTGGTGACAAA ATCTCTCAGCATTTGCTTGTCTGTAAAGTATTTTATTTCTCCTTCACTTAAGAAGCTTAGTTTGGCTGGATATGAAA TTCTGGGTTGAAAATTCTTTTCTTTAAGAATGTTGAATATTGGCCCCCATTCTCTTCTGGCTTGTAGAGTTTCTGCC AAGAGATCTGCTGTTAGTCTGATGGGCTTCCCTTTGAGGGTAACCCGACCTTTCTCTCTGGCTGCCCTTAACATTTT TCCTTCATTTCAACTTTGGTGAATCTGACAATTATGTGTCTTGGAGTTGCTCTTCTCGAGGAGTATCTTTGTGGCAT TCTCTGTATTTCCTGAATCTGAATGTTGGCCTGCCTTGCTAGATTGGGGAAGTTCTCCTGGATAATATCCTGCAGAG TGTTTTCCAACTTGGTTCCATTCTCCCTGTCACTTTCAGGTACACCAATCAGACATAGATTTGGTATTTTCACATAG TCCCATATTTCTTGGAGGCTGTGCGCGTTTCTTTTTATTCTTTTTTCTCTAAACTTCTCGCTTCATTTCATTCATTT CATCTTCCATCGCTGATACCCTTTCTTCCAGTTGATTGCATCGGCTCCTGAGGCTTCTGCATTCTTCACGTAGTTCT CGAGCCTTGGTTTTCAGCTCCATCAGCTCCTTTAAGCACTTCTCTGTATTGGTTACTCTAGTTATACATTCTTCTAA ATTTTTTTCAAAGTTTTCAACTTCTTTGCCTTTGGTTTGAATGTCCTCCCGTAGCTCGGAGTAATTTGATCGTCTGA AGCCTTCTTCTCTCAACTCGTCAAAGTCATTCTCCATCCAGCTTTGTTCCGTTGCTGGTGAGGAACTGCGTTCCTTT GGAGGAGGAGAGGCGCTCTGCTTTTTAGAGTTTCCAGTTTTTCTGCTCTGTTTTTTCCCCATCTTTGTGGTTTTATC TACCTTTGGTCTTTGATGATGGTGATGTACAGATGGGTTTTTGGTGTGGATGTCCTTTCTGTTTGTTAGTTTTCCTT CTAACATACAGGACCCTCAGCTGCAGGTCTGTTGGAGTACCCGGCCGTGTGAGGTGTCAGTCTGGCCCTGCTGGGGG GTGCCTCCCAGTTAGGCTGCTTGAGGGTCAGGGGTCAGGGACCCACTTGAGGAGGCAGTCTGCCCGTTCTCAGATCT GTAGCTGCGTGCTGGGAGAACCACTGCTCTCTTCAAAGCTGTCAGACAGGGACATTTAAGTCTGCAGAGGTTACTGC TGTCTTTTTGTTGGTCTGTGCCCTGCCCCCAGAGGTGGAGCCTACAGAGGCAGGCAGGCCTCCTTGAGCTGTGGTGG GCTCCACCCAGTTCGAGCTTCCCGGCTGCGTTGTTAACCTAAGCAAGCCTGGGCAATGGCGGGTGCCCCTCCCCAAG CCTCGCTGCCACCTTGCAGTTTGATCTCAGACTGCTGTGCTAGCAATCAGCGAGACTCCGTGGGCATAGGACCCTCC AAGCCAGGTGCGGGATATAATCTCCTGGTGCGCCGTTTTTTAAGCCCGTCGGAAAAGGGCAGTATTCAGGTGGGAGT GACCCGATTTTCCAGGTGCCGTCTGTCACCAATTTCTTTGACTAGGAAAGGGAACTCCCTGACCCCTTGCGCTTCCG GAGTGAGGCAATGCCTCGCCCTGCTTTGGCTCGCGCACGGTGCACGCACCCACTGACCTGCGCCCACTGTCTGGCAC TCCCTAGTGAGATGAATCCGGTACCTCAGATGGAAATGCAGAAATCACCCATCTTCTGCGTCGCTCACACTGGGAGC TGTAGACCAGAGCTGTTCCTATTCGGCCATCTTGGCTCCTCCCCATGTGCCACATTTTCTTAATCCACATCATTGAT GGGCATTTGGGTTGGTTCCAAGTCTTTGCTATTGTGAATAGTGCCGCAGTAAACATACATGTGCATGTGTCTTTATA GTAGCATGATTCACAGCTGAATTCTACCAGAGGTACAAAGAAGAGCTGGTACCATTCCTTCTGAAACTATTCCAATG AATAGAAAAAGAGGGAATCCTCACTAACTCATTTTATGAGGCCAGCATCATCCTAATACCAAAGGCTGGCAGAGACA CAACAAAAAAAGAGAATTTTAGGCCAATATCCCTGATGAACATTGATGTGAAAATCTTCAATAAAATGCTGGCAAAC CGAATCCAGCAGCACATCAAAAAGTTTATCCACCACCATCAAGTCGGCTTCATCCCTGGGATCCAAGGCTGGTTCAA CATACACAAATCAATAAACATGTTCCATCACGTAAACAGAACCAAAGACAAAAACCATATGATTATCTCAATAGATG CAGAAAAGGCCTTCAACAAAATTCAGCAGCGCTTCATGCTAAAAACTCTCAGTAAACTAGGTATTGACGGAACGTAT CTCAAATAATAAGAGCTATTTATGACAAACCCACAGCCAATATCATACTGAATGGGCAAAACTGGAAACATTCACTT TGAAAATCGGCACAAGACAAGGATGCAGTCTCTCACCACTCCTGTTCAACATACTGCTGGAAGTTCTGGCTAGGGCA ATCAGGCAAGAGAAAGAAATAAAGGGTATTCAATTAGGAAAAGAGGAAGTCAGTTGTCTCTGTTTGCAGATGACATG ATTCTATATTTAGAAAACCCCATTGTCTCAGCCCAAAATCTCCTCTTTTTTATTTTCGAAAAAATTACAGCAGAGTT CACTCTTCTTGGTGTGCAGCAGGAGGTGCACGTGCTGTGCTTGTCCATCAGTGTCTGCTTTGTGCATCTCTGTTGAC CTGCCTCTAACACTGGGACGAGCATCAGCCAAATCAGAACCAGGTCAGAGCCCCTACGCCCTGGTCAGATCAGAACC AGGTCAGAACTCCCCTACACCACAGTCAGATCAGAACCAGGTCAGAACCCCTATACCAAGCTTGTCCAATCCTCAGC CTGCGAGCCACCTGCAGCCCAGGATAGCTTTGAATGTGGCCCAACATAAATTCATAAACTTTCTTAACACATTATGA GTTTTTTTATGATTTTTTTTAACTCCTCAGCTATCATTAGTGTTAGTTATTTTATATGTGGCCTAAGACAATTCTTC CAGTATGGCTCAGGGAAGCCAAAAGATTAGACACCCCTGCCCTACACCTTGGTCAGATCAGATCCAGGTCAGAGGCC CTACATCCTGTCCCCACAGTGGACAGGTTGGAAATGTAAGGTCGTGTGGCCACTGGGGGCCCAGGATGGGCTCTGCC TCAGAGGCACTTCCTTCCACCTGGCCTGTTTTAATCAACAGTCATTAAAGGGAAATCTAAAGATGTTTAAAACGTTG TGTATTTTCTCGTTAGCAGAGCCAAGAATCAGTCTGCAGGGAGCAAAGAGCTTGAGTGTGGAGTTAGAAGTCGGGGT CCGGGAAAGGGTGCTTGTTTCTGAGGCTAACATGCATCAGGTGCTCCAAGTGGGCTCTCATTGACCCCAGGATGCCA TCAGCCCCCTTGCCCTGCCTGGAGTATATCACATGGGCCCTGGGTGCCTGGGCCTGTGGAGCCACAGCTGCTGAGGT CCGGTGTTTTTAAAGCCTGAGAGAGGCCATCTGGGGGTAGCACTACAGGAGATGGGAAGAGGCCCCCAGGAAACCAG GGAGAGCAAGAAGGTCTTCTAAGGACTCATGTCCTCTTACCAACTACCATGTAGTTAAGAATGCCTTACGAAGGGGG ACGGGAGAGTCAAGGGATAGAAAATCAGTCCTTAAAATCTGCACTGTCCTTTCCACATACAAAGCACCTTTCACACA GGTGAGCTCATTTACCCTCAGATGGCACTTACTGTTGTGGGAACCTCATTTTACCAGGAGGAAACGGAGGGGCGACA GGACAGCGTTCTAGGAAGTAGCTCAGCTGTGGACATTTTGTGGTGAGCTCTCAGGGACAGCAGCAGGCATGGGATGC CTGCAGAGAGGCTTTCAGGAGAGCGCTGGCCCCACCTGCAGGCCCCCAGGGCGACCTTGGATAGGCTGCCGTCTGGG CCTGGGAGACTTCTCACCTGCAGAGTGGATGATGGGGGACCTTGAGGACTGAACAGGAGAAAGCACACTGAACCGAG CCTGGTACCTAGTAAGCACTCAGTAAGTCTTGGCACTTACTGTGATAATTGCATTTTAAGCCCAGCTACCAAAATTT CCAGACCTACGTTACCATCTTCAAATGAGTGCCCCTACCCGTTTCCCTAACGTTGCTCAAACTTGCATTTTCTGAGG AGCGTCTGTTGGATGCCTTTGGCCCTTGCACCACGTACAGCTTTCCACGCTTATTGGCTGGCCACTGGGTACCAAGG ACCATGGCGGGCACTCTGGAATGCTCTGTTTTGGCAAACTTTCTTCCCCAAGAACAGATTTGACTTTTGAAAAGTGG TCTGAAAGTCAGCCTCCCCAGCCCTGGTCACAGCAGAAATAGTTTTGGACCCAGGTGAGTTGAGTCCACAAAATAAC AGGCCGTGTCTACTTGAGCTGAAGCCTTATCAGTTGGCCCAGTAGGTCCCATCTGAAGAAGCCCTGTATTTTTGAAA AATGTTAACTCTCCCTAAAAGGTTACATTGAACGGCAACACCCGGGAGGCTGCTGTTGGCCTTGCCAGCAAGCTGAA CCTGCAGTTGAGTGGCCACGCGTGTGGTGCGAGGCGTGCAGCCCATCCCTGAGGGCTCCCCTGCATGGGAAAGGAGG CTGGGAGGTTCGCCAGGACTGCATGTGGCCCTCGCACCAAGAACCTGACCCATGGTGGAGGTGGTGAGTGCTGTGTG GTCGGCCTTGATGTTTATACGAGAGTCTCTGAGGTGTAGACATCAGTGTCTCCATTTTGGGGAGAGGGAGGCGGTTT TCTTCCCAGCTTACCATTACCACTGTGTTCGAGGAGGGACTGATATTTCGAGTGGGGTCACCATCACACTCACACCA CCAAGGCTGCTTTCCACCACTCAGCTTTCTCATGCATCCCGTTTCCCAGAGGTGGCCAGTGCCTGGGCCCTGAGTCG GTTGAGACTCATCCAGAGCAGAGCTGCAGAAGCTGGGCTGGCTCCAGACAGAGATGACCCAAAGCCTGTGTCAGCAT TTGGGTGCCTGGGCCCACCGTCCAGGCCTGAGAGAGCATCAGTGAGGCTCGGAGCCCCCATCAGCCAGGTCAGGCCG TGGCTCTGAGCCTAGTGCTCCTTTCTAAATGGGAGTTGCAACGCCAGCTTTGCAAAGTGGTTGTCAGGGCTCACTGA GGGGCTCTGGGGAGACTTTGGGGGAAGGATAATGATTGGGGAAGTAGAAATTGGCTCCCAAAATGCTAGAGCAGGAC TTAAGGGACTGATGGCCAGGCACCTGCCCAGTGTGGCATCCTCCCATCGTTGGCTCGAGCGCTGAGCTGCACCTCTG TGTCAGGACTTGCTCTCAGTGTTCTGTCTGGGGAGGTCATGTGCCTACTGGGTGGGGCAGGTCCTTGTGTGGGAGGA GCCAGAAACTCCCTTTTTTCTTAAAAGTTATTGGGCCAGAGGTCATGAATTCACCCTTAGCCTATGATCTCCAGTAA CTCTACCATCCGCAGGAAAATGACTTCACACCATGCGTAGGGCTGGAAGGAGCACTGGGATGGAGTCCCACCTCGGT GCGCGACCCGGGGCGTTCAGCAGTGCCCCAGGACCGCAGCAGCCCATGCTCAGAGCCAGGTCCTCAGGGCCGGGGCA TTCAGCAGTGCCCCACTACCATAGCAGCCCATGCTCAGAGCCAGGTCATCAGGGCCAGGGCATTCAGCAGTGCCCCA CGGCTGCAGCGGCCCATGCTCAGAGCCAGGTCCTCAGGGCTGGGGCGTTCAGCAGTGCCCCACTACCACAGCAGCCC ATGCTCAGAGCCAGGTCATCAGGGCCGGGGCATTCAGCAGTGCCCCACGGCTGCAGCGGCCCATGCTCAGAGCCAGG TCCTCAGGGCTGGGGCGTTCAGCAGTGCCCCACTACCATAGCAGCCCATGCTCAGAGCCAGGTCATCAGGGCCGGGG CATTCAGCAGTGCCTCACAACTGCAACGGCCCATGCTCAGAGCCAGGTTCTCAGGGCCGGGGCGTTCAGCAGTGCCG CACGACTGCAGTGGCCCATGCTCAGAGCCAGGTCTTCAGGGCCGGGGCATTCAGCACTGCCCCACCACCGCAGCTGC CCATGCTCAGAGCCAGGTCATCAGGGCCGGAAGATGGCAACTTGATGCTTAGCCTTCAAAGAGGTGGTAAACGATAA AAAAACGGAGCCATGCCTGGATTCAAGAGCCTCTGAAATCCTACCACCTAATCACTGTCTTCCCTAATTTCCCCTTG GCCGCTATGTGGGTGGTATATGGTGGGCTGTTGGGTGGAGCGGGGGGGGTCGTTACTGATCTATCTGGAATACCCGC TTTATCTCTACCCAGCAAACTGCTACCCATCCAAGACCCAGGCCCACCTGTCACTTCCACTCTGGCACCTCGTTCGC CATCACCTCACTCAGGAGGGTTCCACTGGTGCTTGCCGGCGAACGCCACCATTTTTTGCAGCATATCTCATAGCTTG TTGGAAACCCACGTTGAGTTGGGGCTTTGTTCATCCACAGGTGCTGTCACGCATCCGTTTTCAGGAGACAGAGATGT CCTCTGTGGCCCTCCGTTGGCCGACCCTGTTGGGTGCAGCAGCTGTCAGTGGACAGAGGTGCATCAGTGCGTTGGTT GGTGGCATCGTGGCCTCACCGGCCCACAGTTCTGACAGAGGTGTCTGTGTTTCACCAACTCAGTCTGTCCCTGCCCA TTGTCCGCACACTCATTCCCTCCATGCCCCAGTCTGGCACCCTCAAGTGCAAGTGCGTGCATTTAATTCACGTAGTG TGTTGGTTGGGTGCACTCCTGGACCTTTGGGGAGACTGTCTTCTTCCATGTTAGCTGCTTCCTTCTTCCCTGTGGGG TCATAGAGGTCACAGCTGACATGCTGAAACAAATGCCATTGTTTTCACTTAAACCACATTGTATTCCATAGCCGCTG TGTCATATGCGTATATATAATAGTGTGTAAGGCGTATGGAAAGAAGAGATTGTGTCCAGACTGGCTACAGATGGTCA TCCTAATGGCGGAAGCAGCCAGGCCAGTTGGGCTTGACTCTGGAGCTTTGGAGGGCCATCCTCAGTGTATTTGTTTT TATTTGTGGAGGCCCCGCAGCGCTCATGCTGGCCATGCCTGGCTGGGATGGGATGACCTGGTGAGGACAGAGGAGGA CAGCCTCTGCTTCCATGATGAATAAAACAGCATCTGGCTGGGTAGGAGGAAAGCCTGTGCTTGTTCAGCCTCAAGTA CGTGTTTGAAAGCTTGCCCCAAAGACATTCCAAAAACCAGGCAGTGGTGGTGTCCTGTCCTTCTAGAGGCCAGGTTG TCCAGGCCCAGGGGAGTCTTGCTTAGGGGTCAGTGAGCGCTGGGACTCAGTCTGGCTCCTGGCAAGCCCAGAGAACC CCACTGCTGAGTCTCTACACAAGGCATTGGACGGGGCTGCTGTGGGTGTGCGCCAGGCCACCTCCATGCCTGGGCAG CTGTGCACAAGCTGGCTATGAGCTCCATGGCATACAGAGCACGTCCAAACTAACCTGGTAGCCCAGTCCCATGGAAA GTGTGTGACATCGTGTCCCTGCCTTCGGAGTGAGCAAGCCACAAGCCAGATGTCAGGGGCTGTTCCTTCTGCAGGTC ACCCACTGGCTGGCCAAGCACCGTGAAGCTGGGCGCACCTCCTCCAGGGACCATACTAAAGCAGCTAGCAGCACCTT CCCCCTGCTGTGAACCCCATGCCTGACCTGAGCCTGAGCCCTCACAGGCCTGGCAAAGGCTGCCTGCAGAGGCCTGG GCCACACAGGCCCTATGGCTTTCCTGCGTGCCACGGAGAGCCAGCCAGTGGGGCTGCAGGCACCTCCTCCCGCTCAC TCTCAGTGTGCGCCTCCACAGGGACCACAGACCACAGGAGCTCCTGGCCCGCCACATCGCCAGCCGTGTGCGCAAGG TTTATCAGGTTCCTCTTGGCCAGGTTGAAGTAGATGCCGGGTGGGGATCTGTAGGCCCTGGTTGTGTTTACAGAAGA TGCTGCCCTTCACTGTCTTCCAGCCTCCCAGGAAAGGATGGTCCCCAGGCTCCATGCTGACACCACCCACCTTGCTT CACCCAGTAGGCGCTTACTGTATGTCTACTCTAGGTCATCCACAGTGCTGAGTGTTGGGATAGAGCCCCGGGAGGTA GGTGCCTGGTCCTCCGTGAGTCTGGTGGAGGAGCCCTCCGTGGTGACAGCCTTCTGTGAGAGCATGGCAGGTGGTGG GGCCTCGTAGAGGGAAAGATTTTGCAGAAAATGTGACCTAGATTCCCTTTTAAATAGGAAATACTGGTCCCTAGTGT CTTGAACTTTGGGGAGAAAACTCCCTTTGATTAAAGAGAAGGTAACTTGGAAATGTGTTTTCCCTCATCTTTTTGTT AATTTATTTTTTAAATTAACATGTAGTGAAATTGGCTTTTTGTGGGGTATACAGTCCCGTGAATGTTAACGCGTGTG TGTGTTTCTGTAACCACCCCCAAAATCAGGGTGCAGAGGAGTTCCACCACCTGGACACCCCCACGCCGCCCCCTGGC AGCCACGGCCTCTCCCCACCCCCATTCCAGCTCTCAGCAACTGCGACGTGTTCTCCAACACCGTGGCTTTGTGTTTT TGAGAATGTCTTATAAATGGAATCAGACAGTATTTAACCTTTGGAGCCTGGCTTTTTTCACTCAGGTTAATGCCTTT GAGATTCATCCAAGTTGTTGCATGTATCTACAGCTTATTCATTTTTCTTGCTGAGTGTACGCTACCGTGTGGGTATA TCTCCATTGATCTGTTTTTTATTTTGGCCATTCTAATAGATATGTAATGATATCTCATTGTTTTCATTTGCGTTTCC CCGATGGCCAGTTATGTTGAACATCTTCTTTTGTGGTTATTGACCCCTCCTTATATCCTCTTTGGGGAAGTGTCAAT TCAAGTCTTTTGCCTTTTTTTTAAGTTAGGTGGTTTGTTGAGTTTCAGTTTGGAACTGTTGAGTTTGGAAAAATCTT TATATATTCTGGATAGGATAGGACTCTTGTTGGATTTCTTATTTCCAAATATTTTCTCCTAGCTAGTAGTAGCTAGT CTTTTATTCTCTTAACACTGACTTTCAGCCGGGTGCGGAAGCTCATGCCTGTAATCCCAGCACTTTGGGAGGCCAAG GGGGCGGATCATGAGGTCAGGAGATCGACTGCATCCTGGCTGACACAGTGAAACCCTGTCTCTACTAAAAAAATACA AAAAAAATTAGCCAGGCGTGGTGGCAGGCGCCTGTAGTCCCAGCTACTCAGGAGGCTGAAGCAGGAGAATGGCGTGA ACCCGGGAGGCAGAGCTTGCAGTGAGCCGAGATCGCACCACTTTGCTCCAGCCTAGGGGACAGAGCGAGACTCTGTC TCAAAAAAAAAAAAAAAAACAAACAAAAAAAAACACCTGACTTTCATAGACCAAACTTTTTCACAAACAAGTTTTTT TTCCCTTTTTAATGAAGTTCAATTTATCTCTCTCTTTTTTTTATCATGATTTGAAGGACATATCTAACAACTGTTTG CCTAACCCCAGGTCATGAAGATTTGTCATATAGTTTCTTTTTTTTTTTAGTTTAATGTTTTACATTTAAATCTATGA TATATTTTGAGTTAATTTGTTTAAGTAAGTCATGAGATTTACATCACGTTTCACTATTTGCCTATGGATATCCAATT TTCCAGCACCTCTTTTTGAAAATAATATGCTTTCTTCATTGAAATCCCTTTGCACCTTTGTCAATAAACATTTGGTC GTGCTTCAGTAGGTCTATTTTGGAAATCTCTCTTCTATTCTGTTAACTCCATCCAGTAACTCCATCAATACTCCAAC AAGCTGGGTATTTATCCCTTTGCAAATACATAATTATTATTATGTATAGTAAGTCTTGAAACCTGTCAGTGTGATTT CTCTAACCTTTTTTGTCTCTTGTAAAATATGTTGGCTAGTCTCAATCCTTTGCCCTTTCATCTAAATTTTAGAGTCA ACATGTCTATCTGCAATAAATTCTTCTAGGGTTTTTTAATTGGAATGATAATAAACCTATAGGTCAGTTTGTTAGAA TTCAAATTTTATGATATTGAGATTTCCATGAACATGATATGTCTCCTCAGTTATTCAGACATTCTTGTGATTACTTT TTCAGCATTTTGTAATTTCCAACAAACAGAGCCTATATACAAATTGTTAGATTTACATCTAAGTATTTTATTTGGTT GGAGCCATTATCAGTGGTATATAGAAAGGTGATTGATTTTTATTTAGTAACCTTGTATCTAGTGACTTTGCTAAACT CACTTATTAGTTCTAAGACTTTTCTATTATTTCCTGGGTATTTTCCCATAGACAATTATGTTGTCTGCAAATAGGGA GAGTTTGTTTCTTCTTTTCTAAAACAATTGTCTTCTATTTCCTCATCTTGCTTTTTTTGCACAGTTAGGTATGATGT TAACTGTGGGTTTTTTGCAGATACAGTTGTCAGATTGAGGATGTTACCTTCTGTTCTTAGGTTGCTGAGAGCTTTTA TCATGAATAGGTGTTAAATTGTATTAAATATTTTTTCTGACTGGATATAGATTATGTGTTTTTCTAGGATATTAATA TGATAGCTATTGTTCGTTTTTAATAGCCTTTGTTTTTAGAATAGTTTCGGATTTACAGAAAAATTGAAAAATCAGTA GGGTTCTCTGATACTGCACACCTATTTTCCCAAATTATACCATTGATTCTTATTATGATGACATTTACACTTGACAT CTTACATTAGTACGGTACATGTGTTATGATTCATGAACCATTGTTGGTACCTTAATATTAACTAAAGTCCTATGATC TTGAAGTTTTCTTAGTTTTTACCTACTGCCCTTCTTCCATTCCAGGATCCTGCCTTGGATACTGCATTCCTAGCTCC TTTGGCCCCTCTTGGCTGTGACAGGTCCTTAGTTTTAGATGGCCTAGACAGTGTTAAGGAGTACTGATTAACTATTT TGTAGAATGTTCCTCTTTTGGAATGTTTTATGCTTTTCTCATGATTTGACTGGAGTTACAGTGTGTGAGGAGAAAAA CCACATAGGTAAGCTGTCATTTTCCTGAGATCGTATCAAGGAGTCATGCTGTCAGTGTCATTTATCATTGTTGATGT CAACTTTGATTACCTGGCTGGGTAGTGGTGTTTGTCAGGTGACTCTATGATAAAGTTACCTTCCCCCATCTCCCCTG CGTACTGCACTCGTCCCGAAGAAGTTGCTGTACCTAACACACTTAGGAATGGGGAGTTACGCTCCTTGAAGACAGAG TATCTACATAAGTTACTGGGAATGCTTCTGCATGGGAGAGTTCTTCTCCCTCACCTATTTCTGTATTCAGTCATTTT TTTATGTTAGTATGGACTCAGGGATATTGATATTTTGGGTTGTCTTCCAATACTACTTTATTTTGTTGCTGAGATTA TCCCAGTTTTGGCCATTTGGGAGATTGTGCAGTTTGCTCCTGTGTCCCTTTGTCGTACTCTCCTCATCGTGGTTTGA CTGGAATGTTTGTCTTTGTTCTTTTGCTTCATTTCATTTTGGAGTGTGTCCTGACTTTCTGATACTGCAAGATTCTC AAGGCTCATCTTGTGTATTTCCTGTCCCAGTCCTAGGGAGGAAAAGGCCAGTTCTTGAAGGAGTCTTGTGTCTTTTA TTATAAAATGCATGAGAAACCATGGACTGGGCACTAGGTTTGCTCCTTGCTATGGGGGTGGTGTTGTTTCTAAGTCT TCTCAGTTGACAGACCACAGAAGTAGCTTTCTGTATACTAACCCACGGACAGATAAATATTGTAAACATTTCTGTAT GCAATTATCTGTGTCTATATTAAGCTAAACATTAGTTCCTATTGATATCTGCAACTCTAATCCATTACCACATGGAT TCTTCTAGCCTCCTCTCCTTACTTATCTGTAAAATCCCACTCACAATGAGAAACCTGGCTCACACTTTCTGCCATCC ATTTACTTAATTATTCAAGCCCAGTATACATATAGAATAGTATCAGAGAGTTTAACACCTGTGCTCATGGGAAACAA CTTTATCAACTAGAGTTCAGTATTTATGTACAGTTCCTTTTGCCTTTAGTCTTACAGACTCCACTCACTTTCAAGTT ACTTTTGGAGAAATCAGCTCCCCTCCCCCATTCAGTGAGGACGTTTTATAAGTTTATAATACAGTCAGATTCTCTTG TCACAGTCTGTGTTTCTTCCCAGGATCCCCTGATCTCCTAAATATTTTGTTGTTGTTAATTTACATACATTGCTTAG ATTCACTCTTTGTGCTGTAAGCTTCTATGGCCTTTGATAGATGTATGATATCATGTTTTCACCATTACAGTAACATG CAGAATAATTTTACACCCTAAAAATCCCCCTGTGCTCCACCTATTCAGTCCCCCGCTCCTTCTGAAAGTGCCCCGGC AACCACTTATCTTTTTTCTGTCTATATAGTTTTGCTTCTTCCAGAATGTCATCTAGTTGGGATCATACAGTATGTAG CCTTTTCGGCTGGCTTCCTTTGCTTAGCAATATACATTTAGTTTTCTCCGTGTCTTCTGCATAGCTCATTTTTTTCA CTGAATAATATTCCATTGTATGGATGTACCATAGTTGTTTATCCGTTCACCTATCGAACAACATTTTGGTCACTTAC AACTTTTGGCAGTGTTAATAAAGCTGCTATAAACATTCACAGGCAGGTTTTTGTGAGGATGTCAGTTTTCAAATCAG TAGAGTAAATACCTAGGTGTGCAATTGCCAGATCACATGGTAAGGCTCTGTCTTTGAAAGAAATTGCAAAACAGTCT TCCAAAGTGGCTTTACCATTTTGCATTCCCATCAGCAATGATTAAGCATCCTTTTTGCTCCACATCCTTGCCAGCAG TTTTTGGTACTGTCACTGTTTGGATTTTTAGCCATTCTAAAAGCCATTGTAATCATATTCATTATTTTAGTGTGCAG CTCCTAAAGACAAATTATGTTAAATATCTTTCCTTGTGCTTATTTGTCACCTATATATATTCTTTGGTGAAGTGTCT GTTAAGACTTGCCCATTTTTTAATTGGGTTGTTTGACTTTTTTCTTGTTGAATTTTAAGAGTCTTTTTATAATATAT TTTAGATGCAAGTCTTTTTTCAGATATGTGTCTTACATATATCTTCTCCTAGTCTGCCTCTCGTTTTCAGAGTCTCA GCATCTTTTGTAGTAAAGAAGTTTTTAATTTTAATAAACTCCAGCTTATTCATTTTTTTCTTTCATGAATCATGTTG TATCTAAAAACTCTTCTCCCAACCTAAGGTTGCTTAGATTTTCTCCTGTGTTATATTCTGAAAGTTTATGATTTTCC CTTTTAGATTTAGGTCCATGATCCATTTTGAGTTCATTTTTGAGAAAGGTATAAAGTCTGTATCTGGATTCACTTCT TTTTCGTGTGATGTCTAATTGTTCCAGGGCCATTTGTTTAAAAGACTATGCTTTCTCCATTGAATTGCTTTTTGCTT TTTTTTGTCAAAGATCTTTGTCAAAGTCTAAATTTGGCCCTTGTATTTATGGGTTCCACATCCATGTATTCAACCAA CTGCAGATAAAAAATGTTCAACAACAAGGAAAGAATGGTTGCATCTTTACTGAAAGCGTACAGACTTTTTCTCCTTG TCATTATCCTCTCAACAATACAGTATAACAGCTATTTACATAGCATTTACATTATTCTAGATATCCTAAGTAATCTA GAAATGATTTAAAGTCTACAGGAGGATGTGCAAGGGTTATATGCAAATACTATGCCATTTTATATCAGGAACTTAAG CATCCATGGATTTTGGTATTCTAGAAGGGTCCTGGAACCAATACCCAATGGATACCAAGGAATGACTGTATATCTGT GTGTGCCTGTTTCATTGACCTTTGTGTCTGTTCTTTTACCAATGCCACCCTGTCTTGATTACTGTAGTTTCATAATG TAGATTTATTTTCAAATATTGAATCAGCCTTGCTTTCCTGGGACAAACCCCACTTAATTTTGATGTCTTGTTCTTTT TATATATTGCTGGATTTGATTTGCCAATATTTTGTTGAGGATTTTTACCCTGTGTTCATAAGAGATACTGAACTGTA CTCTTTTGGTTTCTGACTTTTTCTGGTTTTGATGGTGGAGTAATGCTGGTCTCATAAAACACTTTAGAAAATGTTCC TTTCTCTGGAAAAAATTATGTCAAATCAATCTTATTTTTAAAACATTTTATAGAATTCACTGGTAAAACCATCTTGG CCCTAGAGGTTTCTTTTTCAGAAGATTGTAAGCTATGAATTCAACTTCTTTAATAATTATAGGAGTATTCAGTTTCA TCTTGGATAAGTTTGGTAGTTTGTAGTTTTTGATGCATTGGTCTATTCGCAGTTGTTGGATTTTAGTACACAGTTAT TTGTAGGAATACCTTATTATCTCTTTAATATCTGTGGGATCTGTGGCAATATCTTCTCTTTTATTCCTGATATTGAT TATTTGTTTCTTCTTTTCTGTCAGTCTTTTAGAGATTTATAAATTTTATTGATCATTTCATGGAACTCATTTTTAAT TTCTTGGATTTTACTCTTATCATTTGTCTGTTTTCAATTTTGTTGATTTTCGCCTTTGCCTTTATTATTTCCTTTCT GGTTGTTTTGAGTTTATTTTTCTCTTCTTTTTCTGGTTTCTTAAGTTGGAAGTTTAGATTATTGAGACCTTTCTTTT TTAATATAGACACTTAATACTATAAATTTTCCTCTAAATATTGTTTTAGCTTTGTCCCATAAATTTTAATATGCTTT ATTTTCAGTTTCATTCTGTTCAGTATACTCTTTTAATTTTCCTTCAGACTTTCTCTTTGACCTATTGATTATTTAGA AGTGATATGTTTACTGTTCAAATGTTTGGAGAATTTTCTATTATGGTTTTTGTCGATTTCTAGTCTAATTCCATTAT GATCAGAGGATGTAACTTATATGATTGCAGTCATTTTGCATGTGTTAAGGTTTATGGCCCAGAAGAATATGGCATAT CTTTGTCAATGTTTTATGCACACTTGAAAAGAGTATAGATTCTACTGTTATTGGGTGGAGTGTTCTGTAAATATCCA TTAAATCCAATCGGTTGATAATATTTTTTATTTGTGTATCTTTGCTGATTTTCTGTCACCTAGTTCTATTGATTATT GAGAAAGAGGTGTTTAGGTCTCCACATATAATTCTAGATTTGTCTAATTTTCCTTGAATTTTTTCATGAGTTTTGAA ATCTGTTGTAAGACACATATACATTTAGAATTGATGATTTCTTTTTGTGAATTGACCCTCTCACTATGTAATATTCC TTTTTACCCTCTGGGAATTTTATTTGTTCTTAAGTCTGCTTTGTCTTTTATTAATTTTTTTTTACATTTGTGTTTGC ATGGTATATCTTTTTCTATCCGTTTACTTTTAACCTACCTACAGGTATCATTTGAAGTGAATTCTTTATGACGGCAT TTTCTTGTGCATGTTTTTAAAAATCTATTGTGACAGTCTCTATCTTTTCCTTGGCATGGTTAGATCATTTACATTTA ATGTAATTATTAATGTTTCAATTTAGGTCTAACATTTTATTGTTTGTGCCCTCTTTTTTTCCTTTTTCTTCCTTCTT TTGGGCTATTTTTAACTTGTTTTAGTGTTTTGTTTTATTTGTTGTGGTTTTTACTATATCTCTTCATATAGTTTTTC TAGTGACTGTTTTAGGGATTATAATACTTTCTTTCACAGTCTAATTAGAATCACTGTTTTACCTTTTTAAGTGGAAT ATAGAAATCTTATGACTATATAGATCCTTTTAGCTCTCCCATTATGTTATAATATCATGCATTATGTTTACATAAAT TGAAAATCTCATTTCATATGTCATAATTTTTGCTTTTGGCTAATAAACATATCTTGAAAAACTTGAGGAAAATAGCC TGTAATAGTTTTCCATATACTTACATTTTTCTTACTCTGCCTGCATTCCTGATGTTCCAAGCTTCTTTAGAGTAAGT ATATGGATAACTATAACCATCATTTCCCTTTTTTCTAAAGAATTTCCTTTAGCCATTCTAAAGATCAGATCTACTGG CACTGAATTACCTTAGATTTTCCTTTTTATCAGCAAATGTCTCTAACTCTAACTTCATTCCTGAAGGATTCTTAAAC ATCGGATATAGAATCCTGAGTTGTCAGGTTTTTTTCTTTCTTTCAGCACTTCAAAAGTGCTGTTTTACTTCCTCTGG ACTCAGTAGTTTCTGATGAGAATTCCACATTCAAATGACTGTTGCCTTGTACATAATGCATTGTTTGTTTCTAGTGG CTTTCAAGACTTTCTCTGAAGCTTTCAGCAGTTTGATCATGATTTATCTGGGAATGGATTTCTTTGAATGTGTCCTG TTTGCAGTTTTTTGGGCATCTTAAATCTACAGTTGTGTATCTTTTGCCAAATTTGACAAAATTTTAGCTATCGTTTA TTTGAATTTTTTCCCGTACTACACTTTTTTTCCTCTTTTTCTGTAACTCCAGTGACATAAATAGATCTGTTGACCTT GTCTCACGTGTTCTCTTTTTGTCTATTTTAAATACTTTTTTTTCTGTTGTTTGGATGATTTTTTGTTAACTTGGCTT CAGTTTTATTGACTCTTTTCTCGGCATCTCCATTCTACTATTGATCCTATGCAGTACAGTTTTTAATTTTGGTTATT GTATTTTTCAACACTAAATTTTCTACTTTATTATTCTTGATAGCTTCTATTTGTGTTTTTTCATTTGTTTCAAGAGT GTCTTCCCTTGCAGCATTTTTATAACAGATCTCTTAAACTTTTTGTCAGATGATTTCAACTTTTGGGTCATCTCAGC CTTGGCATGAGTTGATTTTTTCCCTGGTGAGTTTATTTTTCTGATTATTTGCATGCTTGGTAATTTTGGATTGTATC CTGGTCATTTTGAATATTATGAGACTCTGGGTTTTATATAAATCCTACAGATAATGTTGATATTTTTGTTTTAGGAG GTAGTCAACCTGGTTGGATTTAGTTAGTTCATAAGTTCTGACCAGCCTTCAATATTTGTTCAATTTTCAAACCCTTT TCCGTCCTCTTAACATCAGTTCTTTTGTGCACCACTCACCAGCCAGTTTGGGAACTGGCAGTGCCGAATTCTTACAG CAGTTCTCAAAGTCTGTGGTTTAGGGTCAGATACACATGTGCATAGGCGGGGAAGTAGACAGCTCACCCGAACAGGT GAGTCCAGAAATCTATCAACAGCTTTTTGGTTTGCTTCCATGAACTCCTTTTCCTCCACAATCTTTTTGGCACTTTT TAGTTCTCAGGGCTCCCTCCTCAGTCCCCTGGACAGACAGCTGGGGCTTTTCCCCACTCCGCTAAACTCTTCCTATT ACTAAACCTCAATCTGGGTCCAAGCATTAGGAAGACAGAGGTAAAGAGCAAAGACATTTCGCCCACCTCTTAGGGGG AGCACACCTCTTCCCATCAGAAAGGGACCATCTCCCCCTCACTGGTTTGGGCTCCTGCGGCCCCTGTTGTCCCCCAC ACCACAGGATTGCTTAGGGAGGAGCTGACGTTCAAGGGCTCAGAGATAACACCAAAAAGGGATGATTCCTCACTCGC CCTGAACATAGTTGTCTCAGCCCATTTTCTGCTGCTATAACAACACTGCCATCTAGGTAATTGATAAAGAATAGGAA TTTATTGGGCTCACAGCTCTGGAGGCTGAGAAGTCCAAGAGCATGACGCCGGCATCTGCTGAGGGCCACCCCGTGGT GGAAGGCATTCCATGGCGAGGAAGCATGCCAGACAGGAGAAAAGGGGCCAGAGTCCCTCAGTAACCAATTCCAGCAG TAACAGCATTCATCCATTCCTGAGGGAGGGGCCCTCATGACCTAATCACATCTTAACACTGTCACAGTGGCAGTTGT TTCCAACACAGGAACACATTGAAACCTTAGCAGCAGGTGATGCTTTTCCTTCCTCAAAGTGGATTAGAGCCGAGCCC CTAGGGGGCTCCCCAGCTGTGCCAGGCTTTGCCTCCAGGGCTCAGGCTGTAGTAAGTTCGGGCTGAGGACAACAGAG GGATAACCCAGGAAGCCCATTCATCTTTTCCATGGTACTTGAAATTCTTATCTTCTTTCCAAGGCTGCCAACTACTA CTGACTCTTCTCAGCCCTCACGTAGCTGCTCTGTGCCTTCTGCCCAGGTTTTATAAAGACATTCAGTAGAAGAAACA AGTATAGAGTGCTTGCTTCATTTTACCTGGAACCAGAATCCCCCTTTCCCTCCATTTGTGTTTCAGGTTAGTTTATT CTGGCTGCTTTTGATGGCCAGGGAGCATTAGGTCAAATAGCTGTGACTTGTGCCAGGGACACCAGCTCCTGGGGATT CCCCTTCCAGGCCAGTGGCTGCTGCACAGGGATGTCCTGCAGGAGCTGAGGACCTGCTCTTTCTTGCTCTCTGTTGC TCTTTGTTGGCCATGGCCACAGCACAGCTACTGAGATGCTCTGCAAGCATGACCCGGCAGGTAGCACCTGTGTGTAT GGGCCTGAGTATGCCCCTGCTAGCTGCAGCCTGGCTAAGGAAAAGTCCCAAAGCCTGGGCTGCTGAAGGATGCCCCT TCCCCCCAGGAAGCCACACGGACCTTGACAGGTCACCACCCATGGAGCTGTGATGGTTGAGGGAAAGGAGACTCCTC CTCAAGAACTTGGAAGCACAATGGCCTGCCTCCCAGGAAAGAGAGCCTCAGTGCTTGTCGGAGCCCTGATCTCAGAG AGGGCCAGCTGCCTGGCCAGCTCTGCTGTTGCCTGTGCTCTGAGCCTGGCCGTGTGCAGTGGACGCACAGGTGTGTT TGCTGAGGTGGCTCGTAGCAGATTATCACCGAGGAGAGATGGACACCCAGGATAAGGAAGTGATGAGTCTGAGCACA GCGGTGGCAGAGCCAGGCTGGTCCCGGTCTGTGTCCTCCTGCCGTGCTCTGGTGTGTGTTGTCTTCCTTATTGGAGC TGGGTTTGGCTGAGTTGGTCCAGGTTCAGGTGTCAGGCCTGCTCAGAGCCTTGAGCTCCACTCCATGGCGTGGCATG AAAACACCTCGCATAAAAACCCAGTGTCTGTGACACAAAACGATTTCTCCCGTGACCAGCATGAGAAAAGGGCATCC AGACCCTTGGCGGAGGATGCACAATGCAGGCAGAGGGTTTAGAAAACAGTCTTCTCTGGGTGAGGCAGTTATGGTGC ACACATTTAAATAGCTGCCCAAGCCGAAATGAAAATAGCCATGTCCTTCAGATGCAGAGACTCCAAGATGCAGGTCC TCTCCCTTGACCCCAGCCACAGAAGCCCAGCCCAAGGTACCCAGCACCACAGGACAGGCAGGAGGAAGGGCGAGTGT GGGAAGGAGACAAGGGAAGTGGAGGGGTAAGAGAGGAACATCCAGAATGTGGCGTTCGGAGGCCGCGTCACAGAGCC CCAAGGTCTCGGGGCTGCCCTCTGGGGAGGCCCATGGTGAAAGAGAGAAGGCTGCTGGGGTTTTTTTTGTTTTGTTT TTTGTTTTTTGAGACGGAGTCTCGCTCTGTCGCCCAGGCTGGAGCGCAGTGGCACAATCTCAGATCACTGCAACCTC TGCCTCCCGGGTTCAAGTGATTCTTCTGCCTCACCCTCCCGAGTAGCTGGGACTGCAGACGAGCACCACCACGCCTG GCTAATTTTTTTATTTTTAGTAGAGATGGGGTTTCACCATATTGGCTAGGATGGTCTTGAACTCCTGACCTCGTGAT CCGCCCGCCTCGGCCTCCCAAAGTGCTGGGATTACAGGCGTGAGCCACCGCGCCTGGACCAGAAGGCTGCTGTTTTA ATGGTTGCCCCTTTGGGCCACCTGAAGTGATTGTTCCAGCTGCTGAGGACTGATGTGGTCACCTCAACCTCAAGAAC TTCTATTTTCCACATGAGTTAATGTCTATGAGTGGATTTCACTCCATTATAGAATATGATGCTTAACAGCAAGGATT GCCCTTCTTCAAGAACGGGTGTCATTCAGCCATGTGATTCTGCACAGGCTAGGGTTCGAAGCACTGTGCTCTTTGAG AGCTGCTTCAACTAATTACTGCATTCGTTCGCTGCAGGGTGAAACAGAGTTTTCAGATACATTTGTAAAATCAGGTG CCTGATTGCTAAATACTACATTGTTTGAGCTATACTTCCTCATATGTTGCCTGGTACGGACCAGTTAAGAAATGGTT TCCCATGAGAAACTGACAATGAAGCTGAACATGTTTGATAAACTCTGTGCTCATCTATGGACATATAATTGTTTTAT TATACGATACTTTTACACTTGGAAAGAAAGGTGCTCCGTAATTTGGCAGCAATTTGTCAGAGCAGCACTCAAGGCTG GCGCTCAGATGAGGCCCTTGGAACCATGCCATTGTTTCTCGGAACTGCTCTGTGCTCCGGTTAGGTTTGCACACACC TCCCTCGTTTCATTCCTACAAGTTTAGTAAAGTTCCAGGCCGTTCTCCCAGAACACCTAACGGAAAGCACAGAAAAC AAAACCACCAACTCTGTGTTCGCCGAGGAAGGCAGGAAATTGGCCTCTGCTTCTTGCGGTATTGACGTGCTGCTTTC ATTGTTTCTTTTCCAAGACAGCTGTCCCCGAAATCTCTTTACCTCCAAGTCAACAGCAGGCTACCTTGCTTTGCTTT GCTTTTTTTTAAAGTTAGGCATAACAACAACAGCAACCATGATAATGATTAACAGTTTGATTTCAAAACGTTTTCTG AAGAAATGACAGTAAACAGTGCATTTGCCCAGGGAAATCCACCACCCCGCCAGCCATCAGCCGGTAATACAACTGCA TGTGCTAATGAACCCAAAGCTGTTAATGTGGTTTCTTCAGTTAAATTGATTCATGAATTTTGAAGAGAACATTATCT AATGAATTTTCTTTGAATAGAAAGCAATTAAAAGGACAAATCAGTCTGATTAACCCCAAAGTCACCCTCCTGCCACA AATGGTGTACAGTTTGAAATTATATCATAAAAAACTAGAGCACATTTGCTATCTTTTTGCCCTCTACTAATCCATGT AAATTAATGAACAACAAAGTTAATTTCTTTGATGACCCTTTTCTAGTATCACCTGGATTATGCTGATGTTTAATTTG CTTAATGTTATAATAAAGACTAAACAGATTTTTTTCCCAGTGAAGTGATTATCGTTCCCTTCAGTTAAGAAGTGATT TTTATTATTTAACACACATGTAAGGGTGTGTTTCCTTTAAGAACCAAATCACACTTTGCCAGCTTGGCACCAAGTGT AATTAGTGTTCTTGTGGACACACTCAGAACATCGTTCCTGCCCGCGGAAGCCTTCCCTTTGTTGCTGCTATTCAGAA ACTCCTGCCCCTGGAGGGGCTGGAGCCCCTGCGATGGAGGACATGGCTCTGTCTCCAGTGCTCCTGAGCTGCATGTC CCCCTTGGAAAGACAATAGGTACTGATTCAGACAGGCCTTCTTCGCGTGCCCCAGTTTCTCTCCCACCGACACCACT CCCAGGTAACAGTTCTGAAACCTGGAGGCAGAGGGAGAGAATGTTCTCCTGCAGTCACCTCCTCATTCCTGCAGCAG GATGCGGCACAAATGCAGTTGGATGTGGTTAGTCAATTAAAATGGGAATCAAGTCATTTTATTTTTGCAGCCCTATT CACTAAAGATGCCTGTAACCAAGGTCACCGCCAGCCCCTGCGTACTGTGGTGCTTGGCACTCCGAGCAGTAGCTGGG GGAATCCTGCACGCGGCTGGAGGTGGACAGCCGGCATAATATCGCAGCCTGGCCTGTGGCTGCTTTTGCCTTCTTTG TCCCAGTTGAAGTTGGAAATTAACCAGCAGTACAAAAGATTTCCAAGCAGGCGGGCAGGCAGGGACTTCTGTGTGTA TTAATTGAGCCATGAGCTCACTTACACACGCCCAGTCGCTAGAAGAGTGGCACACGCAACCCCACGCGGAACACGGG AAGATGGAAAGAAATTGCAAACCTGTGGTGCCAGCTCCAAGGATGCCTTCCAAGGGGCCAGCCTGCATGGTGGCCTG CCACATGCTTGCGTCTCCTCGCCTGGTGACATGGTGGCAGCAGTGCATGGAGGCCGTGTTTTAATTGAGTATAATAC CTCTATTTGTGTAGATGCGTTTCCTGTTTTGGGACTAGTGGCTATTTATATCAGAGCTGCTGAAGCCGTTTGTCCAA ATAACATTATCCTGCATTCTTCCTTTCAGAGTCGTTCACCAGACAGGTGTTATGGAAGCTGCTGAAGGTTGTGAAAT TCGGAGAAGTGATTTCTTACCAGCAATTAGCAGCCCTGGCAGGCAACCCCAAAGCCGCGCGAGCAGTGGGAGGAGCA ATGAGAGGCAATCCTGTGAGTTCTCATGGCGCAAGCATGGCTGTGGGTGGCGGGTGCGTGCAGGTGGCAGGGTGTCA TCTGATCCCACGTGTTTCCTCGGAAGGCAGGCTGTGCTGCTGGGGTGGGCAGAGGGGCGATATCTGTGATGGGGACC ATTATGCCAGATGCCTCCAGAAGAGGCAAGGAGGCTACCCCAGCACTACACTCCTGGAAGCTCCCCCCTACCGGGAG CACATCTCCACTGCATGAGCTCCTGGTTGTCACAGTGAGCAGGAGAGGAGGGAGCCTGGAGGAGTGGCAAGCGGGCA GAGGGTGCCCCACCTGCTCACTCAGGAGGTGGACGTGTTGGGTGCCTGTTTTATGGCCCACACTCTTCTAGGTGCCC AGAGTACAGCAGCTAACAGACAGAAAGGTCTACCTGCGAGGTGCCTGCATCCTAGCAGGATGGCCAAGCAAGGGTGC ACATCCAACCCCATCTCTCTGTGGGCTGCACTCCCCCTGAGGCCCAGGGCTCCCTGGGTCCCAAGAGCTAAAGCACC ACACGTGAGCACACGAGGCAGGAGGCCTTGCAGCATGGGACAAGGGACCTAGACCACACGCACCTCGTGTCTCACCA GGGATGGCGCCCTCCCCAGAGCCCTTCTGTGTCCTCGTCCTTCCCATGCGTCTGCAGTCAGATTTCACTAAACTCCA GGCTCCCAGGCTATGCAGCCTCAGGCCATGCTCCCCAGAGGACAAGGCCCAACCGGGACACAGCATGGGTGGGGCAG CGTGGCCTGTGGTGCCTGGGGGCCACGTGGGTGCCGTTGCTCTCCCATCTCACAGCACCCAGGCCTGGCAGCTGGGC CGCGGGCCATCTGGCATCTGGCATGAGGTGGTAAGTCACAGCATGCCATGTGCGCCCGGCCAAGGCCACACGTGCCT GTGTGTGTGGGGGCAGAAAGGGTGCCCCGTCTGCGTGGCCCATTGGGAGAACCCACACAACCTCAAGAATGCCCCTG GAATATTCACCCAGTGATGGTGTGTGGTCACGTTGGCAGTGTCTTCTCCCGAAAGCTCTGTGAAAGTTTCTAGCATG ATGGAAGCATACCATCTGATCAGGGAGCACAAATATGATCACTCCATCATGGGATGGGAAATTACTAAATCAGATAG ACCTCACTTTTTGAAAAATTGCTGTGGCTTTACTGTCTATTTCCAAAACTACTTATATCCCTGCTCACAGGGGAGAG GCCGGCGTGTTCATACCACAGCCTGCTGCTCCTGCTGCCCGCTGCAGCAGCCTGGGGGCAGAGCCTCCGTTTCTAGG AGATGACAGTTACGTAGGCTTTTGCACAAAACTGCATTGTTAGTCCTTAAAAAGCAACTCTGGTAGGTTTGTAGTGG ATTGCATTGTCGTAATGTACACCCTAATCTAGGCGAGCTTTCTACCCTATTAAAATATCCCAAATATCCCAGGAGTG AGATACCACAGGGACAGCCACCATCCCCACCTCCTCCATCTCTTCCTGTCCTCAGTTTTGGTGACAGTGGCTGGTGG GCGCAATTGACCCTTCCTTTTGCACCTGTTGCACATTAATTGCAATGTCTTCAGCTACATTGTCATAAAACATCTGC ACCACGCAGTAGGGATCTGATTTTTACGGCGCGTTGGGGGATATTTCCGAATCAAATTTCTGAGGATGGTTTTTGAC ATTTCCCAATAAAACTTAACCTACATGCCCCTCTGGAAGGCTGCTGTCTTCTCCCCGGTTGTGAGTCAATTTTGAGG TGTTCAACCTGATGAAAAGGCAGCTCAGATGCTGTTGTGTTGTGGCTCCGTGTAGGGCCCATGAGAACTGTGGATGC GAATGGGGTTTTGGGGGTGCTCTTCCTGCATCAGTGCAGTGACTGTTTCAGGCAGTGTCTACTCTTTGTGCCCCCCG AGGAGAGTAAGTCCTTGTCTTCTCCCCACTGAGGTGGATTCTGCTCCCTCCGTGCACACACATGAAGATGGGAGTGG CCCCGTCAGCGGGCGCCGACTGCTCGCTCCCTTGTGTGTGCAGCTCCCCTTTTGCTGTAAGGACAAGCTCCACTAAC TGACATGTGCAGCGTGGCAGCACCCTCCCCCACCAGCCTTTGGTGATGCCAGCAGTTTCTCACTCTGCAGTGGAGAT GCCGTCGCTGGTTAGCAATCCTGCTTGTGGCGATATTCGGAGACATTTATTGTTCTGCAAACCAGCGTGACTCTCTT CTCCTGCTATTAATCTCTATGAGTGTCTCTGTTCCAGTATGGCCTCAGTCACTGAAATGTATAAAGTAGTATCACAT GGGATGTAAAACCCTAATGTCTGTAAAGTCCACACATCGGCACCCTGTCCCATGGCAAAGCCAAGACTGGAGGTGAG CACAGCATCAGGCAGGAGGGTTCTACAGGCACCAAGTCTCGCCCTTCTCGGCGTCCACATGCCTCCTGTGCCGAGGG CAGCCAGGCGGTGGTGGCTTCTCGTGGCCTTTCTGTGGGCTCCACCGTGTGCAGTGACCTTCAGCCTGAGGAGGGGG CTGCAGCAGGACCTGTGGCTACGGTACCCACAGACGCCTCAAATTATAGCACAGATATGCCAGAGATATTCCTGCAA GAAGCCTTCAGCTACGTAGTTTACTATGGTTCAGGTTGACAGCCTCCCAAGTTCCCATTAGAAACCTCATTAGAATG GGCTAGGAGGATGAAAAGGTGACCCAGGGACTTGCTAGAGGAAGGGCGCTGGCCAGCAGTGAGCCATTGCTGCTGTC AGTGTCCTCAGGAATGTTTCCCTTTGGCGCTGACAGCAGTGTCCCAGCCGGAAGGCTGCGCACATCCACTCCAGCCC AGACGGTGCGTCGCTGAGACTCGCTCATTGAAAACATCCCTTATATTCAGGATGAATAGAGTGATTGTGCATTTAAG GGAGGAGAGTGAAAAATGGACTTGGAATGTTAGAAAACATCGTAAAGCTCATTGTGCATTAATTCCTTAGGTGGCTT GCAATAAACAGGAGCACGTGCTGGTTCATATTACTGCATTTGCTGTCGGCATGAGTTTCTCTTCCCCAACCGGAGTA AGGGATGGCTTTTGCCATGCGGAGCTTTCCTCTATCCTAGGAGCTTGATTTCTCCAGAATCCTCCAGGAAGGACTCA CCAGCCGGTGTAAGGTGGTTGGTCAGCATTCCTGGAAGGCTGTCTCCCCAACTCAGCGGGAGAGGATGGTCAGTTTC CCAGTATATTGAGTAGAAAACTCCTCACGACCCACCCCCTCCACAAAGCACCCTTCCTCTTCATCCTCAGACAGAAT TTGCTAAATGCAGTTCAAAGGCAATCGATACATTGCACAGAGAGTCTCCCCACCTTTTTCTGAACAAATGCATTCCT GAGGAGTTAGTTTATTCACGGATTGCCATGAGCGTTAATGACCCCCCGAGGCTTGTTCTGCCCGTCACCCGGATGGC TGCTGATAAAGACTTAGCATCATGTTCTAAGTGTCAAGGTTGTCAGTGGAGCTGAACCATTTGACCAGAAGAAAAAA ACGCACAGGGAGCTATTGATTACAGCTTCTCGGTGTCACTTGTTCACCAGGATTTAGGTATTGATGAGGCTGCGAGT GAAAACAAGCTCTTTCCCTTGTGGGCTGCTGCCCAGAAGAACAAAGGCGAAGTTGGAAAAAATATTCAGCCGGTACC AGAATCAGAGGGATTCCATCATTGACTGAAAGGCCCCTTCATGTTATTTTTGTTGGAAACAAATCTATGGGTTTGGA AGTTTTATAGCGTTTGAGAAAGGGGCTGCATAAGTGATGGATTCACGTATTGGATGAATTAGATTTCACAGCATGAA GATTTCAATGCAGCTGTGATATTATGAGCTTCTTGGTTATTGATAAAAATTACATTTTATGCAGCACATGCTTTAAA GGAGAGGGCATAGAGGGTACAGATCCTTTGAAAATGTCCTTAGGGCCCCAATAAATTTCAGCAGGTTTCATTATCTT AATAGTCTGAAACCTGCCACCAAAATTCACACAAACAGAAGCAGCGTTCCCTATTTCTAACGGTAAAAATAGTGCCT ATTTGGTAAGTCACCTCTTCCCCATCACAGCATGCTAAGGTGAGGACCGGTCACAGCTGTCGGGGTCATTGTTATTC CGTGCCATCTGTCCTGGCCTCTGCATTGATGTACAGGAAGAGGGAGAGGGAGACATGTTTATTTTACTCATTTTTAT AATTTCATAGCTCATTGAGAGGGAGAGAAGAAAAACCAAAGCTCTGCTGTGAAATCTGCTATTAGGTAGGAAAATTG AATTGGTGCCTAAATGTTTATAAAACTAGATTGAATTAAATGCCTACCTCTTTATCAGTCAAAAACGTGAATTGTGT ATTATCTAATAATGCCCTCACAGCAATTATTAATGGGACTGTTGTATTTGATAAAAATCATCAATCAGGGTAAATAT TCCATCCTGGAGATTTCCTGTGACTCCTTCTGGAAGACTGGGATTCTCAGCTGTTCCAGAACTTGGCAGTTACTACA CCTCACTCTAGTAAACTCAATGTTAAAAACAGTCAGCCCTCCGCCACCTGCATGTTCCCATGTCATAGTCGTCAGAA GCCTCTTAGACTGCGTCATTGGTGCACGTTACCAAACTCATCGTCAAATTAGGATGAGCTGTGTGATGTGCCGGAAG CCAGAGTCCCACCTTGCAGCCATGTCATCTGCTGGCACCGGCTGTCACCCCACAAGGTCCCACCTCAACAGTCCACG TCAAGGAGGAGAAGTGTGGTGCGTGGAGCCATGCAGGAGAGTGGTTAGAGCCCCTTCTTTGCCACTTAACAGCTTTA TGAACTTGGGCACGAGACTCCATTCGGCCGGAGGCTGAGACAGGCCTGGTGGGGCCTTGCGGGGTGATGGGGGCCAT AGATGGGGTCGAAGATGCAGCAGCATCAGGCATGGGCACACCCGCTCCCAGGGGCTTTAAGCACCTTTTCCAAGGGG GGCTGGGGCTTCCCCCACCTCCCTCGGGGACGTGTGTAGCTGGGCCCCACAGAGGGCCACACCCACCAGGTGAAATC TGTGGCAGGTACATGTGTGGCAGTGACACAAGCTGCCTGCACCAAAAGCCTCAGGGGATGCAAAAGTAGCAGTCACC TCCCCAGGAAGCAGAGGTGCCCAAGAAATAGAGCTTGGAGATGCTGGGCACACGCCCCCAGCTGCTTCCTCTAAAAG CTCACCTGACCAGTAGCTGGTTGCTTTGTCCAGTTCACTGGCTTTGGAGGGTGGAGCGTGGGGAAGCTGGGCATGGG CAGAAATCATTTCTCTGTTGAGCTGGGGATACGCTCAGCTGGAGAGAAAAAGAAGAGTGGAGTCGGAGTGATACCCG GGGGTACCCGGAGTGATACCCGGAGGTAGCCTGGACACGCCCCAACCTTGGGATCCTGCAGAAACAGCTGTTTGTTC TCATCAGGGCAGGATGCTGGGAGCAGGGCAGCCATGTGTGAGGGCCCAGGGAGAGGCCCCGGGTCTGCAGCATCCGT GTCTGGGCCATCTAGGTTGCGGGGATGAATGTGCTGCCCTCCAGCTCAGGAGGAAGGGAGGAAGGGGGGCCAGGCAG TAAGCGATCGTTAGGCATCTCCCATGTGCCTTCTACGTGTCGTGCCAGCTGAGAACCTTCCAGAGCGAGCTTGGTGC CCTTCCCCATTCTTCTGGAGCCTGCCCTGGCTCCTGTGGTCATGCTCATTGGCAGTTTACCTTCTTCACGGAGCAGC CACTGTGATGCTTTGCACGATGATGAGGCATGTCCCCCCACACGTCCCCCGAGATGTCCTGGCCCCTTAGTGGCTGC CCACCCATACACCTGCTCCCCAGGCGCCAGGAGCTACTTAGGGATGAAGGCTGTTGCCTGGGAGGCTCTCCAGCCAA TTCTTTCTTTAGAAATCTGTGCAAGACTTCCCCACATGCTCCTGGGAAGCCATTCTGGAGCAGATCTTCACAGTAAC TGCTTGTTGGGAAGCTTAAGCAAATGGCCCTGGAGCCCCCAGAGCCCCCAGAGTCCCCTGCGGTGGCCATGCAGGCT GTGTGGCCATCCCTGTCTGCCCAGGCAGAGGGGGACAACCAGAGAGATGCCCATATGTTACTGCCTTGTCTTTCACC TTTCTGAGCCAGCTGAGAAATGGATAGCAGACCTCAAGATTTTAGCTTTATTAGGGTAAAAGCGAGATTGAAGGCAG GGGGTGGGGGGCCAGTGGCATGGCCATGGTGGCTTCCCAGTAATTCCCACAAGAATTACATTCGCCATCACTGTCCC CTCTGGCTAAGCTCTGGCCTCCCCAGCCAAGGCAGGGGCTGACCATCTCAGAAGAGATCAGGGCGCCCCGAACCCTG GGGCAGGCAGGTCACCTGCAGGAGCCCTAACAGTGCTAAGCTGGGCATACCCCTCTCTTCCTCCCTTGTCGGTGGTC AGTGACTCATTCTCCCTTGTGGGTGTGAGAGTGGAGGAGGCCAGCACCTACATGGAAACCAGAGGCAGGGGCCACAG CACCTGCCCCCACCCACCACAGGTGGCTCTCAGAGCTTCAGCCAGACAGTGGACCCATGGAGCTCCTCCTGTCTACA CAGCTCGGGCAACGCCAAAGGACCAAAGCAGAGTCTCCCTGAGGACTGCACTGAAGGAGGCGCCCGCCCCTCTGGAG GGAACAGGGATTCCCTTCCCCTGGTGGGACTGGCCATAAAGAAGCAGTTGGTAGGCAGGATCCGGGGCCTGTGTATG GCTGCGTGGTTGTGGTCCTCACTCTGGATCAGCCCCTATCAGCACAGGGCATCCTGAGGCAGGGGTTGGCCAAGTCC TCCTGTCAAGGGCCAGAGAGTAAATATGTTAGGCTTGGCAAAGCAGCCACAGCCAGTATGGAGAAAAAGGCATGGCT GCGTTCCAGTAAAGCTTCATTTGCAAAAGCAGGTGGTGGGCTGCGTGCGCCCACAGCCACAGTTGGCCGGCCATGGG CTGGAGAGGCCCGTGCAGGTACGGTCTTCTCTGATGCGTCCTGTGATGCCTGCGTGGTACCTGGGGAGTGTTTGAGA GCGTCACATACCACCAGAACTCGGAAACGTAGTTTTCAGTTTTGTAAGCGAACGTTGTATATTACTCACCGGATGAA ATTAAGTTTTCTCCTCCCAAATCGTGGGCCTAAAGCAATTCTCTGAGGATGCCCCACGTCACCTCAGGACACTCGTC CCTCCCCCAACCCGTGCTGAGACCCCCAGGGACTCAAGGGCCTCAGGGGAGGGGAAGTCCATGCTGAGACATAGCTG ACACCCACCCATGCCAACAGCCTGCCCCTGGCACAGGCCCCTGCTTGGTGGGCACAGGACTCCTGTCAGTCAGGGCC TTGGCCTTGACCCCAAAGACCTCGTTGTCCAGATCCCTGACTGACAGTGGCTGCCCCCCTGTCTTCCAGGTCCCCAT CCTCATCCCGTGCCACAGAGTGGTCTGCAGCAGCGGAGCCGTGGGCAACTACTCCGGAGGACTGGCCGTGAAGGAAT GGCTTCTGGCCCATGAAGGCCACCGGTTGGGGAAGCCAGGCTTGGGAGGGAGCTCAGGTCTGGCAGGGGCCTGGCTC AAGGGAGCGGGAGCTACCTCGGGCTCCCCGCCTGCTGGCCGAAACTGAGTATGTGCAGTAGGATGGATGTTTGAGCG ACACACACGTGTAACACTGCATCGGATGCGGGGCGTGGAGGCACCGCTGTATTAAAGGAAGTGGCAGTGTCCTGGGA ACAAGCGTGTCTGCCCTTTCTGTTTCCATATTTTACAGCAGGATGAGTTCAGACGCCCGCGGTCCTGCACACATTTG TTTCCTTCTCTAACGCTGCCCTTGCTCTATTTTTCATGTCCATTAAAACAGGCCAAGTGAGTGTGGAAGGCCTGGCT CATGTTGGGCCACAGCCCAGGATGGGGCAGTCTGGCACCCTCAGGCCACAGACGGCTGCCATAGCCGCTGTCCAGGG CCAGCTAAGGCCCATCCCAGGCCGTCCACACTAGAAAGCTGGCCCTGCCCCATCCCCACCATGCCTCCCTTCCTGGC TGTGTCCATGGCTGTGATGGCATTCTCCACTCAGCAGTTCCTAGCATCCCACACCCAGGTCTCACTGAAAGAAAGGG GAACAGGCCATGGCAGTCAGTGCTTACAGAGGTTTTCTAGCTTTGTTTCCTACCTGCCAAAAAGGCTAATGCAAGAT GCATCCACTTATGGTCTGTATCAGGTGAATAGAAAATAACCATTTGCCAAGATTTGGAAAGACAGAGAGCTCTCTGG ACACGGGTTCGATGGAGCTTGCACCTCTCTGAGAGCTGAAGTCAAGTCTCACCCTCTCTCCATACTCCCTGGCCTAG TGTGCTCTGGGCAGCAGGTAGGAAGGGACAGGGACCTCTCATCTCAAGGGCTGCCCCAAAGGGCCCTCAGGGACCAT GGGCCTGTTAGGACCCCAGCACCCCAGTGTCGATCCTGGAAGTCAAAGGTCACGACTGTGGGGGGCCAGCTCATGTC ACTGATGGCAGCAGGCAGGGTTTCCAGCATGGGCGGTGCGCTGCTGTCTGATACTTCATTATTGTGTTGTCATCCTA GCTGTATAATTAACTATATCCAAAAGCCGGAAGGGAAACCTGTAGCTCTGCATATGGAGAAATAAAACAGAGCATAT GATGTATAGAGAAAATGAACTGCACCCAGCTGTGCACTAGAGCGCCATGTTCTTACCCAGCATTCCTTGCCACGGTG TGAACCACAGCAGGGAAGCTCGCATGGTTCTACACGTCACCGAGGCCTGGATGAAAATGTGGCCTCACGATGTGTAT GGTTGGGACCCGCCTTCTATTTCATTTTATCTTAACACCAACGAAAGAAAACCGATTTCAGACGTTTTTCGCTGATT TATGATTTATTATATCCCTTTCTGGCATCAGCCAAAATCTCGGTTTTTCCTATGACATGAAGTGATGTGACTCTTAC CCCGTTGTCTTAACTCTTGGTATTTTTGAAGCAGGATAAGTCACACAGCGGGTCACGTAGACACGTGCTGTTTTGTG GGACAGGCCCTGGGCCTCCTTGCTCCTGGCAGGCCTCAGGTGCCGCACGCCGCGTCACCGTCAGGACTCGCAGGCTG TCTGGTCATTTTTGACGTTGCTGAAGGTGAGTGGGAAAAGCTGGGTGCACTCTGCCCCAAAGGTGGTGCCCTGTGTC CCCCACAGATGATGGCCCTCCCCAGTGATGGCCGGTCACCAGGCACGGCTTTCCCCTCTGCATGAACAGAACAGAAG CTTCTGGCTCTCCAAGGCAGCAGCTTGGGGCCTGGTGGCCCGGGTGTGCGAGCCGCGAGTGCTTTCCAACAGAGGGC ACCAGAGCCGTGCGGTGTGCTGTGGAGACCCCAGCACCACTTCCCCTGCTGGAGGATGGATTTGAAGGAGGGTGGCT GGGCGGCACCCCGATGGCTCCCTGTGCTCCCTGAGACCCTACAGGCCGCCCTCTGCAGCCACACCTGGACCGGCAGG CATGCACGCTGCAGGCAGGCTGCCTCCGCTGTTTGGGTCCCATGAACGATGGAAGCCTCCCAGTGAGATCTTCAGGT CTCTCATCAGGCACAGGCTCTGAGGGAGGGTCCTGGGGCCACATGACTGCAGCCAGCGAGGGCCGAGCCCCCAGAAT CCAGGTCAGCTCCTGGTGGCAGGGGACCTGCCCGTCAAAGCCGTCCAAGGTGAGCCAGCAAATCCGTGTGGCCTGGG AGCACAGGTGGGCCTGCTCGGACCATGCCCTTGGTGCAGTACAAAACCATGTTCTGCTTCCTCTCCGAGGGTTTCCG CGGCCCTGTCAGAACAGGCTTGATAGATGCCCGGAGGTTCCCTCTGACAGCCGCAGCAGCAGGGCTCAAACCGGCGG GGCCGTGTACCGCTCCAAGGACAAGCTCTGCCGAGGCCGACATGAAAAGCCAGCACGCGGGTCGCCTAGAGCCGCTC TGCCTCCAAGCTGCAGCGCCGTTCGTGAAAATACAGAGGGAGAGGGAAGGCACAAAGAAATACAAAACTATTTTCCA AATAAAAAGAAATGTCGAAACAAGAAAGCTGTGTTCTTCAGCCTTGGCCCTGGGTCCCCCTCACCCTGTCGCATTTC CCAGCACTGTGATGCTTTGAAGGCCGACACCGAGACCCGCCGTGCACGACAGCCACCTCGCAGCCACTCAGACCGGC GGACCACGCTCCCCTGTTTCCAGAGAGATGAGAGAGTCAGAAGTAATACTTGTTTTTGCAGAACCACACTTGTGGCA AAATAAGTTGCCTTTGGCCACGCAGGAGACTGAGTTTTGTGAGGGGTTGTCCTTCTCCCAGTCTCTCTTCCCGCTGG GAACAGAAGTGTCCAGTAAACCCACCTGCATTCCACGTGTCCTGTGGCCGCCTCCAGTGGTGAGTCTGTGAGGCCAG AGAAGAGAAGCTATGACCGTGCAAACATGCATGTTATGGTGTTGGCTGATGCGGAATCAGGAAGCTTGGAGGAGCTC TTGCATGAGGAATTGCAGAACTTAGGGGCATGAATTTGCACTTCCAGATGTGAAGGTTGCAGGCACCGGGCGTTGCA GAGGAAGTGGGCAAGCTCACCTTGTAGAGAACTTACTTGGGGTTTGTAATTTGTATACACTTCTTACCCAGCAGAAA CAGCTTACTGAACACCCCTCGGGTGGCTGGATGATGTGCTAGCAACTGAAACCATCTCTGCGACTTAAGCTTCTCTG GTGCGTCGCGCCCCACGTGCTTCTCCAGAATCCCGTTTGGAGGGGCCAAGCAAGTCCAATATAGATAGGTTTATACT GAAGCCATCAGTTTTGTTTCTTACATCGTTTGTAAACAGCAGTATTATCCTGGAACTTGTTTCCTACAGAACTGTAA GATAAGGATAAAATCCCATCCACCTGAATTGCTGAGAAACGTAAGAGGTGGTGTGACCCGCTGGAGCCCTGTGGAGT GGCGGACTCTGGGGAGTAGCTGGTCAGTGAGATTCTCGCAGCAATGTGAGGCATCCTCCTCACAGAAATGCATTTAC GGATGTTGCTGTATCCCCTGACCTGGCCTACAAGGACAGAACAGCCCTGGGGGCCACGTCCCCTCCCGGTCTCATCT GCCGCTTGCTCACCTTGGCTGTCCATGCACCCGTAGCTGTGACCATGGGCGGTGGCGCCAGCTCGGACTTCACCCCG TTGGAGCGGGCAGGATGTCACACTGAGCTAATGTGAGATTGTTCATGAAGCTACAGATCTTAGTGCTACTTGGGCTT CTCACAGCACAGAGGAGGATTCTGAAGTGAGAGATAAATTGGCTTCATGTATGAGCAAGGGGGAAAGTGTTTTATTT TACTAGGAAGATTTTACTGAAAGACCAATCCCGAAACGGCCCTTGCTTCGGCCACAGCTGCTGGGATGTCCTCGGGC CTCCCCTGTTTGTCTGCATGTCTTCTTGTTGCCATCGGGGCAGTGGAGTCCCCGGAAACAGTCCAAGGCCCTGGGGT GGGGGATTTAAATTTTTGGCTTCCCTCAGACCTCAGACCGTGTGGGTTTTTTTTTCTTTCTTTCTTTCCTGTTCATG GGCATTTGATTAAAAGTTTGTGTTTAAAGAGCTGAACTTCACATCAGTTTTACTTATCAGTTTGAAAGACATTGAGA TCTAAACACGGCTCTGCCCAAGACCTCTGCCAAGCAGCGCCGTCTGTCTGTCTGTCTGTCTGAAGGGACGGGAAGGT GGAGAAACTGCAGGTACTGACCTGTCTCTAAGCCACTGAGGGCAGCCATCCAGTGTCCTCGGGACCCCATGGCTCCA GCTGCTGACAGATGTGAAACGTCTGGCCTCCATCACCCGGGTCGCCCCGACAAGGATCTGTAATGGGGGCAGGGGTG GGGGTGGATGAGAAAGTAGGAAGTGGATGCTGGGCAGCGAGGTGTGAACTGACGGCAGAGCCCAGCCCGACAGCACC TTTGATTGATGAAAGGACATTGTTAACAAGCCTTTAAAGTTTCTCATTAATGTTTTTTTCGTTGGAAAAAAAAGCCA CCAGAAAAAAATTCCACATGGACAGTAATTAAGATCGATCCCGTACAGTATGGTATCAATGTTTGGGAGCCTTTAGG AAAAAATTATCCACCCTCCTATTAAAGACTTATTTTCAAGCTGCCATTTTCCAGGCTGTTGAAAGTCCCTGGCAGTG TGGGTACCTGGGCAGTCAGGCACGTTCCGCAGATGTGATGTGGTCGGCCTCACAGGTAATGTTTCTACTGTGGCCTG AGGATGGAGAGTGGAGCCCCTGAGCTTTAGTTGTCACGGACTCTGATGCAGTCAGGCAAGGAAGGGTGGGGAAGGAT CTGATGGATCTGCTGCCATGGAGAAGCTGGAGTTCTTCTCAGCTCCGAGTGAGCCCCAAGGAGTGCGTCTGAGCAGA GTGCACGTGGTGCCCATGGTTCTCACCAGAGATGCTCAAGCCCTTGGGCGAGGGGGCTGAGCCAGCCCCGACATTGT ACACACAGCACCACACACGGGCATACCCAACGGTTCTTTACAGGTCTTCGAGTTACACGTCACTGCTGTTTGGATCC CAAACACCAGCGGAACGCATGATTCCAGGTTGATTTGTTGACTCACATTAAGGAAACCCAGCTGGAGAAAGTATCAG GGTCCTAACGTTAAGCAACCTGCGATATTATGCAAAAAGGATTGCTTTTGTGTGTTGTGATTGCCATGGCTACGAGA AGAAATGGATGCACGTGTGAGACTTGGCTGGTGACAAGGAAGCATGTATGGACATGGAATCAGGTCCTGAGCAAGCA GGCGGTCCTCCAAGGCGGTGGAATTGGCCCTGGATCCCTGCCCAAAGGCCGCTCCGCTCTGGGCCTTGGTGGGAAAG CTCTGCCCTCTAGGCTGGCCTCTGAGAGGGCTTTGGTGTGACCTTCCTGTCACTGCCCACTTTCTAACCAGACAAGG AGGGTGTCTGTACCTGGCGCTAACCCAGGGTTTGGGGGACCGTCCTGCAGTCCCCGTCGGACAGAGAAGGCTTCGTT TCTCAGGAGCTCCAGGCTTTGATTCACTCCCACGATGTGTTTCTTTTTGGGGTAAAACAGTCCCCACGGGGAGTTAA ATTTTAGGAAGCCATGAGATCCTTCCAGATGAAAGGCATCATGTAAGTGTATGATACTGTTACTGAGCAAAAGCCCC AGTGCTCCCAGGTGTGGCAACGAGACACCTGCACTCACCGGGCACCACCCAGCCGGGGGGGGCGCTCCCCGGGACTG GCAGGTTCTCTAGGTGTGGCAGTGAGACATCACTCACCGGGCACCACCCAGCCGGAGTGGGTGCTCTCCGGGACTGG CAGGTTCTCCAGGTGCCTCCTTCCTCTTGCAGCTTTGCTCACTTTGTCAATTTTCAGGAAGGGGAATTTTAAATGTC CCCCCAGTCCTGAAGAGATTGAGCAGCATTTTCAGGAGGAGGCCTCACCATCATCATTGCCACACTGGCCATAAACC AGAGACTCTGCTGGAGAAACCCTCTGCAGACCTTGGAGGCCTCACACATCCCAGTTACGGGCAGCGCAGCTGTCCCC TCCGGAGAAGATTCCTCTGCAATGGGAA

[0592] GenBank Accession No. Z84721 GATCACGCCATTGCACTCCACCCTGGGCGACAGAGCGACGAGACCCCGTATCAAAAAAAAAAAAAAGAAAGAAAGAA AGAAAAAAGAAAAAAAAAAGGCCGGGCGCGGTGGCTCACGCCTGTAATCCCAGCACTTTGGGAGGCCGAGGCGGGTG AATCACGAGGTCAGGAGTTCGAGACCATCCTGGCCAACATGGTGAAACCCCGTCTCTACAAAAAAAAAAAAAAAAAT TAGCCGGGCGTGGTGGCGGGCGCCTGTAATCCCAGCTACTCGGGAGGCTGAGACAGGAAAATCGCTTGAACCCGGGA GGCGGAGCTTGCGGTGAGCCGAGATTGCGCCACTGCACTACAGCCTAGGCGACAGAGCGAGACTCCGTCTCAAAAAA AAAAAAAAAAAAAAAAAACACTTGGAAGCCGACAGGAGATCTTTGAGACCTTGGGCGAGGCAGTGACACTAAAGGCA GGAGCGACTACAGAAGAATAAATTAAACTTCATCAGATTAAAAACTTTACTGCGGCCGGGCGCGGTGGCTCACGCCT GAAATCCCAGCACTTTGGGAGGCCGAGGTGGGCAGATCATGAGATCAGGAGATCTAGACCATCCTGGCCAACATGGT AAAACCCCGTCTCTCTACTAAAAATACAAAAATTAGCTGGGTTTGGCGGCGCCTGCTTCTAATCCCAGCTACTCGGG AGGCTGAGGCAGGAGAATCGCTTGAAGCCGGGAGGCGGAGGTTGCAGTGAGCCGAGATCGTGCCACTGAACTCTGGC CTGGCGACAGAGCGAGACTCCATCTCAAAACAAAACAAAAACTTCGGTGCTTTAAAGGACACCATCAAGAAAATTAA AAGTCCACCCACAGAACGGGAGAAAATATTTGTAAGTTACATATCTGATAAGGGAATTGTATCTAGAATGGAGGAAA CTTACAACTCAACAATAAAAAGACAATTGAAAAATGCACAAAGGATATGAATATTTTTCCAGTGCATTATGCAAATG GCCAATAAGCACCAGAAGATGCTCAGCTCAACTGGTAGAGGCTTACGCCTGTGACCCCAGCGCTGAGAGGCCAGGAA CTCCAGACCAGCCTGGGCAAAACAGAAATTAAAAATGCTCAACATTATTAGGCATTAGGGAGATGCAAATCAAAACT ACAAATAGATGCCACATCACACCTCCTACGATGGCTGTAATCAAAAAGACAAGCGTCAGCAGGGGTGTGGAGAAACG GGAATCTCTCTCCTGCTGGTGGGAATGTAAGAGGCTACACTCGCTATGGAAAACAGGCTGGCAGTTCCTGAAAGGTT AGAGTTAACACAACACTCGGCAAATCCCCCTTTTAGATATATAGCCAAGAGAAATGAAAGCATATGTCCACACAAAA ACATGTGTGTTCTTAGTAATATTATTCATAATAGCCCAAAGTGGAAGCAATCCTAGGGTATATCAATTGATGAATGG GTGAATATGGTATAGTTTGTTTAAGGGAATACTATTCAGCCATAAAAAGGAATGAAGTACGGCACATGAATCCATCT TGAAGACACACTAATATATGATTCCATTTATATAAGATGCCCAGAATAGGCAAATCCATAGAGACAGAATGATTAGT GGCTGCCTAGGGCTTCCAGGGGGTCAGGGGAAATATGGAGCGATTCATGGGTTTTTTGAAGGGGAGTGATGAAAATG TTCTAACGTTGACTGTGGTAATGGTTGGACAGCTCTGAGAACGCGAATACACTAAAAGACATGGAAGTGCCGGGCGC AGTGGCTCATGCCTGTAATCCCAGCGCTTTGGGAGGCCAAGGCAGGCGGATCGCGAGGTCAGGAGATCGAGACCATC CTGGCTAAGACAGTGAAACCCCGTGTCTACTAAAAATACAAAAAATTAGCTGGACATGGTGCGGGCGCCTGTAGTCC CAGATACTCAGGAGGCTGAGGCAGGAGAATGGTGTGAACCCGGGAGGCGGAGCTTGCAGTGAGCCAAGATCGCACCA TTGCACTCCAGCCTGGGCGACAGAGCGAGACTCCATCTCAAAAACAAAAAAAAGATATGGAAGTGTACACTTGAAGT GGATAAGCTTTATGGTATGCAAATTGGTATGGTATGGTAAATTATATCTCAATGAAGTTGTTTTTTAAAAAATCACC CCACCTACCCTATCCCAGGCTTCCCCAGGAGGTAACTAAAGGTAATGAGCTTCTTTGGCTGCTTCCAGAACTTTCCC AAGCACATCAAATGCATCAGAACCTAACCACTTGACTGAGGGATGAGCATTTTCACTGTTGCAAGTAACCCTCTTGC ACCAACACTGACACTAATGTGTATTTTGCAGAACAAATTTGTGGATTGGCCTCACCAGGGTGAAGGGTACGTGCATT TGAAATGGCTCAACAGTACCAACAGGTGCGTTTTCTTGCACAGGGCTGCATAACATTTTTTTTTTTTTTTTGAGACA GAGTCTCGCTCTATCACCCAGGCTGGAGGGCAGTGGCACAATCTCAGTTCACTGCAAGCTCCACCTACCAGGTTCAC ATCATTCTCCTGCCTCAGCCTCCCAAGTAGCTGGGACTACAGGTGCCCGCCACCACACCAGGCTAATTTTTTTTTTT TTTTTGAGATGGAGTCTTGCTCTGTCGCCCAGGCTGGAGTGCAGTGGCACGATCTCAGCTCACTGCAAGCTCCACCT CCCAGGTTCACACCATTCTCCTGCCTCAGCCTCCCCAGTAGCTGAGACTACAGGCGCCCGCCACCACGTCCGGCTAA TTTTTTTGTATTTTTAGTAGAGACGGGGTTTCACCGCGTTAGCCAGGATGGTCTCGATCTCCTGACCTCTTGATCCA CCCGCCTCGGCCTCTCAAAGTGCTGGGATTACAGGCGTGAGCCACCGTGCCCGGCCTGCATAACATTTTTTTTTTTC CTGAAATTCCCAGAAAGGAAAATGGTGTCTTGTTCTATGTTGCATTTCTTTGATTGAGAGGGAGAGCTGCATCACTT AATTATTTGCAGAGAATTGCTTTTCTTGTTTTCTTTACAGGTGGTCTGTTCTTGGATGGTCTGGCTGTGTTCTTTCT GAGGAATACATAACCTCTGCTACACATTTTGCAAGGCTTTATCCCCGTTGTCCATGTTTTGATTTTATGTATAATCA AAAGGTTTGTGAGTTCTCCCGCACTTCCCAGGAGTGCCTCTGGGATGGAAATGAGACTGCAGGAGCAGGGCTTGAGG CTGGAGGGGTGAGATGGGACAGATGGGGGTGGGGGAACCCAGGGCAGTGGCCGGTGGTGGTAATGGAGGCCTCCTCA CAGGGACCCTCACAGCGACCATGCGAATGGAGCAGGACTGTGACTCAGGTCTCGCTCTTCTGACCTAATCGTGCTGC TGCCCCAATGGGCAGAACCTTGGGGCTCCAGACTGGACATCTCTGGGCTCAAAGGATCCCACTGTTCCCCCGGTTAC CCTCTCAGGGTTGGCCTCCTGCCAGTAACCCTGGCACTCATTGTTCATTCTTCTGACTATCGTCAGTCATAATGAGA GCTCGAACTGGTGAAAGTGCAGGGAGCTCACCATGACCCCAGCCCACAGAGGTCCTGGGTGCGTCCCTGCCCTCGAA GCAGCACTCTGGATCCCAGCGCCACCCTCATGTCCATGTTTGCACCTCATTGGCTGTGACAGAAATGAGACATCATT GTCACACGCTGGCCTGAGGGTCAGTGGGCCTTGCTTTGGACCTCAGTTTCCCCACCAGTAACAGGGTTCAGAGCAGA TGGTCCCTGAGTGAGTCCCAGCTCTAAGTTCTCCCAGGGTCTCCTGGACAATGAAGCACCAGGGCCAACCTCCATTT GCTACAGGGGACATCCTCAGGCTCTTCTCTGCTAAGACCCCACACCTCCAAGTCTCCTCATTTTACCTTTAAATAGC TGTTTCATGACCTGCTTTTTTGACGGTAAGTAGATTTTTGGAAACTGAAACCCCTGACCCTTCCTCCCAGCCTGGGC CTGCCCTTGGCAGGATAGGAGGCCTTATCGGTCCTGCCACTTGGTCTGGGCCTCAAAGGGCCACCGCCATCTGCAGG AGGGCCGGGTGGGGTTCACAGACGCTATCTGGGACTTGCCTGGACACCTCCACCTTCTCAGCTGAGTGTTGCTGCCC CACCAGGGAGAACCACTCACACACAGTAGTAATAGAAATAATTTAAAATTCATGCTGCAAGTTCCTGAGCGCCCTCC CAACACTGAGGTGGGGGCTAGTCTAATCCCCATCCTAGAGGTGAAAACAGTGAAACTAGGACTCACAAGGCAAATTA GCCTGTTCAGGGTCACCGAGGGTCCACTCTCATGGGAGAGTTTGCAGATGCCCAATCCGGCATTCTGCTGAGTGTCC AGTGGCTTGTAAGTGGCCAGACACCCTTTGAGCTCAGCCTCAGCTGCTCAGGCACAGAACGTGCCTGGAGCTTGGAA TTCAGGCCAGAAACCACCAGTGGACACCAGCATTCCACACTCACTGCACAGGCTGGGGCTCAAACCAAGGCCCAGGG ACAGGAAGGGACAAGCCCCAGCCCCAGCCGGACTCCCAGCCCACACAAACCATCAGGGCTTGTTTCCTGCTCCATGG AAGCCTCAGACATGTTTCATAACCTCCTGGAGCCTCCGTTTCCTTATCTTTCCAATGTAATGATGCCCATGTGCAGT GGCTCACGCCTGTAATCCCAAGCACTTTAGGAGGCCGAGGTGGGTGGATCACTGGAGCTCAGGAGTTTGAGGCCAGC CTGGGCAACATGGCAAAACGCCATCTCTACTAAAAACACAAATATTACCCAGGCATAGTGGCACATGCCTATAGTCC CAGCTACTCAGGAGGCTGAGGTGGGAGGATCACCTGAGCTTGGGAAGTTGAGCCTGCAGTGAGCCAAGATTGTCACA CTGCACTCTAGCCTGGAGGACAGAGTAAGAAGACCCTGTAACAAAACAAAACATAACAAAACAAACAAACAAAAAAC CCAACTAATGACAATAAAATAAACCCTCCCTCACAGGGTGGTTGTGAGGATAAAGCACCCAGAATGAAGAGTGTTGC TGCCATGTGCAGAACTTAGAAAGTGCTCAACAGATGCCAGCCAAACAGACATGGACTCCCCTCAACACAGTCAACCC AAGGTTGACTGTCACCAAACGCAAAAGACCACACTGTAAAGCTTTTAGAAATGTGGTCTAGTGGCCGGGCACTGTGG CTCATGCCTGTAATCTCAGCACTTTGGAAGGCTGAGGCGGGCGGATCACAGGGTCAGGAGTTCGAGACCAGCCTGAC CACCTGACCAACGTGGTAAAACCCCGTCTCTACTAAAGATTCAAAAAATTAGCCGGGTGTAGTGCTACGTGCCTGTA ATCCCAGCTGCTCGGGAGGCTGAGGCAGGAGAATCGCTTGAACCCAGGAGGCGGAGGTACAGTGAGCTGAGATCGCG CCATTGCACTCCAGCCTGGGAGACAGAGAGAGACTCCGTCTCAAAAAAAAAAAAAAAAAAAAAGTTAGCCGGGTGGT AGTGGCATGTACCTGTAATCCCAGCTACTTGGGAGGCTGAGGTAGGAGAATCGCTTGAGCCTGGGAGGTAGAGGGTT GCGGTGAGCCAAGATGGCGCCACTGCACTCCAATCTGGGCGAGACACTGAGACCCTGTCTCAAAAAAAAAAAAAAAA TGTGGTCTAGGAGACTCTCTTCACTTTGAGATAAAATTTGCATCACGTAAAGATAACCATTTTAACGAGAGCAAGTC AACGGCATTCAGCACATTCAGAGTGTTGTGCAACAACCACTTCTCCCTGGTTCCAGGACATTTTCATCGCCTCAGAT GGAAACGCCCTCCTCACGGAGGCATCTCTCCCGGCCTTTGTCCTCCCCGGCCCTGACAACCACTAATCTACTTTCTG CTGGGATTTGCCCATTCTGGATGTTTCCTAAAAATGGCTTATCTAAGCCCCACAGTTTCATGCAGCACGTAGCCTCT GGTGTGTGACGTCCTTCACTTGGTGTAATGGTTCGAGGCTTGTCCATGTCGTAGCCTGGGTCAGAACTTCATTTTCA TGGCTGAATAATATCTCACGGTGTGGAAATATCACAGTTTGCTTATCTGTTCATCCAGTGATGGACATTTGGGTTGT TTCTACCTTTTGGCTATTGGGAATGGAAGGGATAACATTTTTTAATTGGATTTTTAAAGTCACTAGTTTGACTGCAT TAAAATTACAAACTTTTGTTTAACGAGAATATCACTAAGATACAGAGTTGGGGAGATCTAACACATAAAAGTGACAA AGGAATTATATCCAGAATATTTTTGAAATTTCTACAAATCAGTGACTGGCAACACAGTGGGAAAGTGGCCAAGACTA AAATACTTTAATAAAGAGGAAACCGAAATGGCCAGTAAATATGGGCTCAACCTCACTAATTATCAGGAAAATGTAAA TTAAGACCACAAGAGAAACCACTACACACTCACCAAAAATCACACACCCAATAAAAAGGTAATTTTTTTTTTTTTTT GAGATGAAGTCTCACTCTATTGCCCAGGCTGGAGTACAATGGCGCGATCTTGGCTCACTGCAACCTCCGCCTCCTGG GTTCAAGCGATTCTCCTGCCTCAGCCTCCTGAGTACCTGGGATTACAGGCGCACACCACCACACCCAGCTAATTTTG CATTTTTAAGTAGAGACGGGGTTTCACCATGTGGGCAAGGCTAGTCTCGAACTCCTGACCTCGTGATCTGCCCGCCT TGGCCTCCCAAAGTGCTGAGATTACAGGCATCAGCCACTGTGCCCGGCCTAAAAAAGGCTAAAATTTAAGAAGACCA GGAGTTTGACTGCTATGGTTGGAATGTTTGTCTCCTCTAAAACTCTTGTTGAAACTTAATCCCCAGTGTGGCAGCGT TGAGAGGTGGGGCCTTTGGGGTAAGGAGGTTGGATCATGAGGGTCCTCCCCCAAGGAATGGATTAATGAGTTGTCAT GGGAGTGTGGCTGGTGGCTTTATAAGAAGAGAGACCTGGCCGGGCACGGTGGCTGACACCTGTAATCCCAGCACTTT GTGAGGCCGAGATGGGCGGATCACAAGGTCAGGGGATCGAGACCATCCTGGCTAACACAGTGAAACCCTGTCTCTAC TAAAAAAAAAATGCAAAAAAATTAGCCGGGCGTGGTGGCGGGCACCTGTAGTCCCAGCTACTAGGAAGGCTGAGGCA GGAGAATGGCGTGAACCTGGGAGGCGGAGCTTGCAGTGAGCCGAGATCGCGCCACTGCCCTCCAGCCTGGGCGACAG AGCAAGACTCTGTCTCAAAAAAAAAAAGAAGAGAGATCTGAGGTGGCACACAAGCATGCTCAGCCCACACGACCTGC GATTAATACTCTGTGCCACTTTGGGACTCTGCACGAGTCCCCACTGGGCTCGAAACTTCTCAGCCTCCGTAACTATA GGAAATAAATTCCTTTTAAAATAAATTCCACAGTCTCAGGTATTCTATTATAAGCAACAGAAAATGGAGTACTACAC CGATCATATCAAATGTTTAGAAGGATTTGGAGCAAGGAGAATGCTCGCACACCACTAGGGAAAACATAAGTTGGTTA ACCACTGTGAAAAAGTTTGGCATTCTTTACTAAAGTTGAAAATCTATATGCCCTATGACCCAGCAACTTTACTCCTA GGTATGTATGTACAAAATAGAATTTCAGGCATGTGGGTACCAGGTGACATGTAAAGGAATGTTTATTGCAGCATTAT TCATAATAGCCAAGAACTAAACAACACAAAGTTCCAGCCCCAGTACAATGAATAAACTGTGGTATATTCCTACAAGG AAATATTAATAGATACAGCAATGAAAATGAACACATATAACATGGCTGGTAAATCTGACATGAGAGAGTGAAAGAAG ATGGACATTCAGTGTGCAGACAGTTGGATTAAAAATATTTTTTTAAAGGCCAGGCTTGGTGGCTCACATCTATAATC CTAGCACTTACAGAGGCCAAGGCGGGCAGATCACCTGAGGTCAGGAGTTCAGGACCAGCCTGGCTAACACAGTGAAA CCCCATCTCTACTAGAAAATACAAAAATTAGCCAGGTGTGGTGGTGCATGCCTGTAGTCCCAACTACTCGGGAGGCT GAGGCAGGAGAATCACTTGAACCTAGGAGGCGGAGGTTGCAGTGAGCCAAGATCGCATCACTGTACTCCATCCTGGG TGACAGAGCAAGACTGCGTCTCGAAAATAAATAGATAAATAAATAAATAACCAACAGGCCGGGAGCAGTGGCTCATG CCTGTAATCCCAGCACTTTGGGAGGCTGAGGTGGGCAGATCACGAGGTCAGGAGATCAAGACCATCCTGGCTAACAC AGTGAAACCCTGTCTCTACTGAAAATACAAAAAAATTAGCCGGGCATGGTGGCGGGCGCCTGTAGTCCCAGCTACTC AGGAGGCTGAGGCAGGAGAATGGCATGAACCCGGGAGGTGGAGCTTGCAGTGAGCCGAGATCATGCCACTGCACTCC AGCCTGAGCGACAGAGCGAGACTCCATCTCAAAAAAATAATAATTAAAAATAAATAAATTAAATAAATAAATAACAG ATTGCATAAAGTGGCTCATGCCTGTAATCCAAGCACTTTGGGAGGCCAAGGCAGAAGGATCACTTGAGCCCAGGAGT TCAGGACAAGCCTGAGCAACATGGTGAAACCCCACCTCTACAAAAAAAAAAAAAAAATTAGCTGGGCATGGTGGCAT GTGCCTGTGATCCCAGCTACTTGGGAGGCTGAGGCAGGAGGATCACTTAAGCCTGGGAGGTCGAGGCTGCAATGAGC TATGATCGTACCACTGCACTCCAGCCTGGGCAATAGAGCAAGACCCTGTCTCAAAACAAATAAACAAAAGCCAGACA GACACAAATGAGAGCATTCTGTATCGTTTCATTTCTATGAAGGTGAAAAGCAGGCAAAAACAACCAAAGTGCTTGCA GATGCATATCTGAGTAGTTAAAAACTTACTGAAAAGCAGGCCTGGCTCACGCCTTTAATCCCAGCACTTTGGGAAGC GGGCGGATCACGAGGTCAGGAGATCGAGACCATCCTGGCTAACACGGTGAAACCCCGTCTCTACTAAAAATATAAAA AATTAGCCAGGTATGGTGGCTAGTGCCTGTGGTCCCAGCTACTCGAGAGGCTGAGGCAGGAGAATGGCATGAATCCG GGAGGTGGAGCTTGCAGTGAGCTAAGATCGTGCAACTGCACTCCAGCCTGGGCAGCAGAGCGAGACTCCCTCTCAAA AAAAAAAAAACTTACTGAAAAGCAAGAAGTCAGGTGGAGGTTACCTTTGGGGAGGATTGGGGTGCTGTCCGCTTTCT AATAATTCGTTAAACTATAGTCTACATCTTGTGCTATATTTCACAATGGAAAAACAGAAAAGAGCTCCTGCCCATAA CGCTGCTTTGCAGGTTTGGAAATTTCAGATTCAATTCCTCTCCTTGCGGGGGCCAAGGATGGGAAGAGCAGGTGGTT CCAGTAGGGAAAGAGGAGGCCCTGGGGCCTCAAAATGGCTAAGGACCATTCCTCAGCGTGGGTGGCACCTACCCTGG AAACAGGACTCTACTTCCTCCTCTGTTAGGGGGCAGAGCAGCCCTGCAGTGCCTTCTGGGCACAGGTCCTCACTCTG CAGCTGGAGGAATTCTCCCAGGCACTGAGAGCCCTTCACGGCCCAAATGCCCCGTGCGCTCGGCCTCTGGACTTGCC TTCCCTGCTCTGTATATCTCCCTCCGCCTGACCCTCAGCCTCCTCCATCACTCACTGTCTTCTCTGCCAGTCTATTC ATCTGTCTCTGTCCCTCTCTCTGCCACCTTCTCTCCTATTGAGAAGCCGAAACCTCAGGCACAGACCCACATCCCCT CCTCATGGGCCCATGTGCCCAAGGTGCCCCTAGGTGCCAGGCTGAGATGAACCAGGAGTGTCCTTCTGAACCCAGCA ACAGCGAAGGGTGACCAGGGAGGGCCAGTTCATCTCGGTCTGAAAGAAGCCCCAGATGAGCAAAGGATACACTGGCC TCCTGCGGTCAGCAGCACTTCCCAGGACAGTGAGCAAGACAGGGGTAAGGCCAGAGTGGGTGGGCACACCCATGGGA GAGAGGAGCCGCTGTGAAATGTGCACGAGGAACAGACCAGCAAGGAGGATCCACGCAGTGCTAGAAGGGAGTTCCTG GAAGCCTGGTGGAGAGCCCCTCCCATCTGCTAAGCCCGGAGGGCATCAAAGGCTGCTGCTGCCCTCAACCCCTGACA ATCTCATCATCTCATATCTCAGGCATGGAAGAATGAGGGCCATTACACGAGTAAAACATCAAGTACACTCCAGCCTG GATGACAGGGCCAGGCTCCATCTCAAAAAAAAATGCCTGTGGTCAAAGCTCTCCTGACAGGGGAAAACAAAACAAAA CAAACTTCTCCTTAAAGAAAACATTTGCCTTTGACTGCATCATAATTCCAGCAGGATTTTGTGCAGATAACTCTTTG GCTAACTCTAAAATTAATACAGAAAGGTAAAGAAATTAGAATAGCCAAAGAAATTTTGAAAAGGAAGAATAAAGCGA GAGGAATCACATTCCTCAATTTTTAACAGCTCTATTGAGATAAAATTCACATACCATACGGTTCACCCATTTAAAGT GTATAATTCAGGCCGGGCGCGGTGGCTCACGCCTGTAATCCCAGCACTTTGGGAGGCTGAAGCGGGCAGATCACCTG AGGTCGGGAATTCGAGACCAGTCTGACCAACATGGAGAAACCCCGTCTCTACTAAAAATACAAAATTAGCCAGGCGT GGTGGCTCATGCCTGTACTCCCAGCTACTCGGAAGACTGAGGCAAGAGAATTGCTTGAACCCGGGAGACGGAGGTTG CCATGAGCCGAGATCGCGCCACCACACCCAGCTGCCATTTTTTAATTGATTACTTGTCTATTTATTACTGAGTTGTA AGATATTTTGGGCCAAGCACGGTGGCTAACGCCTGTAATCCCAGCACTTTAGGAGGCTATGGTGGGCAAATCACTTG AGGTCAGGAGTTCGAGACCAGGCTGGCCAACATGGCAAAACACCATCTCTACTAAAAATACAAAAAAATTAGCCAGG TGTGGCCAGGCGTGGTGACTCACGCCTGTAATCCCAGCACTTTGGGAGGCCAAGGCGGGTGGATCACCTGAGGTCGG GGGCTCAAGACCAGCCTGACCAACATGGAGAAACCCCGACTCCGCTAAAAATACAAAATTAGCCGGGTGTGGTGGTG CATGCCTGTAATCCCAGCTACTCACGAAGCTGAGGCAGGAGAATGGCTTGAGCCCAGGAGGCAGAGGTTGTGGTGAG CTGAGATCATGCCATTGTACTCCAGCCTGGGCGACAAGAGCGAAATTCTGTCACAAAAAAAAAAAAACCATTAGCCA GCCATGGTGATGCACACCCGTGGTCCCAGCTACTCAGGAGGCTGAGGTATGAGAATTGCTTGAACCCAGGAGGCAGA GGTTGCAGCGAGCCAGGATTACGCCGCTGCACTCCAGTCTGGGTGACAGAGCAAGACTCTGTCTAAAAAAAAAACAA AAACAAAAAAGATATTTTGTATGTGTTTGGATAACTTCCCTATCAGATATATGATTTGCAAATATGTTTCTCTCATT CTGTGAGACATCATTCAATTTTAAGACATCACAGAGCTATGTTAATCAAGGCACTGTGGCTGTGGTAAAGGATAGAC ACACAGAACAGAACAGAGAGCCCAGAAATGGACCCGCAAACCTATGCCCCATTCATTTTTTACAAATAAGTGCGAGA AGCCAACTGAATAGAAAGCGTATAGCTTTTTCAAAAAACAGTGCTGGAACAATTGGACATCTGTAGGCAAAAAAACA AACAAGCAAACAGAAGAATCTGGACCTGCCCTTCACACCTCAGACAAAAGTCATCTCAAAATGGATTGTAGATCTCA ATATAAACATAAACTATACAACTTTAGAAGAAAATATAGGTGAAACTCTTTGTGTTCTGTGGTTAGGCAGACAGTTC CTAGGCATGGCACTAAGTAAGATTCATTTAAAATTTTTTGACAAATTGGACTTTATTAAAACTTTTGCTCTACAAAA GACAATATTAAGAGAATGAACTAACAAGCTACAAACTAAGAGAAAACATTTGCAAATTGCATATCTGACAAGGGATT GCTTCCAGACGATACACAGAATTCTAAAAATTCATCCTTAAGAGAATAAACCACCCAATTTTTAAATGGGCAAAACA GGCCAGGCGTGGTGGTGCACGCCTGTAATCCTAGCACTTTGGGAGGCCGAGGCAGGCGGATCACAAGGTCAGGAGAT TGAGACCATCCTAGCTAACACGGTGAAACCCTGTCTCTACTAAAAATACAAAAAATTAGCCAGGCATGGTGGCAGGT GCCTGTAGTCCCAGCTACTCGGGAGGCTGAGGCAGGAGAATGGCGTGAACCTGGGAGGCGGAGCTTGCAGTGAGTGG AGATCGCACCACTGCGCTCCAGCCTGGGCAACAGAGCGAGACTCCGTCTCAAAAAAAAGACAAAATACTTGAAAAGA TATTGGCTAGGCGCGCTGGCTCATGCCTGTAATCCCAGCACTTTGGGAGGCCAAGGCGGGTGGATCACAAGGTCAGG AGTTCAAGCAGCCTGGCCAAGATGGTGAAACCCCGTCTCTACTAAAAAAAAAAAAAAAAAAAAAAAAAAAATTGGCC GGGCACAGTGGCTCATGCCTGTAATCCCAGCACTTTGGGAGGCTGAGGCAGGTGGATCAGGAGTCAGGAGATCGAGA CCATCCTGGCCAACATGGTGAAACCCCATCTCTATGAAAATACAAAAATTAGCCAGAGATGATGCCGGGTGCCTGTA ATCCCAGCTACTCATGAGGCTGAGGCAGAAGAATCACTTGAACCAGGGAGTCAGAGGTTGCAGTGAGCTGAGATCGC ACCACTGCACTCCACCCTGGGCGACAAATCGAGATTCCATCTCAAAAAAAGAAAAAAAAATTAAAAGGAATATTTGC CTCATTATGTTACAATAACTAATATGGAAAGCAATATTGCAATGCCTATTAGCACATGACATTAGGTGAATTCTCCT TTGTCCCCGGACCTGCTGCCTCCTCCTGCTTGTCAGGGGACAGATCCAGTACATCTCCCCTCAGCGCTGGGTGGACC TAACCCTTGCTTTCTTGGAGGAAACCCAGGAATCCAGAGACAAAGTGGAAGGGTACTGGCATGTGGTTGGGCAGGGC TGCCTGAGGTCGGTGTCAGCCGACCGTGGGGCTTGGTCCCAGGAGGCTGCTTACTGGGCCCTGCTCCTCTGGTTTCC CCCAAGTCGTGATTCTGAAATGAATAAGGACGGTGCAGAACTGGACTACAAATGCAGGAGTGACTTCCTGGGAGGGT GGGGCCCCTATCTCTCCTAGACTCTGTGGTCAGACTCTGGCCAACACCCCCTGTAAGGCCACAGGAGAGGAACAGGA GTGATAGCCCCCAAACCCCAGTCCCACCAGGCCCTGAGGGCCCCTTTGTCACTGGATCTGATAAGAAACACCACCCC TGCAGCCCCCTCCCCTCACCTGACCAATGGCCACAGCCTGGCTGGGCCCAGCTCCCTGTATATAAGGGGACCCTGGG GGCTGAGCACTACCAAGGCCAGTCCTGAGCAGGCCCAACTCCAGTGCAGCTGCCCACCCTGCCGCCATGTCTCTGAC CAAGACTGAGAGGACCATCATTGTGTCCATGTGGGCCAAGATCTCCACGCAGGCCGACACCATCGGCACCGAGACTC TGGAGAGGTGAGTGTCAGACGGGACTGCCAGAGGGACTGGGTGGGAGGCCAGGTATGTGAGTGGGGACAGTGGGGAG GGGGCGGTGGGGAGGGGACAGTGGGGAGGGGACCATGGAGAGGAGACAGTGGGGAGGGCACTGTGGGGAGAGGACAG TGAGGAGGGGACCTTGGGGAGGGGACAGTGAGGAGGGAACCGTGGAGAGGGGACAGTGAGGAAGGGACAGTGAGGAC AGATAGCGTTCCCTCTCAGTGAGGAGAGCAGGGTAAGGAGGGAACGATTAGGAGTTGCACAACCATCTGGGCTCGCT GAGACCTGGGCAGGCACAGGCCCAGGTTCTGACAAGCAGAGGGTGAAAGGTTTCGTTCTAGGCCTGAAGGGCCTTAC AGGGCAGCCAGGGCACTACAGCCTCTAAAGTCCCAGCATCTGGGATCAGGGCACTGTCCCAGCTTCAAATTCCCAGC ATCTGATCCCCTGGGAGGGGCCAGGGAGCTTTTCCTTCCCTGGAACGCTGCTGGGAGGTCATGAGCCTGCAGAAGGG GTGGCGGGCAACCCAGTCTGGGGCTGGGAGGGAGGTCCTGTGGCCAGAGGAGACGGTGGAGGGGCTGGGGGCACCAG GCGTGCTGGAGGCGGAGGGCGGGAGATTTGGGGACCAGGCTGCACAGAACCCGTCGGAAGCAGGGCGATCAGCCGGG AGCTGCAGAGGCCTGGGGGGCCTCTAGCCCAGGGCAGCCTGGGAGGGGCAGCTGCCTGGGCACCCGGGCCCCGCGAG GAGGGGCTGGGGCCTGCTGCGGGGTCGCAGATGTGTCCCGGTGCTCGGAGAGGGCCGCAGGGCGCGTGGGCCGTGGC GGGAGGCCGCGCTGCTGGGAGCTCACGGCCCCCGCCCCCCGTCCCAGGCTCTTCCTCAGCCACCCGCAGACCAAGAC CTACTTCCCGCACTTCGACCTGCACCCGGGGTCCGCGCAGTTGCGCGCGCACGGCTCCAAGGTGGTGGCCGCCGTGG GCGACGCGGTGAAGAGCATCGACGACATCGGCGGCGCCCTGTCCAAGCTGAGCGAGCTGCACGCCTACATCCTGCGC GTGGACCCGGTCAACTTCAAGGTGCGCGGGGCGCGGTGCGGGGGGGGCGGGACGGGGCGGGGCGCGGTGCGGGCGGG GCGGGGCGGGGCGGGGGGGGAGGGGCGGGGAGGGGGGGGGTCGCGGGGCGGATGCGGGGGTCGCCGGGGGGGGCCC GGGCTAGGCCCCGCCCCCTCACTGAGCCGCCCCCGCCCCCAGCTCCTGTCCCACTGCCTGCTGGTCACCCTGGCCGC GCGCTTCCCCGCCGACTTCACGGCCGAGGCCCACGCCGCCTGGGACAAGTTCCTATCGGTCGTATCCTCTGTCCTGA CCGAGAAGTACCGCTGAGCGCCGCCTCCGGGACCCCCAGGACAGGCTGCGGCCCCTCCCCCGTCCTGGAGGTTCCCC AGCCCCACTTACCGCGTAATGCGCCAATAAACCAATGAACGAAGCAGCGTCCACCTGGTCTCTGTTGTCCGTGGGCG GCGGGCGCTTGGGGAGGCGGAGCGGGAGGAGGGCGCCCCGGCTGTCTCGGGGCCACTGCTGGGCCGCAGGGATCCTT GCACCGACCCCAGGGTCTCTAAGAGGCAGAGGGATGTGCAGCTCCCGGGGGGGGAGCGGGGGTCACTCGGGACCCAG GCGTGGTGGAGAAGGGGTGCAGTTAGGCCTTTGCGGAGGGGGGAGCAGTGCTGGCGCCCACCCGCCGCGGCTCTCCC TGGGACCTCCGTGGTCTTCCTTCTTTATTTCTCCCGAATGTGTACTATTTCCTGATTTCAGAACGATCAGGACGAAG AGGGGAGGGATGGGCGTCTGCGCTCACTCATTCCTTCTTCCATTCCTCAATGAAACATTTACTGGGCATAAGACAGC CTAGGCATGTTTCTAGGCTATGGATACCGCAGCTGAAATAAAGAAAGCCCTCTGCCCCGTGGGGCTGACAATCTAGT GGGGGATACAGACGTGATGAAGACAGTCAGATCACAGTTCACAGAAATGAGACAGGAAAAGAGGCTGAGCCTCACTC ATAAGAGAAACGCAAGTTAAACTACACAAAAATAAAAAACCTCACTGAGATCCATGTCTCACCTCCCTGATAGGCAA AAATCCAAGAGTTTGATCAGACTGCAGGCGCCCCTCCTCCACTGGGCACCCCTCATCCAGGGCAGAGGGAACCAGCC CGGGGCGCAAGTCCACCGGGGCATCTCATTTGCTAAAGACCTGAAAACCCAGGTGTCCATCATCAGGACTAACTGGA AAAACCAAGGGTATCCGCACCATGGAGAGCTCGACTGAAAAAAAAAAATGAGGATAATTGGATAATTTCTTTTTTTT TTTTTTTTTTTTTCAGACGGAGTCTCGCTCTGTCGCCCAGGCTGGAGTGCAGTGGTGCGATCCCGGCTCACTGCAAG CTCCGCCTCCTGGTTTCAAGCGATTCTCCTGCCTCAGCCTCCCGAGTAGCTGGGTCTACAGGCGCCCGCCACCACGG CTGGCTAATTTTTTGTATTTTTAGTAGAGACGGGGTTTCACCGTGTTAGCCAGGATGGTCTCGATCTCCTGACCTCG TGATCCACCCGCCTCGGCCTCCCAAAGTGCTGGGATTACAGGTGTGAGCCACCGCGCCCGACCTAAAATGAGGATAA TTTCTAATAATGAAAATAAAGAGGTTAGAATGGTGTGTATACAATGGTGGAACAGAGGAGAAACACGAATATGTGTG TGCACATATATGTGAGCTTATGCATAACTATGTATGAGGCTGCGTGTGGACATGTGTGTTTGTGCACAACCATGTAT GTGCCCGCATGTGCTTATTTCTGCAAAAATAAACCATGGCAGGACAAACCGGAAATGAATACAAATAATAAGGTGGG TGGGGATGGAGGGGAAGGTGGAAGGAAGCTCCTGCAAGTCTGACTCTCTACATAGTTTTGACCTTTGATTTGTGTAA ATATTTTACATTATCAAAAATAAATTCAGGCTGGGCATGGTGGCTCATACCTGTAGTCCTAGCACTTTGGGAGTCCA AGGGGAGAGGATTGCTTGAGGCCAGGAGTTGAAGGCCACCCTGGCCAACATAGAGAGACCCTGTCTTTAAAAAAAAT TACAAAATTAAGGCCGGGCGCGGTGGCTCACGCCTGTAATCCCAGCACTGTGGGAGGCCGAGGTGGGCGGATCACGA GGTCAGGAGATTGAGACCGTCCTGGCTAACACGGTGAAACCCCGTCTCTACTAAAAAGTAGAAGAAATTAGCCGGGT GTGGTGGCGGGTGCCTGTAGTCCCAGCTACTTGGGAGGCTGAGGCAGGAGAATGGTGTGAACCCGGGAGGCGGAGCT TGCAGTGAGCCAGGTTCAAGCCACTGCCCTTCAGCCTAGGTGATAGAGTGAGACTCCTTCTCAAAAAAAAAAAAAAA ATTACAAAATTAATAAGATTAAAATAAAAAGAGGGGCCTTGCCAGTGGCTCAAGCCTCTAATCCTACCACTTGGGAG GCCAAGGCTGGAGGATCCCTTGATGCCAAGAGTCGGAGGCCAGCCTAGGTAACACAGCAGGACCTCGTCTCAAAAAG ATTAAAAAATTAACTGGGCATGGTAGCCTCCAAATTGGGGGTTAGCCTGGGAGGTTTGCCCAGGAAGGAATTCAAGG GCAAGCTGGTGGTGTTACACAGCAACTCTGATTGATATCGAAGCCACAGCAGACAGCAGGAGCAGAACACTGCTCCT TACAGAGCAGGGGTACCCCATAGGCTGTGTGCACAGGAGAGCAACTCAGAGGCACTGCTGCACTCATCTTTATACCC ACTTTTCATTATATGCAAATTAAGGGAAAGTTATGCACAAATTTCTAGGATGAGTGTGGTAACTTCTGGGTGGTCCA GTCACTGCCATGGAAAGGGATGGTAAACTCCCATGGCACACTGGTGGGTGTGTCTTATGGAAAGCTGCTTCTGCCCT ACTTGTTTTAGCTGGTCCTCAGTTTGGTCCGGTGTCCGAGCCCAACATCCGGAGTACATGCAGAGTCCCACCTCCTA CGTCACACCTGCAGTTCCAGCTACTCAGGAGGCTGAGGCTGGAGGATTGCTGGAGCCCAGATGTTGAAGGCTACAGT GAGCTATGATTGTGCCACCGCACTTCAGCCTGAGCAACACAGCAATACTCTCTCTCTAAAAAAGCAAAGCACACAAA CAAAAAGAGTGACTGGGTGCAGTGGCTCACACTTGGAATCTTAGCACTTTGGGAGGCCAAGGTGGGATGGTCACTTG AGCCTGGGAGTTCAAGACCAGCCTAGGCAACATAGCAAGACTTTATCTCTACTAAAATATATATATATTTTTTAATT AGCTGGACATGGTGGTGCACCTGCAGTCCCAGCTACTTGGGAGGCTGAGTTGGGGGTGGAGGGGAGTATCACTTGAG CCCAGAAGTTCCAGGCTGTAGTAAGCTATGATTGCACCACTGCACTCCAGCCTGGGCAACAGAGAGAGACCTTATCT ATATTTAAAAAAAAAAAAAAAAAGAGAGAGAAAATTGAAAACTCCTAATTGAAAACCCCCAAATTGAAAACTAACTT AAATAAATGAGCCAATGTAAGAATGTGGTGATATAATAATCAGAAAAAAGGATTGTTCCAGGTGACCTCTGAACACA GAACCTCGGCTATGACCGAAAGAACTCCAAAGACACTCTAACACTCCGTGGTTTATTGTTCCTCATAACATATATAA AATAATTTCATAAGCTTTTATTTTGAAACATATTCAGATTATGAAGAAATAAAAACACCCTGCAAGAATAAGACAAA GATGGAGAAGGAAGGATGACTGCTGGTGGGTTTGGGGCTTTTGGAGGGTGATGGAAACCTTCTAAAATTGATTATGG TGATGGTCGCACAATTATGTGAACACATTAAAAATTATTGAAATGGGCCGGGGGTGGTGGCTCACCCCTGTAATCCC AGCACTTTGGGAGGCCAACGCGGGCAGATTACCTGAGCTCAGGAGTTCCAGACTAACCTGGCCAACATGGTGAAACC CCCGTCCCTACTAAAAATGCAAAAATTAGCCACGCATGGTGGCACATGCCTGTAATCCCAGCTACTGGGGAGGCTGA GGCAGGAGAATTGCTTGAACCCAGGAGACAGAGGTTGCAGTGAGCCGAGATTGTGCCACTGAACTCCAGCTTGGCCG ACAGAGTGAGACTCTGTCTCAAAAAAAAAAAAAATTATTGAAATGTACACATTAAGTGGGTGAATTTTATCTCAATA AAACTGTTAAATAAAATAACAAGAATATGAAAAACTCTTGAATACTACTCATCCAGACTCTCCAGCTGTTAACATTC TACCACATCGGCTTGCTCTCTCTTGCCCCCACTTGCTCTTTCTCTCGGAGCCCTTGGAGAGGGGTATGCAAATATCC GTACTCTAAATATCCTCCATATACTGTGTATTTCCTAAAATCAACAAGGACATTAGGCTGCACAGCCAGAGAACAAC CATCAAAATCAGGTTAATATTGATCCAAATCCATCTATCAACAGAAGCAACATCAAGTTCAAGACCCTTTTGAAAGC AATGATACCAGCCATTTACTCCATCCCTAAAGGACTGAGGGTGCTGCGAATTTAACCGTATCAATGCAGTCTTTTTG ATGTTATTTACTGAAGGAAATGGATGTTCTTTAAAATATGTATTTATTTATTTTTCTTTTTTGAGACGGAATCTTGT TCTGTCGCCCAGGCTGGAGGGCAGTGGGACAATCTTGGTTCACTGCAACCTCTGCCTCCTGGGTTCAAGAGGTTCTC CTGCCTCAGCCTCCCGAGTAGCTGGGATTACAGGCGCGAACCACCACGCCCGGTTAATTTTGGTATTTTTAGTAGAG GCGGGGTTTTACCATGTTGGCCAGGCTGGTCTCAAACTCCTGACATGGTAGCCTGTAATCCCAGCTACTCGGGAGGC TGAGGCAGGAGAATCGCTTGAACCCAGGAGGTGGGGTTGCAGTGAGCCAAGATCGTGCCATTGCACTCCAGCCTGGG AGACAGAGCGAGACTCCATCAAAAAAAAAAAAAAAAAAAATTCCTGAAGCTCCTCTTGAGCTTACATTCTAGTGGAC TGTAAACAGAAACATTTTTTTTTCCTGTGGATAAAGAAAAGCAGGGCAAGTAGGGGCTTAGACAGAGGAGGGGAGGA TTCAGATTTTAAATGGGTTGGCCACTGTAGGTCTATTAACGTGGTGACATTTGAGGGAGTGGCAATACTAGGGAAGG GGCTTCAGGGGAGTGGCCAGGAGCTAGGGATAGAGGGAGGGAGGACAGGAGGCCTTGTCTGTCTTTTCCTCCATATG TAAGTTTCAGGAGTGAGTGGGGGGTGTCGAGGGTGCTGTGCTCTCCGGCCTGAGCCTCAGGAAGGAAGGGCAGTAGT CAGGGATGCCAGGGAAGGACAGTGGAGTAGGCTTTGTGGGGAACTTCACGGTTCCATTGTTGAGATGATTTGCTGGA GACACACAGATGAGGACATCAAATACATCCCTGGATCAGGCCCTGGGGCCTGAGTCCGGAAGAGAGGTCTGTATGGA CACACCCATCAATGGGAGCACCAGGACACAGATGGAGGCTAATGTCATGTTGTAGACAGGATGGGTGCTGAGCTGCC ACACCCACATTATTAGAAAATAACAGCACAGGCTTGGGGTGGAGGCGGGACACAAGACTAGCCAGAAGGAGAAAGAA AGGTGAAAAGCTGTTGGTGCAAGGAAGCTCTTGGTATTTCCAATGGCTTGGGCACAGGCTGTGAGGGTGCCTGGGAC GGCTTGTGGGGCACAGGCTGCAAGAGGTGCCCAGGACGGCTTGTGGGGCACAGGTTGTGAGAGGTGCCCTGGACGGC TTGTGGGGCACAGGCTGTGAGAGGTGCCCAGGACGGCTTGTGGGGCACAGGCTGTGAGGGTGCCCGGGACGGCTTGT GGGGCACAGGTTGTGAGAGGTGCCCGGGACGGCTTGTGGGGCACAGGTTTCAGAGGTGCCCGGGACGGCTTGTGGGG CACAGGTTGTGAGAGGTGCCCGGGACGGCTTGTGGGACACAGGTTGTGAGAGGTGCCTGGGACGGCTTGTGGGGCAC AGGCTGTGAGGGTGCCTGGGACGGCTTGTGGGGCACAGGTTGTGAGAGGTGCCCGGGTCGGCTTGTGGGGCACAGGT TGTGAGAGGTGCCCGGGACGGCTTGTGGGGCACAGGTTGTGAGACGTGCCCGGGACGGCTTGTGGGGCACAGGCTGT GAGGGTGCCCGGGTCGGCTTGTGGGGCACAGGCTGCAAGAGGTGCCCGGGACGGCTTGTGGGGCACAGGCTGTGAGG GTGCCCGGGACGGCTTGTGGGGCACAGGCTGTGAGGGTGCCCGGGACAGCTCGTGGGGCACAGGTTGTGAGAGGTGC CCGGGACGGCTTGTGGGGCACAGGCTGTGAGGGTGCCTGGGACGGCTTGTGGGGCACAGGTTGTGAGAGGTGCCCGG GACGGCTTGTGGGGCACAGGTTGTGAGGATGCCCGGGATGGCTTGTGGGGCACAGGTTGTGAGAGGTGCCTGGGACG GCTTGTGGGGCACAGGCTGTGAGGGTGCCCGGGACGGCTTGTGGGGCACAGGCTGTGAGAGGTGCCTGGGACGGCTT GTGGGGCACAGGCTGTGAGGATGCCCGGGACGGCTTGTGGGGCACAGGTTGTGAGGGGTGCCCAGGACGGCTTGTGG GGCACAGGCTGCAAGAGGTGCCCAGGACGGCTTGTGGGGCACAGGTTGTGAGAGGTGCCCGGGACGGCTTGTGGGGC ACAGGCTGTGAGGGAGCCCGGCACGGCTTGCAGCTACAGGGAGAAAAGACTTGGTGCTGTGGGCCTGCCTTGGGGCT GGTGGTACAGCCCTTATCTGCTGCCCTCAGGATCTCCCGGCCCCTCTCGTCCAGGCCCCTGCAACCCCATGCCCCAG CCTCTGAGGACCAAAGGCGCCCCTGCTTGGGAAGAGGGGGCTCAGGGGAGTCGCCTGACCCGGTTCCAAGCCAGGCT GATTTACCGTTGCTAACATCCTATCGCACGCATCCCTCTGCCTCATGCACCCAACCCCAAGGCCTGGTACACTGCAG GCCCCAAGGTCCTGTGCGTCCTTTCAATACCCTCCTCACCTGCCTCACCTGCCCCCCCTACCCTGACTCTGGCTGGA GACCCCCTCCAGGGAGTTTTCAAAACAAAGGGTGTCAGTCTCCTGTGGGATTCCCTCACCTCTGCAGCCTGCGGTCT GAAAGCTGCCCCATGGTGTGTAGTGCTAAACTTCCAACTTACTCCAGGCCAGCGGTGACAGCCCGAGGGCAGGAAGG GCACCCACACTGAGCCTCAAACAGCTAATTTTGCAACTGTAAGTCCATATAATTGTCTTGAAAAGTAATTTGTTTCA AAAAGCTAAAAAACGAATACTCTTGAGTCTCCTTCTAGTAATTCCCCTTCTAGAGGTCTATCACCAGGAAAAGATCC AAAGCACTGATATTCTTCATGGAGTTGTTTATAATAGAAAAAAACTAGAGCTTGTTCACAAAGGGGAGCTCTGCAGG CTGAAGATGTTGCACCTGTCAGCGGGGATGGGGGCACGCTTGCTGACGCAGCAACGGAAAAGCATCAGTGTGTGAAG ATGCATTTTCTCTCTTTCTATTATTATTATTTTTATTTTTATTTTTTCTGAGGCAGAACCTCGCTCTGTCACCCAGG CTGGAGTGCAGTGATGCGACCTCATCACAACCACGAGCCACCATGTGCGGCCCCATGAGCAAGCCACCACGCCCAGC CTTTTTTTCCCTTGTTTTAAAAAATCCTCTATTTAAAAAAGATGTGCATGGGCCGGGCACGGTGGTTCACGCTCATA ATCCCAGCTCTTTCAGAGGCCGAGGCAGGCAGATCACCTGAGGTCAAGAGTTCGACACCAGCCTGGCCAACATGGTG AAATTCCATCTGTACTAAAAATACAAAAATTAGCCAGGCCGTGGTGGTGTGTGCCTGTAATCCCAGCTACTCAGGAG ACTGAAGCAGGAGAATCACTTGAACCCAGGAGGCAGAGGTTGCAGTGGGTCAAAATCATGCCACCACACTCCAGTCT GGGAGACAGAGCAAGACTCCATCTCAGAAACAAACTAACAAACAAAATTTTTATATCTACCTATAATTCGTATAAAT TTAAAATACATGCATAAAATCATACCCTTTGCAAGCACACGTACTAACTAAAAGGAATATATTCAGCACATAGAAAT GGTTGTCTAACGGAGGAGGGGGGAGTTAATAAACAGAGAGGATAAAAAGAAATAAATCAGTAGAGCTGGAGGAGGGT CTCCTCCAGGCTGCGATGAGAACATAGTGAGCAGAATTGCAGGCCTGCATGACCTCACCTTCTGTGAGGAGTCCGGC CTCCCAAGACGCTTTCCTGCCTAGGTGCCCGGCTCAGAGTGTCCCCTACAAGGCTACTGGAGGAGAACCCCAGACCG AGCCTCATTCAGGTGAGGGGGCTGCACACCGGAGGTGGGAGAGGTCTGTCCCTTCCCACCCTGTGACACTGGGTCCC ACTTTCTCTCTAGGGGGTCTCGGTTTCCTCATTTGCAAACTGGAGCTCATAAGGTGGGCCAGAGAAGTTTCAGTGAA GTGAGGAATGGATCGTCCCTCTGCCAGGGCCCATGTGCTCTAGGTCACCCTGTCATCACAGGGACAGGGAGGTCAAG GACAGTCACTCCTGAGGCCAGTCCGGGCTGGGCTGACCACGTGGACTCTCATGCCCAGATTGGGGCCCCAATCTCCC TGAAGCTGGGGCTCCAGCTGTGACTCAGGGGTGGGCAGAAGGGGAGACAGAAGCGATAGGTTCCTCAGCCCCCAGTC CCACCTGAGGGCCCCTTTGTCACTGGATCTGATAAGAAACACCACCCCTGCAGCCCCCTCCCCTCACCTGACCAATG GCCACAGCCTGGCTGGGCCCAGCTCCCTGTATATAAGGGGACCCTGGGGGCTGAGCACTACCAAGGCCAGTCCTGAG CAGGCCCAACTCCAGTGCAGCCGCCCACCCTGCCGCCATGTCTCTGACCAAGACTTAGGGGACCATCATTGTGTCCA TGTGGGCCAAGATCTCCACGCAGGCCGACACCATCGGCACCGAGACTCTGGAGAGGTGAGTGTCAGATGGGACTGCC AGAGGGACTGGGTGGGAGGCCAGGTATGTGAGTGGGGACAGTGGGGAGCGGGCAGTGGGGAGGGGACCGTGGGGAGG GGACAGTGAGTAGGAGACAGTGGGGAGAGGACAGTGGAGAGGGGACAGTGAGGAGGGGACCATGGGAAGGGGACCGT GGAGTGGGGACAGTGAGGAGGGGACCATAGGGAGGGGACAGTGGGGAGGGGACAGTGAGGAGGGGACCGTGGGGAGG GGACAGTGAGGAGGGGACCGTGGGGAGGAGACAGTGAGGAGGGGACCGTAGGGAGGGGACAGTGAGGAGGGGACCGT GGGGAGGGGACAGTGAGGAGGGGACCGTGGGGAGGGGACAGTGAGGAGGGGACCGTGGGAAGGAGACAGTGAGGAGG GGACCTTGGGGAGGGGACAGTGAGGAGGGGACCATGGGGAGGGGACAGTGAGGAGGGGACAATGGAGAGGGGACAGT GAGGAGGGGACTGTGGGGAGAGGACAGTGAGGAGGGGACCATGGGGAGGGCACAGTGGGGAGGGGAGAGTGAGGAAG GGACAGTGAGGAGGGGACTGTGGGGAGGGGACAGTGGAGACAGATAGCCTTCCCTCTCAGTGAGGAGGGCAGGGTAA GGAGGGAACGATTAGGAGTTGCACAACCATCTGGGCTCGCTGAGACCTGGGCAGGCACAGGCCCAGGTTCTGACAAG CAGAGGGTGAAAGGTTTCGTTCTAGGCCTGAAGGGCCTTACAGGGCAGCCAGGGCACTACAGCCTCTAAAGTCCCAG CATCTGGGATCAGGGCACTGTCCCAGCTTCAAATTCCCAGCATCTGATCCCCTGGGAGGGGCCAGGGAGCTTTTCCT TCCCTGGAACGCTGCTGGGAGGTCATGAGCCTGCAGAAGGGGTGGCGGGCAACCCAGTCTGGGGCTGGGAGGGAGGT CCTGTGGCCAGAGGAGACGGTGGAGGGGCTGGGGGCACCAGGCGTGCTGGAGGCGGAGGGCGGGAGATTTGGGGACC AGGCTGCACAGAACCCGTCGGAAGCAGGGCGATCAGCCGGGAGCTGCAGAGGCCTGGGGGGCCTCTAGCCCAGGGCA GCCTGGGAGGGGCAGCTGCCTGGGCACCCGGGCCCCGCGAGGAGGGGCTGGGGCCTGCTGCGGGGTCGCAGATGTGT CCCGGTGCTCGGAGAGGGCCGCAGGGCGCGTGGGCCGTGGCGGGAGGCCGCGCTGCTGGGAGCTCACGGCCCCCGCC CCCCGTCCCAGGCTCTTCCTCAGCCACCCGCAGACCAAGACCTACTTCCCGCACTTCGACCTGCACCCGGGGTCCGC GCAGTTGCGCGCGCACGGCTCCAAGGTGGTGGCCGCCGTGGGCGACGCGGTGAAGAGCATCGACGACATCGGCGGCG CCCTGTCCAAGCTGAGCGAGCTGCACGCCTACATCCTGCGCGTGGACCCGGTCAACTTCAAGGTGCGCGGGGCGCGG TGCGGGCGGGGCGGGGGGGGGCCGCGGGGGGGGGGGGGCCGCGGGGGGGGGTCGCGGGGGGGGGGGGGTGGGGTCG CGGGGCGGGGGGGGGTCGCGGGGGGGGGCGGGGCGGGGGGGGGGGGCGGGGCGGCCGGGGCCCGGCGGGGCGGGGC GGGGCGGGGAGGGGCTGGGCGGGGCGGGGCGCGGGGGGGGGGGGGCCGGGCCGGGGGGGGTCGCGGGGCGGGGTCG CGGGGCGGGGCGCGGGGCGGGGGGGGGGGGGTGGGGTCGCGGGGGGGGCCCGGGCTAGGCCCCGCCCCCGCACTG AGCCGCCCCCGCCCCCAGCTCCTGTCCCACTGCCTGCTGGTCACCCTGGCCGCGCGCTTCCCCGCCGACTTCACGGC CGAGGCCCACGCCGCCTGGGCCAAGTTCCTATCGGTCGTATCCTCTGTCCTGACCGAGAAGTACCGCTGAGCGCCGC CTCCGGGACCCCCAGGACAGGCTGCGGCCCCTCCCCTGCCCTTCACCCTCCCACAGTTCCTGCCCTGACTCCAATAA ATGGATGAGGACGGAGCGATCTGGGCTCTGTGTTCTCAGTATTGGAGGGAAGGAGGGGAGAAGCTGAGTGATGGGTC CGGGGGCTTCGCAGGAACTCGGTCGTCCCCACTGTCGTCGCGGCCTGGGGTTCACTTGGGGGGCGCCTTGGGGAGGT TCTAGCCCCTGAGCACCGGAGCTGCGGCCCGGGTGGAGCGGAGCAGTCCCGGGCCGGCCCGCGGCGTCTCCTGGGGT CCTTGAGTCGGACGGGCGTTTGTGCGTCTCCCGGCTTCCCATATCGCACAAAGATTGTCACTTCACTAAGCGTATTG GAAGCGTGTCGGGGCTCAGGGAACTTTTCCACAAAGCCTGACGTCCGAATCCCGGGACTCTGGCAGCTACGGGGGTC CCTGAGGCCGGTCCCTCCCCGACTCCTAAGAGAGTAGGGGGTTTCCTGCCCGGTGTTCTCTCTCCGGTTCCTCCCAT GTGCTCCCTCCTGGCAGAGCAGTAACTTTACCCGAGGGGAGTAAACAGATGCCCCTAAAGTCTGCAGTAAAGGTGCC CACGCGCAACGGCGTGGGTCAATGCCAGAAACCCTGGGATCCCGGAGGTCGAGGCCTCCACACAGACGGGAACCCGG GCTGGTTACGTTCCCCGGCGCAGGCCGAGGGTCCCCGCGTTCCCGCCGCGCTCGGGCCGATAAGGACGGGGGGGGTG CCCGGAGGCTCTATAAGGAGGCCAGGGCGGCGGGCGCGGCCCCCAGAGCACGTCAGGCGGCGCCATGCTCAGCGCCC AGGAGCGCGCCCAAATCGCGCAGGTCTGGGACCTGATTGCGGGCCACGAGGCGCAATTCGGGGCGGAGCTGCTGCTC AGGTCGGTAGAGGCGGGGTCTCCGGGAGCTCAGGGAGGTGGAGATGAGGGTTTTGGGCGCGTGGGCCGCCAACGCCA TCCAAGGTCCTTCGGGTGCGGATCCCCGGGCTCTGGGCGGTGTGGGCGCTAGTGAAGCCCCACGCAGCCGCCCTCCT CCCCGGTCACTGACCTGGTCCTGCAGGCTCTTCACGGTGTACCCCAGCACCAAGGTCTACTTCCCGCACCTGAGCGC CTGCCAGGACGCGACGCAGCTGCTGAGCCACGGGCAGCGCATGCTGGCGGCTGTGGGCGCGGCGGTGCAGCACGTGG ACAACCTGCGCGCCGCGCTGAGCCCGCTGGCGGACCTGCACGCGCTCGTGCTGCGCGTGGACCCAGCCAACTTTCCG GTGAGGCCTTTCCGGCCGGGGCAATGGTGCAGCGCGCAGCCGGGGTGGGGGGGCTCTGGGGGTCCCTAGCGGGGCAG ACCCCGTCTCACCGGCCCCTTCTCCTGCAGCTGCTAATCCAGTGTTTCCACGTCGTGCTGGCCTCCCACCTGCAGGA CGAGTTCACCGTGCAAATGCAAGCGGCGTGGGACAAGTTCCTGACTGGTGTGGCCGTGGTGCTGACCGAAAAATACC GCTGAGCCCTGTGCTGCGCAGGCCTTGGTCTGTGCCTGTCAATAAACAGAGGCCCGAACCATCTGCCCCTGCCTGTG TGGTCTTTGGGGAGCTAGCAAAGCGAGGTCACTATTGTTGGCCAGTGAAGCTCAGGGACCTAAAAGGAGCCTCCTAG AACTCTCAAATGCGCCCCACCCCCGGAGGTTTGTCCTCCCATGGCGAGGAGTGCGATGGGGCAGAGGGAGCACTGTG ATGTGGCGGGGGTAGGGAGGGTGGCCTTCGACTTCAACCCTTGAATCGGGCTTCCAACCATACTGTTCGCAAAGCAC TTCCCCATTCACGCATTTATTCATTCATTCTCCCTCCATCCCCACTTCCTGCTGGGACCTGTAGATGCTAATCCTGG CCCTTTTTGCAGAGAGATGCAGAAACTGAGGTCCCAGAGCCAAATGTGCAACCTAATTCGTTGGCCCAGAGCAGAGG GCTCCGCAGACCTGTTCCTTTCCCCTTCCTTCCCCCATGGACACTTCCTCAGTGGCAAACCTGCGCTAGCCTGGTTA GCCCTCCCTGTGACCCTGCAGCCCTGGGGATGAGGTCGGGAGGAAGTCCTCAGTGGCCACAATTTGGCAGACAGAGC AGGTTTAGTCTTCCAGCCTGCTCAATGACAAGCTGTGCGACCCTGGGCGTGTCCCAGAGCTCTCAGGCCTTTACCTA TCGAATAGAAAAACAACGTCCAACTCACGAGATTTTTGAAATAATTTTTGAAATCATAACACAGGGTGGGTGCCTGC AGGGTCGTTGCCACCCCACCCCTCCACCCAGCCCCAGCTGCCGTGTCTCAATCTCTGCAGGTGCCCAGGCCAAGGCA CTCCCTTCCCCAGGTTCCCTCTTCTCCCTCCCCAGGACTGGGAAGGGAATCTTAGGGCTCCACCCCAGGCTTTTCAG ACAAAGAATAGGGGCTGAGGAAAGAGTGGGACCTTGGAGGTCTCCAAACCCTGAATAGGGTTGGCTCTGGGTTGGCC ATCCTGGGTCTGTGTGGGGAGCACTGGACCAGGCCTGGCACCCAGGTCTGACCTGGCAGTCAGCAACGAGGTCTGAA GAGAGCTGCTGGAAGTGGAGCCCTGACTGTGAGTCGGCCAAACTCCCCCCAGCAGTCAGTGCCAGTGACCTGTTGCC CTGCACTGCCTGGGACCCCAGCCCGGTAGTTTGGAGAACTTGGCCCCACGTTATCTACATCCCCCAACTGTTTTTTT GTTTTTGGGGGTTTTTTTTTTTTTTGCTTTGTTTTTGTTTTTGAGATAGGCCCTTGCTCTGACACCCCGGCTGGAGT GCAGTGGCACAGTTTTGGCTCACTGCAGCCTCAACCTCCTGGGTTCAAGCGATTCTCCTGCCTCTGTCTCCCGTGTA GCTGGGATTACAGGCATGGGCCGCCATTCCTGGCTAATTTTTGTATTTTTAATAGAGACACAGTTTCACCATGTTGA TCAGGCTGGTCTCAAACTCCTGACCTCAAGTGATCTGCCCTCCTCGGTCTCCCAAAGTGCTGGGATGACAGGCGTGA GCCACCACACCCAGCCCCCGCAACTGTTTACATGGATAATTAACAGCTTTTTGTCCCAGGCAGAGTTTGGTGTGAAA GCAGCTTATGTTTCACTTTGGAAAAACTGTGCTCTTCTCCCCATCCAGGAAGCTGCCTGGGTCTGGGCCATATGTGG ATACCTTATGGGTATAAGCTGCTCAGGACCCTGTGTGGAAGCTCAGGACAATGCCAGCGGGAAGGCTACCATGTGGA GAGCTGGTCTCTGTTTGGGCAGGACTAAGAGACGCAGGGCAGCCTTGGGCAACCTGTCTACTCTCACTCACTCCTCC TCCCCTTTCCTGTGCCAGGCACCTCCTGGCAACTTGCCAGCCAATGACCCTGCATCCCAGGCATAAGAGCTCCTACT CTCCCCCACCTTTCACTTTTGAGCTTACACAGACTCAGAAATAAGCTGCCGTGGTGCTGTCTCCTGAGGACAAGGCT AACACCAAGGCGGTCTGGGAGAAAGTTGGCAACCACACTGCTGGCTATGCCACGGAGGCCCTGGAGAGGCAAGAACC CTCCTCTCCCTGCTCACACCTTGGGTCCAACGCCCACTCCAGGGCTCCACTGGCCACCCCTAACTATTCTTACCCTG GACCCAGCCCCCAGCCCCTCACTCTTTGCTTCCCCCTGAAGCATGTTCCTGACCTTCCTCTCACTTGGCCCTGAGTT ATGGCTCAGCCCAGATCAAGAAACAATGCAAGTAGGTGGCCGACACGCTGACCAATGCCGTGGTCCACTTAGATGAC ATGCCCAATGATGTGTCTGAGCTGAGGAAGCTGCATGTCCACGAGCTGTGGGTGGACCCAGGCAACATCAGGGAGAG CTTTGGGCTGGGAGGAATCTAGGGTGTGGGGGCAGCTGGCCTTCCTCATAGGACAGACCCTCCCACGCGTTCAGGGA GGTGGAGCACAGGTGGCAGTAGTATCTGCATCCCCTGACTCTCTCTCCACAGTTCCTGGGTAAATGCCTGCTGGTGA CCTAGGCCTGCCACACCCTTCCCAGTTTACCCATGTGGTGCCTCCATGGACAAATTATTTGCTTTTGTGAGTGCTGT GTTGACCTAAAAACACCATTAAGCTAGAGCATTGGTGGTCATGCCCCCTGCCTGCTGGGCCTCCCACCAGGCCCTCC TCCCCTCCCTGCCCCAGCACTTCCTGATCTTTGAATGAAGTCCGAGTAGGCAGCAGCCTGTGTGTGCCTGGGTTCTC TCTGTCCCGGAATGTGCCAACAGTGGAGGTGTTTACCTGTCTCAGACCAAGGACCTCTCTGCAGCTGCATGGGGCTG GGGAGGGAGAACTGCAGGGAGTATGGGAGGGGAAGCTGAGGTGGGCCTGCTCAAGAGAAGGTGCTGAACCATCCCCT GTCCTGAGAGGTGCCAGGCCTGCAGGCAGTGGCTCAGAAGCTGGGGAGGAGAGAGGCATCCAGGGTTCTACTCAGGG AGTCCCAGCATCGCCACCCTCCTTTGAAATCTCCCTGGTTGAACCCAGTTAACATACGCTCTCCATCAAAACAAAAC GAAACAAAACAAACTAGCAAAATAGGCTGTCCCCAATGCAAGTGCAGGTGCCAGAACATTTCTCTCATTCTCACCCC TTCCTGCCAGAGGGTAGGTGGCTGGAGTGAGGGTGCTGGCCCTACTCACACTTCCTGTGTCATGGTGACCCTCTGAG AGCAGCCCAGTCAGTGGGGAAGGAGGAAGGGGCTGGGATGCTCACAGCCGGCAGCCCACACCTGGGGAGACTCTTCA GCAGAGCACCTTGCGGCCTTACTCCTGCACGTCTCCTGCAGTTTGTAAGGTGCATTCAGAACTCACTGTGTGCCCAG CCCTGAGCTCCCAGCTAATTGCCCCACCCAGGGCCTCTGGGACCTCCTGGTGCTTCTGCTTCCTGTGCTGCCAGCAA CTTCTGGAAACGTCCCTGTCCCCGGTGCTGAAGTCCTGGAATCCATGCTGGGAAGTTGCACAGCCCATCTGGCTCTC AGCCAGCCTAGGAACACGAGCAGCACTTCCAGCCCAGCCCCTGCCCCACAGCAAGCCTCCCCCTCCACACTCACAGT ACTGAATTGAGCTTTGGGTAGGGTGGAGAGGACCCTGTCACCGCTTTTCTTCTGGACATGGACCTCTCTGAATTGTT GGGGAGTTCCCTCCCCCTCTCCACCACCCACTCTTCCTGTGCCTCACAGCCCAGAGCATTGTTATTTCAACAGAAAC ACTTTAAAAAATAAACTAAAATCCGACAGGCACGGTGGCTCACACCTGTAATCCCAGTACTTTGGGAGGCTGAGGCG AGAGGATCACCTGAGGTCGGGAGTTTGAGACCAGCCTGACCAATATGGAGAAACCCCAGTTATACTAAAAATACAAA ATTAGCTGGGTGTGGTGGCGCATGCCTGTAATCCTAGCTACTAGGAAGGCTGAGGCAGGAGAATCGCTTGAACCCGG GAGGTGGAGGTTGAGGTGAGCTGAGATCACGCCATTGCACTCCAGCCTGGGCAACAAGAGCAAAACTCCGTCTCAAA AAATAAATAAATAAATAAATAAATAAACTAAAATCTATCCATGCTTTCACACACACACACACACACACACACACACA CCCTTTTTTGTGTTACTTAAAGTAGGAGAGTGTCTCTCTTTCCTGTCTCCTCACACCCACCCCCAGAAGAGACCAAA ATGAAGGGTTTGGAACTCAGCCCATGGGCCCCATCCCATGCTGAGGGAACACAGCTACATCTACAACTACTGCCACA GGCTCTCTTTTTGGACAAAAATACCATCATACTGTAGATACCTGTGTACAACTTCCTATTCTCAGTGAAGTGTCTCC CCTGCATCCCTTTCAGCCAGTTCATTCAGCTCTGCGCCATTCCACAGTCTCACTGATTATTACTATGTTTCCATCAT GATCCCCCCAAAAAATCATGACTTTATTTTTTTATTTTTATTATTATTATTTTTTTTTTTTTTTTTGTGACGGAGTC TCGCTCTGTCACCCAGGCTGGAGTGCAGTGGCACAATCTCGGCTCACTGCAAGCTCCACCTCGCAGGTTCACGCCAT TCTCCTCCCTCAGCCTCCCGAGTAGCTGAGTAGCTGGGACTACAGGCGCCCCCCACTACGCCTGGCTAATTTTTTCT ATTTTTAATAGAGACAGAGTTTCACTGCATTAGCGAGGATGGTCTCGATCTCCTGACCTCGCATCTGCCCGCCTCAG CCTCCCAATGTGCTGGGATTACAGGCGTGAGCCACCGCGCCCGGCCTTATGTATTTATTTTTTTGAGACAGAGTCTC GCTGTGTCGTCAGGCTAGAGTGCTGTGGCACGATCTCGGCTCACTGCAACCTCCAACTCCCTGGTTCAAAGGATTCT CCAGCCTCCACCTCCCGAGTAGCTGGGATTACAGGCGTGCACCACCACACCCAGCTAATTTTTGTATTTTTAGTAGA GACGGGGTTTCTCCATGTTGGTCAGCCTGGTCTCGAACTCCCGACCTCAGCTGATCCACCCGCCTTGGCCTCCCAAA GTGCTGGGATTACAGGCGTGAGCCACCGAGCCTGGCCAAACCATCACTTTTCATGAGCAGGGATGCACCCACTGGCA CTCCTGCACCTCCCACCCTCCCCCTCGCCAAGTCCACCCCTTCCTTCCTCACCCCACATCCCCTCACCTACATTCTG CAACCACAGGGGCCTTCTCTCCCCTGTCCTTTCCCTACCCAGAGCCAAGTTTGTTTATCTGTTTACAACCAGTATTT ACCTAGCAAGTCTTCCATCAGATAGCATTTGGAGAGCTGGGGGTGTCACAGTGAACCACGACCTCTAGGCCAGTGGG AGAGTCAGTCACACAAACTGTGAGTCCATGACTTGGGGCTTAGCCAGCACCCACCACCCCACGCGCCACCCCACAAC CCCGGGTAGAGGAGTCTGAATCTGGAGCCGCCCCCAGCCCAGCCCCGTGCTTTTTGCGTCCTGGTGTTTGTTCCTTC CCGGTGCCTGTCACTCAAGCACACTAGTGACTATCGCCAGAGGGAAAGGGAGCTGCAGGAAGCGAGGCTGGAGAGCA GGAGGGGCTCTGCGCAGAAATTCTTTTGAGTTCCTATGGGCCAGGGCGTCCGGGTGCGCGCATTCCTCTCCGCCCCA GGATTGGGCGAAGCCCTCCGGCTCGCACTCGCTCGCCCGTGTGTTCCCCGATCCCGCTGGAGTCGATGCGCGTCCAG CGCGTGCCAGGCCGGGGCGGGGGTGCGGGCTGACTTTCTCCCTCGCTAGGGACGCTCCGGCGCCCGAAAGGAAAGGG TGGCGCTGCGCTCCGGGGTGCACGAGCCGACAGCGCCCGACCCCAACGGGCCGGCCCCGCCAGCGCCGCTACCGCCC TGCCCCCGGGCGAGCGGGATGGGCGGGAGTGGAGTGGCGGGTGGAGGGTGGAGACGTCCTGGCCCCCGCCCCGCGTG CACCCCCAGGGGAGGCCGAGCCCGCCGCCCGGCCCCGCGCAGGCCCCGCCCGGGACTCCCCTGCGGTCCAGGCCGCG CCCCGGGCTCCGCGCCAGCCAATGAGCGCCGCCCGGCCGGGCGTGCCCCCGCGCCCCAAGCATAAACCCTGGCGCGC TCGCGGGCCGGCACTCTTCTGGTCCCCACAGACTCAGAGAGAACCCACCATGGTGCTGTCTCCTGCCGACAAGACCA ACGTCAAGGCCGCCTGGGGTAAGGTCGGCGCGCACGCTGGCGAGTATGGTGCGGAGGCCCTGGAGAGGTGAGGCTCC CTCCCCTGCTCCGACCCGGGCTCCTCGCCCGCCCGGACCCACAGGCCACCCTCAACCGTCCTGGCCCCGGACCCAAA CCCCACCCCTCACTCTGCTTCTCCCCGCAGGATGTTCCTGTCCTTCCCCACCACCAAGACCTACTTCCCGCACTTCG ACCTGAGCCACGGCTCTGCCCAGGTTAAGGGCCACGGCAAGAAGGTGGCCGACGCGCTGACCAACGCCGTGGCGCAC GTGGACGACATGCCCAACGCGCTGTCCGCCCTGAGCGACCTGCACGCGCACAAGCTTCGGGTGGACCCGGTCAACTT CAAGGTGAGCGGCGGGCCGGGAGCGATCTGGGTCGAGGGGCGAGATGGCGCCTTCCTCTCAGGGCAGAGGATCACGC GGGTTGCGGGAGGTGTAGCGCAGGCGGCGGCTGCGGGCCTGGGCCGCACTGACCCTCTTCTCTGCACAGCTCCTAAG CCACTGCCTGCTGGTGACCCTGGCCGCCCACCTCCCCGCCGAGTTCACCCCTGCGGTGCACGCCTCCCTGGACAAGT TCCTGGCTTCTGTGAGCACCGTGCTGACCTCCAAATACCGTTAAGCTGGAGCCTCGGTAGCCGTTCCTCCTGCCCGC TGGGCCTCCCAACGGGCCCTCCTCCCCTCCTTGCACCGGCCCTTCCTGGTCTTTGAATAAAGTCTGAGTGGGCAGCA GCCTGTGTGTGCCTGGGTTCTCTCTATCCCGGAATGTGCCAACAATGGAGGTGTTTACCTGTCTCAGACCAAGGACC TCTCTGCAGCTGCATGGGGCTGGGGAGGGAGAACTGCAGGGAGTATGGGAGGGGAAGCTGAGGTGGGCCTGCTCAAG AGAAGGTGCTGAACCATCCCCTGTCCTGAGAGGTGCCAGGCCTGCAGGCAGTGGCTCAGAAGCTGGGGAGGAGAGAG GCATCCAGGGTTCTACTCAGGGAGTCCCAGCATCGCCACCCTCCTTTGAAATCTCCCTGGTTGAACCCAGTTAACAT ACGCTCTCCATCAAAACAAAACGAAACAAAACAAACTAGCAAAATAGGCTGTCCCCAGTGCAAGTGCAGGTGCCAGA ACATTTCTCTCATTCCCACCCCTTCCTGCCAGAGGGTAGGTGGCTGGAGTGAGGGTGCTGGCCCTACTCACACTTCC TGTGTCACGGTGACCCTCTGAGAGCAGCCCAGTCAGTGGGGAAGGAGGAAGGGGCTGGGATGCTCACAGCCGGCAGC CCACACCTGGGGAGACTCTTCAGCAGAGCACCTTGCGGCCTTACTCCTGCACGTCTCCTGCAGTTTGTAAGGTGCAT TCAGAACTCACTGTGTGCCCAGCCCTGAGCTCCCAGCTAATTGCCCCACCCAGGGCCTCTGGGACCTCCTGGTCTTC TGCTTCCTGTGCTGCCAGCAACTTCTGGAAACGTCCCTGTCCCCGGTGCTGAAGTCCTGGAATCCATGCTGGGAAGT TGCACAGCCCATCTGGCTCTCAGCCAGCCTAGGAACATGAGCAGCACTTCCAACCCAGTCCCTGCCCCACAGCAAGC CTCCCCCTCCACACTCACAGTACTGGATTGAGCTTTGGGGAGGGTGGAGAGGACCCTGTCACTGCTTTCCTTCTGGA CATGGACCTCTCTGAATTGTTGGGGAGTTCCCTCCCCTCTCCACCACCCGCTCTTCCTGCGCCTCACAGCCCAGAGC ATTGTTATTTCAGCAGAAACACTTTAAAAAATAAACTAAAATCCGACAGGCACGGTGGCTCACGCCTGTAATCCCAG CACTTTGGGAGGCCGAGGTGGGAGGATCACCTGAGGTCGGGAGTTTGAGACCACCCTGATCAACATGTAGAAACCCC ATCTATACTAAAAATACAAAATCAGCCGGGCATGGTGGCCCATGCCTGTAAACCCACCTACTCCGGAGGCTGAGGCA GGAGAATCATTTTAACCAAGGAGGCAGAGGTTGCAGTGAGCTAAGATCACACCATTGCACTCCAGCCTGGAAAACAA CAGCGAAACTCCGCCTCAAAAAAAAAAAAGCCCCCACATCTTATCTTTTTTTTTTCCTTCAGGCTGTGGGCAGAGTC AGAAGAGGGTGGCAGACAGGGAGGGGAAATGAGAAGATCCAACGGGGGAAGCATTGCTAAGCTGGTCGGAGCTACTT CCTTCTCTGCCCAAGGCAGCTTACCCTGGCTTGCTCCTGGACACCCAGGGCAGGGCCTGAGTAAGGGCCTGGGGAGA CAGGGCAGGGAGCAGGCTGAAGGGTGCTGACCTGATGCACTCCTCAAAGCAAGATCTTCTGCCAGACCCCCAGGAAA TGACTTATCAGTGATTTCTCAGGCTGTTTTCTCCTCAGTACCATCCCCCCAAAAAACATCACTTTTCATGCACAGGG ATGCACCCACTGGCACTCCTGCACCTCCCACCCTTCCCCAGAAGTCCACCCCTTCCTTCCTCACCCTGCAGGAGCTG GCCAGCCTCATCACCCCAACATCTCCCCACCTCCATTCTCCAACCACAGGGCCCTTGTCTCCTCTGTCCTTTCCCCT CCCCGAGCCAAGCCTCCTCCCTCCTCCACCTCCTCCACCTAATACATATCCTTAAGTCTCACCTCCTCCAGGAAGCC CTCAGACTAACCCTGGTCACCTTGAATGCCTCGTCCACACCTCCAGACTTCCTCAGGGCCTGTGATGAGGTCTGCAC CTCTGTGTGTACTTGTGTGATGGTTAGAGGACTGCCTACCTCCCAGAGGAGGTTGAATGCTCCAGCCGGTTCCAGCT ATTGCTTTGTTTACCTGTTTAACCAGTATTTACCTAGCAAGTCTTCCATCAGATAGCATTTGGAGAGCTGGGGGTGT CACAGTGAACCACGACCTCTAGGCCAGTGGGAGAGTCAGTCACACAAACTGTGAGTCCATGACTTGGGGCTTAGCCA GCACCCACCACCCCACGCGCCACCCCACAACCCCGGGTAGAGGAGTCTGAATCTGGAGCCGCCCCCAGCCCAGCCCC GTGCTTTTTGCGTCCTGGTGTTTATTCCTTCCCGGTGCCTGTCACTCAAGCACACTAGTGACTATCGCCAGAGGGAA AGGGAGCTGCAGGAAGCGAGGCTGGAGAGCAGGAGGGGCTCTGCGCAGAAATTCTTTTGAGTTCCTATGGGCCAGGG CGTCCGGGTGCGCGCATTCCTCTCCGCCCCAGGATTGGGCGAAGCCTCCCGGCTCGCACTCGCTCGCCCGTGTGTTC CCCGATCCCGCTGGAGTCGATGCGCGTCCAGCGCGTGCCAGGCCGGGGCGGGGGTGCGGGCTGACTTTCTCCCTCGC TAGGGACGCTCCGGCGCCCGAAAGGAAAGGGTGGCGCTGCGCTCCGGGGTGCACGAGCCGACAGCGCCCGACCCCAA CGGGCCGGCCCCGCCAGCGCCGCTACCGCCCTGCCCCCGGGCGAGCGGGATGGGGGGAGTGGAGTGGCGGGTGGAG GGTGGAGACGTCCTGGCCCCCGCCCCGCGTGCACCCCCAGGGGAGGCCGAGCCCGCCGCCCGGCCCCGCGCAGGCCC CGCCCGGGACTCCCCTGCGGTCCAGGCCGCGCCCCGGGCTCCGCGCCAGCCAATGAGCGCCGCCCGGCCGGGCGTGC CCCCGCGCCCCAAGCATAAACCCTGGCGCGCTCGCGGCCCGGCACTCTTCTGGTCCCCACAGACTCAGAGAGAACCC ACCATGGTGCTGTCTCCTGCCGACAAGACCAACGTCAAGGCCGCCTGGGGTAAGGTCGGCGCGCACGCTGGCGAGTA TGGTGCGGAGGCCCTGGAGAGGTGAGGCTCCCTCCCCTGCTCCGACCCGGGCTCCTCGCCCGCCCGGACCCACAGGC CACCCTCAACCGTCCTGGCCCCGGACCCAAACCCCACCCCTCACTCTGCTTCTCCCCGCAGGATGTTCCTGTCCTTC CCCACCACCAAGACCTACTTCCCGCACTTCGACCTGAGCCACGGCTCTGCCCAGGTTAAGGGCCACGGCAAGAAGGT GGCCGACGCGCTGACCAACGCCGTGGCGCACGTGGACGACATGCCCAACGCGCTGTCCGCCCTGAGCGACCTGCACG CGCACAAGCTTCGGGTGGACCCGGTCAACTTCAAGGTGAGCGGCGGGCCGGGAGCGATCTGGGTCGAGGGGCGAGAT GGCGCCTTCCTCGCAGGGCAGAGGATCACGCGGGTTGCGGGAGGTGTAGCGCAGGCGGCGGCTGCGGGCCTGGGCCC TCGGCCCCACTGACCCTCTTCTCTGCACAGCTCCTAAGCCACTGCCTGCTGGTGACCCTGGCCGCCCACCTCCCCGC CGAGTTCACCCCTGCGGTGCACGCCTCCCTGGACAAGTTCCTGGCTTCTGTGAGCACCGTGCTGACCTCCAAATACC GTTAAGCTGGAGCCTCGGTGGCCATGCTTCTTGCCCCTTGGGCCTCCCCCCAGCCCCTCCTCCCCTTCCTGCACCCG TACCCCCGTGGTCTTTGAATAAAGTCTGAGTGGGCGGCAGCCTGTGTGTGCCTGAGTTTTTTCCCTCAGCAAACGTG CCAGGCATGGGCGTGGACAGCAGCTGGGACACACATGGCTAGAACCTCTCTGCAGCTGGATAGGGTAGGAAAAGGCA GGGGCGGGAGGAGGGGATGGAGGAGGGAAAGTGGAGCCACCGCGAAGTCCAGCTGGAAAAACGCTGGACCCTAGAGT GCTTTGAGGATGCATTTGCTCTTTCCCGAGTTTTATTCCCAGACTTTTCAGATTCAATGCAGGTTTGCTGAAATAAT GAATTTATCCATCTTTACGTTTCTGGGCACTCTTGTGCCAAGAACTGGCTGGCTTTCTGCCTGGGACGTCACTGGTT TCCCAGAGGTCCTCCCACATATGGGTGGTGGGTAGGTCAGAGAAGTCCCACTCCAGCATGGCTGCATTGATCCCCCA TCGTTCCCACTAGTCTCCGTAAAACCTCCCAGATACAGGCACAGTCTAGATGAAATCAGGGGTGCGGGGTGCAACTG CAGGCCCCAGGCAATTCAATAGGGGCTCTACTTTCACCCCCAGGTCACCCCAGAATGCTCACACACCAGACACTGAC GCCCTGGGGCTGTCAAGATCAGGCGTTTGTCTCTGGGCCCAGCTCAGGGCCCAGCTCAGCACCCACTCAGCTCCCCT GAGGCTGGGGAGCCTGTCCCATTGCGACTGGAGAGGAGAGCGGGGCCACAGAGGCCTGGCTAGAAGGTCCCTTCTCC CTGGTGTGTGTTTTCTCTCTGCTGAGCAGGCTTGCAGTGCCTGGGGTATCAGAGGGAGGGTTCCCGGAGCTGGTAGC CATAAAGCCCTGGCCCTCAACTGATAGGAATATCTTTTATTCCCTGAGCCCATGAATCACCCTTGGTAAACACCTAT GGCAGGCCCTCTGCCTGCGTTTGTGATGTCCTTCCCGCAGCCTGTGGGTACAGTATCAACTGTCAGGAAGACGGTGT CTTCGTTATTTCATCAGGAAGAATGGAGGTCTGACCTAAAGGTAGAAATATGTCAAATGTACAGCAGAGGGCTGGTT GGAGTGCAGCGCTTTTTACAATTAATTGATCAGAACCAGTTATAAATTTATCATTTCCTTCTCCACTCCTGCTGCTT CAGTTGACTAAGCCTAAGAAAAAATTATAAAAATTGGCCGGGCGCGGTGGCTCACACCTGTAATTGCAGCACTTTGC CAGGCTTAGGCAGGTGGATCACCTGAAGTCAGGGGTTCGAGACCAGCCTAGCCAACATAGTGAAACCCTGTCTCTAC TAAAAAGACAAAAATTGTCCAGGTGTGATGACTCATGCCTGTAAACCTGGCACTTTGGGAGGCGGAGGTTGTAGTGA GTCAAGATCGCGCCATCGCACTCCAGCTTGGGCAACAAGAGCGAAACTCTGTCTCAAAAAAAAATTTAATCTAATTT AATTTAATTTAAAAATTAGCACGGTGGTTGGGCACAGTGGCTCACGCCTGTAATCCCAGCACTTTGGGAAGCCAAGG TGGGCAGATCACAAGGTCAGGAATTCGAGACCAGCCTGGCCAATATGGGGAAACCCCATCTCTACTAAAAATACAAA AAATTAGCCGGGTGTGGTGGCGCACGCCTGTAATCCCAGCTACTCGGGAGGTTGAGGTAGGAGAATCACTTGAACCC AGGAGGCAGAGGTTGCAGTGACCCGAGATCACACCATTGCACTCTAGCCTGGGCAACAAGAGCAAAACTCCATCTCA AAAAAAATTATAAAAATTATACATCAGTAGATGAATGGGTAAACAAAATGTGGTGGTCTATACACACAATGGAATAT TATTTGGCCACAAAAAGAAATGAAGCACTGATAGGATGTAGCTGCACCCTGAAAATATTTGACAAGTAAAAGAAGCC GGACACCAAAGGTCACAAACTGCATGACCCCATCTATATGCAATATCCGCTACAGCCAAATCCATAGGGACCAAAAG CGGATTAGTGGCTGCCGGGGCCAGAGTTACTGTTAATGAGTACCGAGGTGGCGTTTGGGATGATGAAAAAGTTCTGA CCTAGATAGTGGTGATGGCTGCATAACACTAAGTGTTCTTAATATCACCAAATTTTATACCTGAAAAATGGCTACAA TGGTAATTTATGTCTATTTTATCACCTTTTTTAAAACAAAAAAGATATAAGGGGTACAGCAGAGTGAGTGCTGCATA TGCATTTACTATTATTCTTGGGTTACATCCCAGGTACTCAATAAATGTTCACTGCCCTGAAGAAACACCTGCTACGA GTCAGGCACCTCACAGTTGTTATCCGTTTAATTCTCACAATCTGAGAAGAAACTGTCACCCTCATTTTATATAATAA ATGAGAAAACAGACTCGGGCAAGTGTCACAATAGAATCAAGAGGCAGAATAAACTGACTTCCAATGCCAAATCCATG CCGAAATTCAGTGCTATAATAATGTACATGGCCGGGCGCGGTGGTTCACGCCTGTAATCCCAGAACTTTGGGAGGCT GAGGCGGGAGGATCACCTGAGGTCGGGAGTTTGAGATCAGCCTAACACGGTGAAACCCTGTCTCTACTAAAAATACA AAATTGGCATGGTGGCATGCACCTGTGATCCCAGTTACTCGGGAGGCTGAGGCAGGAGAATCGTTTGAACCCGGGAG GCGGAGGTTGCAGTGAGCCGGAATGGCGCCACTGCACTCACCGCACCCGGCCAATTTTTGTGTTTTTAGTAGAGACT AAATACCATATAGTGAACACCTAAGACGGGGGGCCTTGGATCCAGGGCGATTCAGAGGGCCCCGGTCGGAGCTGTCG GAGATTGAGCGCGCGCGGTCCCGGGATCTCCGACGAGGCCCTGGACCCCCGGGCGGCGAAGCTGCGGCGCGGCGCCC CCTGGAGGCCGCGGGACCCCTGGCCGGTCCGCGCAGGCGCAGCGGGGTCGCAGGGCGCGGCGGGTTCCAGCGCGGGG ATGGCGCTGTCCGCGGAGGACCGGGCGCTGGTGCGCGCCCTGTGGAAGAAGCTGGGCAGCAACGTCGGCGTCTACAC GACAGAGGCCCTGGAAAGGTGCGGCAGGCTGGGCGCCCCCGCCCCCAGGGGCCCTCCCTCCCCAAGCCCCCCGGACG CGCCTCACCCACGTTCCTCTCGCAGGACCTTCCTGGCTTTCCCCGCCACGAAGACCTACTTCTCCCACCTGGACCTG AGCCCCGGCTCCTCACAAGTCAGAGCCCACGGCCAGAAGGTGGCGGACGCGCTGAGCCTCGCCGTGGAGCGCCTGGA CGACCTACCCCACGCGCTGTCCGCGCTGAGCCACCTGCACGCGTGCCAGCTGCGAGTGGACCCGGCCAGCTTCCAGG TGAGCGGCTGCCGTGCTGGGCCCCTGTCCCCGGGAGGGCCCCGGCGGGGTGGGTGCGGGGGGCGTGCGGGGGGGGTG CAGGCGAGTGAGCCTTGAGCGCTCGCCGCAGCTCCTGGGCCACTGCCTGCTGGTAACCCTCGCCCGGCACTACCCCG GAGACTTCAGCCCCGCGCTGCAGGCGTCGCTGGACAAGTTCCTGAGCCACGTTATCTCGGCGCTGGTTTCCGAGTAC CGCTGAACTGTGGGTGGGTGGCCGCGGGATCCCCAGGCGACCTTCCCCGTGTTTGAGTAAAGCCTCTCCCAGGAGCA GCCTTCTTGCCGTGCTCTCTCGAGGTCAGGACGCGAGAGGAAGGCGCCGCCCCTCCCCAAGGAAAGGCGAGGGCCTG GGGCACACCCCCAGTGCCCAGATCCAGGCGCGCCTCTTTCCACCTCCAGCAGGTTTGGGGCCTCGGCCATGGGGGCA CCGAACTGCGTGCAGCCTGACCCTCCCGAATGGGGTGGTAGGTGAGGGCCGCGGGACGCCCCGGGCGGCGGGCTGCG AGGACGGCCGACTCTGCCCATCCCGAGGGCGGCTGGCTTCGCCCTCCCCACTCTGCGCCGAGCACGCGGCCCGGACC CACCGCGAGAACTCCGCACCTGCAGCGTGAACGCACGCGGGCGGCGTTAAGGGCCCGGGGCTGACTCGGAGCAGGTT AGGGAACAGCGCCCCCTCCCGGCGCGAGCCGGTACCTGCGCAGCACCCAGCCGCCGCGGCTGTGGCCTGGAATCGGG GACCTGGGGTGCCGGGGGGTTGTGGTGAAGGAGGTGGGACCAGCCCCAGCACCTAGCCACGTAGCTGGCGAGGTGGA CCAGGAACCGACCCAGACCCCTGCCGTCACCCGACATCACTACGGAGAGTGAAGCTTTTTTATATTTGTCCACATAA AACCAATCATGGTCATTGTAGAACTTCCGAAAACAAGGCTTGCTGCACCTTCCTGTGTATCCCAGGTCCAGGAATGG GTGCAGCACATCCTTCAGCTGCCGCTTGACACGCGGCAAACTGTGTCATGTGTAAACAAGAACAGGACATGGCTGTC ATATCCAAGAGCACATGTGTAACACAGACATGCCACACACACACACACACACACACGGGGTAGAGGCAGGCCTCATC CACACCCCTAACATTTGATGCGTAGCTGTTCCAGTCTTCTAGGCACATGTAGAGATGCTTTTCCTCAGAAATGGTAT TCTCAAGGTGACACTGAGGAAAAGTGGACAGGCCGGGCGCGGTGGCTCACGCCTGTAATCCCAGCACTCCGGGAGGC CGAGGCGGGCGGATC

[0593] GenBank Accession No. NM_000517 ACTCTTCTGGTCCCCACAGACTCAGAGAGAACCCACCATGGTGCTGTCTCCTGCCGACAAGACCAACGTCAAGGCCG CCTGGGGTAAGGTCGGCGCGCACGCTGGCGAGTATGGTGCGGAGGCCCTGGAGAGGATGTTCCTGTCCTTCCCCACC ACCAAGACCTACTTCCCGCACTTCGACCTGAGCCACGGCTCTGCCCAGGTTAAGGGCCACGGCAAGAAGGTGGCCGA CGCGCTGACCAACGCCGTGGCGCACGTGGACGACATGCCCAACGCGCTGTCCGCCCTGAGCGACCTGCACGCGCACA AGCTTCGGGTGGACCCGGTCAACTTCAAGCTCCTAAGCCACTGCCTGCTGGTGACCCTGGCCGCCCACCTCCCCGCC GAGTTCACCCCTGCGGTGCACGCCTCCCTGGACAAGTTCCTGGCTTCTGTGAGCACCGTGCTGACCTCCAAATACCG TTAAGCTGGAGCCTCGGTAGCCGTTCCTCCTGCCCGCTGGGCCTCCCAACGGGCCCTCCTCCCCTCCTTGCACCGGC CCTTCCTGGTCTTTGAATAAAGTCTGAGTGGGCAGCA

[0594] GenBank Accession No. J00179 GAATTCTAATCTCCCTCTCAACCCTACAGTCACCCATTTGGTATATTAAAGATGTGTTGTCTACTGTCTAGTATCCC TCAAGTAGTGTCAGGAATTAGTCATTTAAATAGTCTGCAAGCCAGGAGTGGTGGCTCATGTCTGTAATTCCAGCACT GGAGAGGTAGAAGTGGGAGGACTGCTTGAGCTCAAGAGTTTGATATTATCCTGGACAACATAGCAAGACCTCGTCTC TACTTAAAAAAAAAAAAATTAGCCAGGCATGTGATGTACACCTGTAGTCCCAGCTACTCAGGAGGCCGAAATGGGAG GATCCCTTGAGCTCAGGAGGTCAAGGCTGCAGTGAGACATGATCTTGCCACTGCACTCCAGCCTGGACAGCAGAGTG AAACCTTGCCTCACGAAACAGAATACAAAAACAAACAAACAAAAAACTGCTCCGCAATGCGCTTCCTTGATGCTCTA CCACATAGGTCTGGGTACTTTGTACACATTATCTCATTGCTGTTCGTAATTGTTAGATTAATTTTGTAATATTGATA TTATTCCTAGAAAGCTGAGGCCTCAAGATGATAACTTTTATTTTCTGGACTTGTAATAGCTTTCTCTTGTATTCACC ATGTTGTAACTTTCTTAGAGTAGTAACAATATAAAGTTATTGTGAGTTTTTGCAAACACAGCAAACACAACGACCCA TATAGACATTGATGTGAAATTGTCTATTGTCAATTTATGGGAAAACAAGTATGTACTTTTTCTACTAAGCCATTGAA ACAGGAATAACAGAACAAGATTGAAAGAATACATTTTCCGAAATTACTTGAGTATTATACAAAGACAAGCACGTGGA CCTGGGAGGAGGGTTATTGTCCATGACTGGTGTGTGGAGACAAATGCAGGTTTATAATAGATGGGATGGCATCTAGC GCAATGACTTTGCCATCACTTTTAGAGAGCTCTTGGGGACCCCAGTACACAAGAGGGGACGCAGGGTATATGTAGAC ATCTCATTCTTTTTCTTAGTGTGAGAATAAGAATAGCCATGACCTGAGTTTATAGACAATGAGCCCTTTTCTCTCTC CCACTCAGCAGCTATGAGATGGCTTGCCCTGCCTCTCTACTAGGCTGACTCACTCCAAGGCCCAGCAATGGGCAGGG CTCTGTCAGGGCTTTGATAGCACTATCTGCAGAGCCAGGGCCGAGAAGGGGTGGACTCCAGAGACTCTCCCTCCCAT TCCCGAGCAGGGTTTGCTTATTTATGCATTTAAATGATATATTTATTTTAAAAGAAATAACAGGAGACTGCCCAGCC CTGGCTGTGACATGGAAACTATGTAGAATATTTTGGGTTCCATTTTTTTTTCCTTCTTTCAGTTAGAGGAAAAGGGG CTCACTGCACATACACTAGACAGAAAGTCAGGAGCTTTGAATCCAAGCCTGATCATTTCCATGTCATACTGAGAAAG TCCCCACCCTTCTCTGAGCCTCAGTTTCTCTTTTTATAAGTAGGAGTCTGGAGTAAATGATTTCCAATGGCTCTCAT TTCAATACAAAATTTCCGTTTATTAAATGCATGAGCTTCTGTTACTCCAAGACTGAGAAGGAAATTGAACCTGAGAC TCATTGACTGGCAAGATGTCCCCAGAGGCTCTCATTCAGCAATAAAATTCTCACCTTCACCCAGGCCCACTGAGTGT CAGATTTGCATGCACTAGTTCACGTGTGTAAAAAGGAGGATGCTTCTTTCCTTTGTATTCTCACATACCTTTAGGAA AGAACTTAGCACCCTTCCCACACAGCCATCCCAATAACTCATTTCAGTGACTCAACCCTTGACTTTATAAAAGTCTT GGGCAGTATAGAGCAGAGATTAAGAGTACAGATGCTGGAGCCAGACCACCTGAGTGATTAGTGACTCAGTTTCTCTT AGTAATTGTATGACTCAGTTTCTTCATCTGTAAAATGGAGGGTTTTTTAATTAGTTTGTTTTTGAGAAAGGGTCTCA CTCTGTCACCCAAATGGGAGTGTAGTGGCAAAATCTCGGCTCACTGCAACTTGCACTTCCCAGGCTCAAGCGGTCCT CCCACCTCAACATCCTGAGTAGCTGGAACCACAGGTACACACCACCATACCTCGCTAATTTTTTGTATTTTTGGTAG AGATGGGGTTTCACATGTTACACAGGATGGTCTCAGACTCCGGAGCTCAAGCAATCTGCCCACCTCAGCCTTCCAAA GTGCTGGGATTATAAGCATGATTACAGGAGTTTTAACAGGCTCATAAGATTGTTCTGCAGCCCGAGTGAGTTAATAC ATGCAAAGAGTTTAAAGCAGTGACTTATAAATGCTAACTACTCTAGAAATGTTTGCTAGTATTTTTTGTTTAACTGC AATCATTCTTGCTGCAGGTGAAAACTAGTGTTCTGTACTTTATGCCCATTCATCTTTAACTGTAATAATAAAAATAA CTGACATTTATTGAAGGCTATCAGAGACTGTAATTAGTGCTTTGCATAATTAATCATATTTAATACTCTTGGATTCT TTCAGGTAGATACTATTATTATCCCCATTTTACTACAGTTAAAAAAACTACCTCTCAACTTGCTCAAGCATACACTC TCACACACACAAACATAAACTACTAGCAAATAGTAGAATTGAGATTTGGTCCTAATTATGTCTTTGCTCACTATCCA ATAAATATTTATTGACATGTACTTCTTGGCAGTCTGTATGCTGGATGCTGGGGATACAAAGATGTTTAAATTTAAGC TCCAGTCTCTGCTTCCAAAGGCCTCCCAGGCCAAGTTATCCATTCAGAAAGCATTTTTTACTCTTTGCATTCCACTG TTTTTCCTAAGTGACTAAAAAATTACACTTTATTCGTCTGTGTCCTGCTCTGGGATGATAGTCTGACTTTCCTAACC TGAGCCTAACATCCCTGACATCAGGAAAGACTACACCATGTGGAGAAGGGGTGGTGGTTTTGATTGCTGCTGTCTTC AGTTAGATGGTTAACTTTGTGAAGTTGAAAACTGTGGCTCTCTGGTTGACTGTTAGAGTTCTGGCACTTGTCACTAT GCCTATTATTTAACAAATGCATGAATGCTTCAGAATATGGGAATATTATCTTCTGGAATAGGGAATCAAGTTATATT ATGTAACCCAGGATTAGAAGATTCTTCTGTGTGTAAGAATTTCATAAACATTAAGCTGTCTAGCAAAAGCAAGGGCT TGGAAAATCTGTGAGCTCCTCACCATATAGAAAGCTTTTAACCCATCATTGAATAAATCCCTATAGGGGATTTCTAC CCTGAGCAAAAGGCTGGTCTTGATTAATTCCCAAACTCATATAGCTCTGAGAAAGTCTATGCTGTTAACGTTTTCTT GTCTGCTACCCCATCATATGCACAACAATAAATGCAGGCCTAGGCATGACTGAAGGCTCTCTCATAATTCTTGGTTG CATGAATCAGATTATCAACAGAAATGTTGAGACAAACTATGGGGAAGCAGGGTATGAAAGAGCTCTGAATGAAATGG AAACCGCAATGCTTCCTGCCCATTCAGGGCTCCAGCATGTAGAAATCTGGGGCTTTGTGAAGACTGGCTTAAAATCA GAAGCCCCATTGGATAAGAGTAGGGAAGAACCTAGAGCCTACGCTGAGCAGGTTTCCTTCATGTGACAGGGAGCCTC CTGCCCCGAACTTCCAGGGATCCTCTCTTAAGTGTTTCCTGCTGGAATCTCCTCACTTCTATCTGGAAATGGTTTCT CCACAGTCCAGCCCCTGGCTAGTTGAAAGAGTTACCCATGCAGAGGCCCTCCTAGCATCCAGAGACTAGTGCTTAGA TTCCTACTTTCAGCGTTGGACAACCTGGATCCACTTGCCCAGTGTTCTTCCTTAGTTCCTACCTTCGACCTTGATCC TCCTTTATCTTCCTGAACCCTGCTGAGATGATCTATGTGGGGAGAATGGCTTCTTTGAGAAACATCTTCTTCGTTAG TGGCCTGCCCCTCATTCCCACTTTAATATCCAGAATCACTATAAGAAGAATATAATAAGAGGAATAACTCTTATTAT AGGTAAGGGAAAATTAAGAGGCATACGTGATGGGATGAGTAAGAGAGGAGAGGGAAGGATTAATGGATGATAAAATC TACTACTATTTGTTGAGACCTTTTATAGTCTAATCAATTTTGCTATTGTTTTCCATCCTCACGCTAACTCCATAAAA AAACACTATTATTATCTTTATTTTGCCATGACAAGACTGAGCTCAGAAGAGTCAAGCATTTGCCTAAGGTCGGACAT GTCAGAGGCAGTGCCAGACCTATGTGAGACTCTGCAGCTACTGCTCATGGGCCCTGTGCTGCACTGATGAGGAGGAT CAGATGGATGGGGCAATGAAGCAAAGGAATCATTCTGTGGATAAAGGAGACAGCCATGAAGAAGTCTATGACTGTAA ATTTGGGAGCAGGAGTCTCTAAGGACTTGGATTTCAAGGAATTTTGACTCAGCAAACACAAGACCCTCACGGTGACT TTGCGAGCTGGTGTGCCAGATGTGTCTATCAGAGGTTCCAGGGAGGGTGGGGTGGGGTCAGGGCTGGCCACCAGCTA TCAGGGCCCAGATGGGTTATAGGCTGGCAGGCTCAGATAGGTGGTTAGGTCAGGTTGGTGGTGCTGGGTGGAGTCCA TGACTCCCAGGAGCCAGGAGAGATAGACCATGAGTAGAGGGCAGACATGGGAAAGGTGGGGGAGGCACAGCATAGCA GCATTTTTCATTCTACTACTACATGGGACTGCTCCCCTATACCCCCAGCTAGGGGCAAGTGCCTTGACTCCTATGTT TTCAGGATCATCATCTATAAAGTAAGAGTAATAATTGTGTCTATCTCATAGGGTTATTATGAGGATCAAAGGAGATG CACACTCTCTGGACCAGTGGCCTAACAGTTCAGGACAGAGCTATGGGCTTCCTATGTATGGGTCAGTGGTCTCAATG TAGCAGGCAAGTTCCAGAAGATAGCATCAACCACTGTTAGAGATATACTGCCAGTCTCAGAGCCTGATGTTAATTTA GCAATGGGCTGGGACCCTCCTCCAGTAGAACCTTCTAACCAGCTGCTGCAGTCAAAGTCGAATGCAGCTGGTTAGAC TTTTTTTAATGAAAGCTTAGCTTTCATTAAAGATTAAGCTCCTAAGCAGGGCACAGATGAAATTGTCTAACAGCAAC TTTGCCATCTAAAAAAATCTGACTTCACTGGAAACATGGAAGCCCAAGGTTCTGAACATGAGAAATTTTTAGGAATC TGCACAGGAGTTGAGAGGGAAACAAGATGGTGAAGGGACTAGAAACCACATGAGAGACACGAGGAAATAGTGTAGAT TTAGGCTGGAGGTAAATGAAAGAGAAGTGGGAATTAATACTTACTGAAATCTTTCTATATGTCAGGTGCCATTTTAT GATATTTAATAATCTCATTACATATGGTAATTCTGTGAGATATGTATTATTGAACATACTATAATTAATACTAATGA TAAGTAACACCTCTTGAGTACTTAGTATATGCTAGAATCAAATTTAAGTTTATCATATGAGGCCGGGCACGGTGGCT CATATATGGGATTACATGCCTGTAATCCCAGCACTTTGGGAGGCCAAGGCAATTGGATCACCTGAGGTCAGGAGTTC CAGACCAGCCTGGCCAACATGGTGAAACCCCTTCTCTACTAAAAAATACAAAAAATCAGCCAGGTGTGGTGGCACGC GTCTATAATCCCAGCTACTCAGGAGGCTGAGGCAGGAGAATCACTTGAACCCAGGAGGTGGAGGTTGCAGTGAGCTA AGATTGCACCACTGCACTCCAGCCTAGGCGACAGAGTGAGACTCCATCTCAAAAAAAAAAAAAGAAGTTTATTATAT GAATTAACTTAGTTTTACTCACACCAATACTCAGAAGTAGATTATTACCTCATTTATTGATGAGGAGCCCAATGTAC TTGTAGTGTAGATCAACTTATTGAAAGCACAAGCTAATAAGTAGACAATTAGTAATTAGAAGTCAGATGGTCTGAGC TCTCCTACTGTCTACATTACATGAGCTCTTATTAACTGGGGACTCGAAAATCAAAGACATGAAATAATTTGTCCAAG CTTACAGAACCACCAAGTAGTAAGGCTAGGATGTAGACCCAGTTCTGCTACCTCTGAAGACAGTGTTTTTTCCACAG CAAAACACAAACTCAGATATTGTGGATGCGAGAAATTAGAAGTAGATATTCCTGCCCTGTGGCCCTTGCTTCTTACT TTTACTTCTTGGCGATTGGAAGTTGTGGTCCAAGCCACAGTTGCAGACCATACTTCCTCAACCATAATTGCATTTCT TCAGGAAAGTTTGAGGGAGAAAAAGGTAAAGAAAAATTTAGAAACAACTTCAGAATAAAGAGATTTTCTCTTGGGTT ACAGAGATTGTCATATGACAAATTATAAGCAGACACTTGAGAAAACTGAAGGCCCATGCCTGCCCAAATTACCCTTT GACCCCTTGGTCAAGCTGCAACTTTGGTTAAAGGGAGTGTTTATGTGTTATAGTGTTCATTTACTCTTCTGGTCTAA CCCATTGGCTCCGTCTTCATCCTGCAGTGACCTCAGTGCCTCAGAAACATACATATGTTTGTCTAGTTTAAGTTTGT GTGAAATTCTAACTAGCGTCAAGAACTGAGGGCCCTAAACTATGCTAGGAATAGTGCTGTGGTGCTGTGATAGGTAC ACAAGAAATGAGAAGAAACTGCAGATTCTCTGCATCTCCCTTTGCCGGGTCTGACAACAAAGTTTCCCCAAATTTTA CCAATGCAAGCCATTTCTCCATATGCTAACTACTTTAAAATCATTTGGGGCTTCACATTGTCTTTCTCATCTGTAAA AAGAATGGAAGAACTCATTCCTACAGAACTCCCTATGTCTTCCCTGATGGGCTAGAGTTCCTCTTTCTCAAAAATTA GCCATTATTGTATTTCCTTCTAAGCCAAAGCTCAGAGGTCTTGTATTGCCCAGTGACATGCACACTGGTCAAAAGTA GGCTAAGTAGAAGGGTACTTTCACAGGAACAGAGAGCAAAAGAGGTGGGTGAATGAGAGGGTAAGTGAGAAAAGACA AATGAGAAGTTACAACATGATGGCTTGTTGTCTAAATATCTCCTAGGGAATTATTGTGAGAGGTCTGAATAGTGTTG TAAAATAAGCTGAATCTGCTGCCTAACATTAACAGTCAAGAAATACCTCCGAATAACTGTACCTCCAATTATTCTTT AAGGTAGCATGCAACTGTAATAGTTGCATGTATATATTTATCATAATACTGTAACAGAAAACACTTACTGAATATAT ACTGTGTCCCTAGTTCTTTACACAATAAACTAATCTCATCCTCATAATTCTATTAGCTAATACATATTATCATCCTA TATTTCAGAGACTTCAAGAAGTTAAGCAACTTGCTCAAGATCATCTAAGAAGTAGGTGGTATTTCTGGGCTCATTTG GCCCCTCCTAATCTCTCATGGCAACATGGCTGCCTAAAGTGTTGATTGCCTTAATTCATCAGGGATGGGCTCATACT CACTGCAGACCTTAACTGGCATCCTCTTTTCTTATGTGATCTGCCTGACCCTAGTAGAACTTATGAAATTTCTGATG AGAAAGGAGAGAGGAGAAAGGCAGAGCTGACTGTGATGAGTGATGAAGGTGCCTTCTCATCTGGGTACCAGTGGGGC CTCTAAGACTAAGTCACTCTGTCTCACTGTGTCTTAGCCAGTTCCTTACAGCTTGCCCTGATGGGAGATAGAGAATG GGTATCCTCCAACAAAAAAATAAATTTTCATTTCTCAAGGTCCAACTTATGTTTTCTTAATTTTTAAAAAAATCTTG ACCATTCTCCACTCTCTAAAATAATCCACAGTGAGAGAAACATTCTTTTCCCCCATCCCATAAATACCTCTATTAAA TATGGAAAATCTGGGCATGGTGTCTCACACCTGTAATCCCAGCACTTTGGGAGGCTGAGGTGGGTGGACTGCTTGGA GCTCAGGAGTTCAAGACCATCTTGGACAACATGGTGATACCCTGCCTCTACAAAAAGTACAAAAATTAGCCTGGCAT GGTGGTGTGCACCTGTAATCCCAGCTATTAGGGTGGCTGAGGCAGGAGAATTGCTTGAACCCGGGAGGCGGAGGTTG CAGTGAGCTGAGATCGTGCCACTGCACTCCAGCCTGGGGGACAGAGCACATTATAATTAACTGTTATTTTTTACTTG GACTCTTGTGGGGAATAAGATACATGTTTTATTCTTATTTATGATTCAAGCACTGAAAATAGTGTTTAGCATCCAGC AGGTGCTTCAAAACCATTTGCTGAATGATTACTATACTTTTTACAAGCTCAGCTCCCTCTATCCCTTCCAGCATCCT CATCTCTGATTAAATAAGCTTCAGTTTTTCCTTAGTTCCTGTTACATTTCTGTGTGTCTCCATTAGTGACCTCCCAT AGTCCAAGCATGAGCAGTTCTGGCCAGGCCCCTGTCGGGGTCAGTGCCCCACCCCCGCCTTCTGGTTCTGTGTAACC TTCTAAGCAAACCTTCTGGCTCAAGCACAGCAATGCTGAGTCATGATGAGTCATGCTGAGGCTTAGGGTGTGTGCCC AGATGTTCTCAGCCTAGAGTGATGACTCCTATCTGGGTCCCCAGCAGGATGCTTACAGGGCAGATGGCAAAAAAAAG GAGAAGCTGACCACCTGACTAAAACTCCACCTCAAACGGCATCATAAAGAAAATGGATGCCTGAGACAGAATGTGAC ATATTCTAGAATATATTATTTCCTGAATATATATATATATATATATACACATATACGTATATATATATATATATATA TATTTGTTGTTATCAATTGCCATAGAATGATTAGTTATTGTGAATCAAATATTTATCTTGCAGGTGGCCTCTATACC TAGAAGCGGCAGAATCAGGCTTTATTAATACATGTGTATAGATTTTTAGGATCTATACACATGTATTAATATGAAAC AAGGATATGGAAGAGGAAGGCATGAAAACAGGAAAAGAAAACAAACCTTGTTTGCCATTTTAAGGCACCCCTGGACA GCTAGGTGGCAAAAGGCCTGTGCTGTTAGAGGACACATGCTCACATACGGGGTCAGATCTGACTTGGGGTGCTACTG GGAAGCTCTCATCTTAAGGATACATCTCAGGCCAGTCTTGGTGCATTAGGAAGATGTAGGCAACTCTGATCCTGAGA GGAAAGAAACATTCCTCCAGGAGAGCTAAAAGGGTTCACCTGTGTGGGTAACTGTGAAGGACTACAAGAGGATGAAA AACAATGACAGACAGACATAATGCTTGTGGGAGAAAAAACAGGAGGTCAAGGGGATAGAGAAGGCTTCCAGAAGAAT GGCTTTGAAGCTGGCTTCTGTAGGAGTTCACAGTGGCAAAGATGTTTCAGAAATGTGACATGACTTAAGGAACTATA CAAAAAGGAACAAATTTAAGGAGAGGCAGATAAATTAGTTCAACAGACATGCAAGGAATTTTCAGATGAATGTTATG TCTCCACTGAGCTTCTTGAGGTTAGCAGCTGTGAGGGTTTTGCAGGCCCAGGACCCATTACAGGACCTCACGTATAC TTGACACTGTTTTTTGTATTCATTTGTGAATGAATGACCTCTTGTCAGTCTACTCGGTTTCGCTGTGAATGAATGAT GTCTTGTCAGCCTACTTGGTTTCGCTAAGAGCACAGAGAGAAGATTTAGTGATGCTATGTAAAAACTTCCTTTTTGG TTCAAGTGTATGTTTGTGATAGAAATGAAGACAGGCTACATGATGCATATCTAACATAAACACAAACATTAAGAAAG GAAATCAACCTGAAGAGTATTTATACAGATAACAAAATACAGAGAGTGAGTTAAATGTGTAATAACTGTGGCACAGG CTGGAATATGAGCCATTTAAATCACAAATTAATTAGAAAAAAAACAGTGGGGAAAAAATTCCATGGATGGGTCTAGA AAGACTAGCATTGTTTTAGGTTGAGTGGCAGTGTTTAAAGGGTGATATCAGACTAAACTTGAAATATGTGGCTAAAT AACTAGAATACTCTTTATTTTTTCGTATCATGAATAGCAGATATAGCTTGATGGCCCCATGCTTGGTTTAACATCCT TGCTGTTCCTGACATGAAATCCTTAATTTTTGACAAAGGGGCTATTCATTTTCATTTTATATTGGGCCTAGAAATTA TGTAGATGGTCCTGAGGAAAAGTTTATAGCTTGTCTATTTCTCTCTCTAACATAGTTGTCAGCACAATGCCTAGGCT ATAGGAAGTACTCAAAGCTTGTTAAATTGAATTCTATCCTTCTTATTCAATTCTACACATGGAGGAAAAACTCATCA GGGATGGAGGCACGCCTCTAAGGAAGGCAGGTGTGGCTCTGCAGTGTGATTGGGTACTTGCAGGACGAAGGGTGGGG TGGGAGTGGCTAACCTTCCATTCCTAGTGCAGAGGTCACAGCCTAAACATCAAATTCCTTGAGGTGCGGTGGCTCAC TCCTGTAATCACAGCAGTTTGGGACGCCAAGGTGGGCAGATCACTTGAGGTCAGGAGTTGGACACCAGCCCAGCCAA CATAGTGAAACCTGGTCTCTGCTTAAAAATATAAAAATTAGCTGGACGTGGTGACGGGAGCCTGTAATCCAACTACT TGGGAGGCTGAGGCAGGAGAATCGCTTGAACCGGGGAGGTGGAGTTTGCACTGAGCAGAGATCATGCCATTGCACTC CAGCCTCCAGAGCGAGACTCTGTCTAAAGAAAAACGAAAACAAACAAACAAACAAACAAACAAAACCCATCAAATTC CCTGACCGAACAGAATTCTGTCTGATTGTTCTCTGACTTATCTACCATTTTCCCTCCTTAAAGAAACTGTGGAACTT CCTTCAGCTAGAGGGGCCTGGCTCAGAAGCCTCTGGTCAGCATCCAAGAAATACTTGATGTCACTTTGGCTAAAGGT ATGATGTGTAGACAAGCTCCAGAGATGGTTTCTCATTTCCATATCCACCCACCCAGCTTTCCAATTTTAAAGCCAAT TCTGAGGTAGAGACTGTGATGAACAAACACCTTGACAAAATTCAACCCAAAGACTCACTTTGCCTAGCTTCAAAATC CTTACTCTGACATATACTCACAGCCAGAAATTAGCATGCACTAGAGTGTGCATGAGTGCAACACACACACACACCAA TTCCATATTCTCTGTCAGAAAATCCTGTTGGTTTTTCGTGAAAGGATGTTTTCAGAGGCTGACCCCTTGCCTTCACC TCCAATGCTACCACTCTGGTCTAAGTCACTGTCACCACCACCTAAATTATAGCTGTTGACTCATAACAATCTTCCTG CTTCTACCACTGCCCCACTACAATTTCTTCCCAATATACTATCCAAATTAGTCTTTTCAAAATGTAAGTCATATATG GTCACCTCTTTGTTCAAAGTCTTCTGATAGTTTCCTATATCATTTATAATAAAACCAAATCCTTACAATTCTCTACA ATAGTTGTTCATGCATATATTATGTTTATTACAGATACGCATATATATAGCTCTCATATAAATAAATATATATATTT ATGTGTATGTGTGTAGAGTGTTTTTTCTTACAACTCTATGATGTAGGTATTATTAGTGTCCCAAATTTTATAATTTA GGACTTCTATGATCTCATCTTTTATTCTCCCCTTCACCGAATCTCATCCTACATTGGCCTTATTGATATTCCTTGAA AATTCTAAGCATCTTACATCTTTAGGGTATTTACATTTGCCATTCCCTATGCCCTAAATATTTAATCATAGTTTCAT ATAAATGGGTTCCTCATCATCTATGGGTACTCTCTCAGGTGTTAACTTTATAGTGAGGACTTTCCTGCCATACTACT TAAAGTAGCGATACCCTTTCACCCTGTCCTAATCACACTCTGGCCTTCATTTCAGTTTTTTTTTTTTCTCCATAGCA CCTAATCTCATTGGTATATAACATGTTTCATTTGCTTATTTAATGTCAAGCTCTTTCCACTATCAAGTCCATGAAAA CAGGAACTTTATTCCTCTATTCTGTTTTTGTGCTGTATTCTTAGCAATTTTACAATTTTGAATGAAATGAATGAGCA GTCAAACACATATACAACTATAATTAAAAGGATGTATGCTGACACATCCACTGCTATGCACACACAAAGAAATCAGT GGAGTAGAGCTGGAAGCGCTAAGCCTGCATAGAGCTAGTTAGCCCTCCGCAGGCAGAGCCTTGATGGGATTACTGAG TTCTAGAATTGGACTCATTTGTTTTGTAGGCTGAGATTTGCTCTTGAAAACTTGTTCTGACCAAAATAAAAGGCTCA AAAGATGAATATCGAAACCAGGGTGTTTTTTACACTGGAATTTATAACTAGAGCACTCATGTTTATGTAAGCAATTA ATTGTTTCATCAGTCAGGTAAAAGTAAAGAAAAACTGTGCCAAGGCAGGTAGCCTAATGCAATATGCCACTAAAGTA AACATTATTCCATAGGTGTCAGATATGGCTTATTCATCCATCTTCATGGGAAGGATGGCCTTGGCCTGGACATCAGT GTTATGTGAGGTTCAAAACACCTCTAGGCTATAAGGCAACAGAGCTCCTTTTTTTTTTTTCTGTGCTTTCCTGGCTG TCCAAATCTCTAATGATAAGCATACTTCTATTCAATGAGAATATTCTGTAAGATTATAGTTAAGAATTGTGGGAGCC ATTCCGTCTCTTATAGTTAAATTTGAGCTTCTTTTATGATCACTGTTTTTTTAATATGCTTTAAGTTCTGGGGTACA TGTGCCATGGTGGTTTGCTGCACCCATCAACCCGTCATCTACATTAGGTATTTCTCCTAATGCTATCCTTCCCCTAG CCCCCCACCCCCAACAGGCCCCAGTGTGTGATGTTCCCCTCCCTGTGTCCATGGATCACTGGTTTTTTTTTTTTTTT TTTTTTTTTTTTTAAAGTCTCAGTTAAATTTTTGGAATGTAATTTATTTTCCTGGTATCCTAGGACCTGCAAGTTAT CTGGTCACTTTAGCCCTCACGTTTTGATGATAATCACATATTTGTAAACACAACACACACACACACACACACACACA TATATATATATAAAACATATATATACATAAACACACATAACATATTTATCGGGCATTTCTGAGCAACTAACTCATGC AGGACTCTCAAACACTAACCTATAGCCTTTTCTATGTATCTACTTGTGTAGAAACCAAGCGTGGGGACTGAGAAGGC AATAGCAGGAGCATTCTGACTCTCACTGCCTTTGGCTAGGTCCCTCCCTCATCACAGCTCAGCATAGTCCGAGCTCT TATCTATATCCACACACAGTTTCTGACGCTGCCCAGCTATCACCATCCCAAGTCTAAAGAAAAAAATAATGGGTTTG CCCATCTCTGTTGATTAGAAAACAAAACAAAATAAAATAAGCCCCTAAGCTCCCAGAAAACATGACTAAACCAGCAA GAAGAAGAAAATACAATAGGTATATGAGGAGACTGGTGACACTAGTGTCTGAATGAGGCTTGAGTACAGAAAAGAGG CTCTAGCAGCATAGTGGTTTAGAGGAGATGTTTCTTTCCTTCACAGATGCCTTAGCCTCAATAAGCTTGCGGTTGTG GAAGTTTACTTTCAGAACAAACTCCTGTGGGGCTAGAATTATTGATGGCTAAAAGAAGCCCGGGGGAGGGAAAAATC ATTCAGCATCCTCACCCTTAGTGACACAAAACAGAGGGGGCCTGGTTTTCCATATTTCCTCATGATGGATGATCTCG TTAATGAAGGTGGTCTGACGAGATCATTGCTTCTTCCATTTAAGCCTTGCTCACTTGCCAATCCTCAGTTTTAACCT TCTCCAGAGAAATACACATTTTTTATTCAGGAAACATACTATGTTATAGTTTCAATACTAAATAATCAAAGTACTGA AGATAGCATGCATAGGCAAGAAAAAGTCCTTAGCTTTATGTTGCTGTTGTTTCAGAATTTAAAAAAGATCACCAAGT CAAGGACTTCTCAGTTCTAGCACTAGAGGTGGAATCTTAGCATATAATCAGAGGTTTTTCAAAATTTCTAGACATGA GATTCAAAGCCCTGCACTTAAAATAGTCTCATTTGAATTAACTCTTTATATAAATTGAAAGCACATTCTGAACTACT TCAGAGTATTGTTTTATTTCTATGTTCTTAGTTCATAAATACATTAGGCAATGCAATTTAATTAAAAAAACCCAAGA ATTTCTTAGAATTTTAATCATGAAAATAAATGAAGGCATCTTTACTTACTCAAGGTCCCAAAAGGTCAAAGAAACCA GGAAAGTAAAGCTATATTTCAGCGGAAAATGGGATATTTATGAGTTTTCTAAGTTGACAGACTCAAGTTTTAACCTT CAGTGCCCATGATGTAGGAAAGTGTGGCATAACTGGCTGATTCTGGCTTTCTACTCCTTTTTCCCATTAAAGATCCC TCCTGCTTAATTAACATTCACAAGTAACTCTGGTTGTACTTTAGGCACAGTGGCTCCCGAGGTCAGTCACACAATAG GATGTCTGTGCTCCAAGTTGCCAGAGAGAGAGATTACTCTTGAGAATGAGCCTCAGCCCTGGCTCAAACTCACCTGC AAACTTCGTGAGAGATGAGGCAGAGGTACACTACGAAAGCAACAGTTAGAAGCTAAATGATGAGAACACATGGACTC ATAGAGGGAAACAACGCATACTGGGGCCTATCAGAGGGTGGAGGGTGAGAGAAGGAGAGGATCAGGAAAAATCACTA ATGGATGCTAAGCGTAATACCTGAGTGATGAGATCATCTATACAACAAACCCCCTTGACATTCATTTATCTATGTAA CAAACCTGCACATCCTGTACACGTACCCCTGAACTTAAAATAAAAGTTGAAAACAAGAAAGCAACAGTTTGAACACT TGTTATGGTCTATTCTCTCATTCTTTACAATTACACTAGAAAATAGCCACAGGCTCCTGCAAGGCAGCCACAGAATT TATGACTTGTGATATCCAAGTCATTCCTGGATAATGCAAAATCTAACACAAAATCTAGTAGAATCATTTGCTTACAT CTATTTTTGTTCTGAGAATATAGATTTAGATACATAATGGAAGCAGAATAATTTAAAATCTGGCTAATTTAGAATCC TAAGCAGCTCTTTTCCTATCAGTGGTTTACAAGCCTTGTTTATATTTTTCCTATTTTAAAAATAAAAATAAAGTAAG TTATTTGTGGTAAAGAATATTCATTAAAGTATTTATTTCTTAGATAATACCATGAAAAACATTCAGTGAAGTGAAGG GCCTACTTTACCCAACAAGAATCTAATTTATATAATTTTTCATACTAATAGCATCTAAGAACAGTACAATATTTGAC TCTTCAGGTTAAACATATGTCATAAATTAGCCAGAAAGATTTAAGAAAATATTGGATGTTTCCTTGTTTAAATTAGG CATCTTACAGTTTTTAGAATCCTGCATAGAACTTAAGAAATTACAAATGCTAAAGCAAACCCAAACAGGCAGGAATT AATCTTCATCGAATTTGGGTGTTTCTTTCTAAAAGTCCTTTATACTTAAATGTCTTAAGACATACATAGATTTTATT TTACTAATTTTAATTATACAGACAATAAATGAATATTCTTACTGATTACTTTTTCTGACTGTCTAATCTTTCTGATC TATCCTGGATGGCCATAACACTTATCTCTCTGAACTTTGGGCTTTTAATATAGGAAAGAAAAGCAATAATCCATTTT TCATGGTATCTCATATGATAAACAAATAAAATGCTTAAAAATGAGCAGGTGAAGCAATTTATCTTGAACCAACAAGC ATCGAAGCAATAATGAGACTGCCCGCAGCCTACCTGACTTCTGAGTCAGGATTTATAAGCCTTGTTACTGAGACACA AACCTGGGCCTTTCAATGCTATAACCTTTCTTGAAGCTCCTCCCTACCACCTTTAGCCATAAGGAAACATGGAATGG GTCAGATCCCTGGATGCAAGCCAGGTCTGGAACCATAGGCAGTAAGGAGAGAAGAAAATGTGGGCTCTGCAACTGGC TCCGAGGGAGCAGGAGAGAATCAACCCCATACTCTGAATCTAAGAGAAGACTGGTGTCCATACTCTGAATGGGAAGA ATGATGGGATTACCCATAGGGCTTGTTTTAGGGAGAAACCTGTTCTCCAAACTCTTGGCCTTGAGATACCTGGTCCT TATTCCTTGGACTTTGGCAATGTCTGACCCTCACATTCAAGTTCTGAGGAAGGGCCACTGCCTTCATACTGTGGATC TGTAGCAAATTCCCCCTGAAAACCCAGAGCTGTATCTTAATTGTTTAAAAAAATTATATTATCTCAAGGACTGTTCT TCTCTGAGTAGCCAAGCTCAGCTTGGTTCAAGCTACAAGCAGCTGCGCTGCTTTTTGTCTAGTCATTGTTCTTTTAT TTCAGTGGATCAAATACGTTCTTTCCAAACCTAGGATCTTGTCTTCCTGGACTATATATTTTATCCACGAAGTCTTA ATCTGGGGTCCACAGAACACTAGGGGGCTGGTGAAGTTTATAGAAAAAAAATCTGTATTTTTACTTACATGTAACTG AAATTTAGCATTTTCTTCTACTTTGAATGCAAAGGACAAACTAGAATGACATCATCAGTACCTATTGCATAGTTATA AAGAGAAACCACAGATATTTTCATACTACACCATAGGTATTGCAGATCTTTTTGTTTTTGTTTTTGTTTGAGATGGA GTTTCGCTCTTATTGCCCAGGCTGGAGTGCAGTGGCATGATTTCGGCTCACTGCAACCTCCCCTTCCTGCATTCAAG CAATTCTCCTGCCTTGGCCTCCAGAGTAGCTGGGGATTACAGGCACCTGCCACCATGCCAGTCTAATTTTTGTATTT TTAGTAGAGAATGGGTTTCGCCATGTTGGCCAGGCTGGTCTTGAACTCCTGACCTCAGATGATCTGCCCGCCTTGGC CTCCTGAAGTGCTGGGATTATAGGTGTGAGCCACCACGCCTGGCCCATTGCAGATATTTTTAATTCACATTTATCTG CATCACTACTTGGATCTTAAGGTAGCTGCAGACCCAATCCCAGATCTAATGCTTTCATAAAGAAGCAAATATAATAA ATACTATACCACAAATGTAATGTTTGATGTCTGATAATGATATTTCAGTGTAATTAAACTTAGCACTCCATGTATAT TATTTGATGCAATAAAAACATATTTTTTTAGCACTTACAGTCTGCCAAACTGGCCTGTGACACAAAAAAAGTTTAGG GGAATTCCCCTAGTTTTGTCTGTGTTAGCCAATGGTTAGAATATATGCTCAGAAAGATACCATTGGTTAATAGCTAA AAGAAAATGGAGTAGAAATTCAGTGGCCTGGAATAATAACAATTTGGGCAGTCATTAAGTCAGGTGAAGACTTCTGG AATCATGGGAGAAAAGCAAGGGAGACATTCTTACTTGCCACAAGTGTTTTTTTTTTTTTTTTTTTTTATCACAAACA TAAGAAAATATAATAAATAACAAAGTCAGGTTATAGAAGAGAGAAACGCTCTTAGTAAACTTGGAATATGGAATCCC CAAAGGCACTTGACTTGGGAGACAGGAGCCATACTGCTAAGTGAAAAAGACGAAGAACCTCTAGGGCCTGAACATAC AGGAAATTGTAGGAACAGAAATTCCTAGATCTGGTGGGGCAAGGGGAGCCATAGGAGAAAGAAATGGTAGAAATGGA TGGAGACGGAGGCAGAGGTGGGCAGATCATGAGGTCAAGAGATCGAGACCATCCTGGCAAACATGGTGAAATCCCGT CTCTACTAAAAAAAAAAAATTAGCTGGGCATGGTGGCATGCGCCTGTAGTCCCAGCTGCTCGGGAGGCTGAGGCAG GAGAATCGTTTGAACCCAGGAGGCGAAGGTTGCAGTGAGCTGAGATAGTGCCATTGCACTCCAGTCTGGCAACAGAG TGAGACTCCGTCTCAAAAAAAAAAAAAAGAAAGAAAGAAAAGAAAAAGAAAAAAGAAAAAATAAATGGATGTAGAAC AAGCCAGAAGGAGGAACTGGGCTGGGGCAATGAGATTATGGTGATGTAAGGGACTTTTATAGAATTAACAATGCTGG AATTTGTGGAACTCTGCTTCTATTATTCCCCCAATCATTACTTCTGTCACATTGATAGTTAAATAATTTCTGTGAAT TTATTCCTTGANTCCCAAAATATTGAGGTAAATAACAATGGTATTATAAAAGGGCAGATTAAGTGATATAGCATAAG CAATATTCTTCAGGCACATGGATCGAATTGAATACACTGTAAATCCCAACTTCCAGTTTCAGCTCTACCAAGTAAAG AGCTAGCAAGTCATCAAAATGGGGACATACAGAAAAAAAAAAGGACACTAGAGGAATAATATACCCTGACTCCTAGC CTGATTAATATATCGATTCACTTTTACTCTGTTTGGTGACAAATTCTGGCTTTAAATAATTTTAGGATTTTAGGCTT CTCAGCTCCCTTCCCAGTGAGAAGTATAAGCAGGACAGCAGGCAAGCAAGAAGAGAGCCCAAGGCAATACTCACAAA GTAGCCAGTGTCCCCTGTGGTCATAGAGAAATGGAAAGAGAGAGGANTCCCCCCTTGGAGCCACTGGGTGGTAATCC TTTCCGTCCGTTCCTCTCTAGGGAATCACCCCAAGGTACTGTACTTTGGGATTAAGGCTTTAGTCCCACTGTGGACT ACTTGCTATTCTGTTCAGTTTCTGAAGGAACTATGTACGGTTTTTGTCTCCCTAGAGAAACTAAGGTACAGAAGTTT TGTTTACAATGCACTCCTTAAGAGAGCTAGAACTGGGTGAAGANTCCTGGTTTAACCAGCCTTAATTTCCTTTCCCT GGGCCCCGGTTTGGTCACGTCACTGTCACCACCTTTAAGGCAAATGTTAAATGCGCTTTGGCTGAACTTTTTCCTAT TTTGAGATTTGCTCCTTTATATGAGGCTTTCTTGGAAAAGGAGAATGGGAGAGATGGATATCATTTTGGAAGATGAT GAAGAGGGTAAAAAAGGGTACAAATGGAAATTTGTGTTGCAGATAGTATGAGGAGCCAACAAAAAAGAGCCTCAGGA TCCAGCACACATTATCACAAACTTAGTGTCCATCCATCACTGCTGACCCTCTCCGGACCTGACTCCACCCCTGAGGA CACAGGTCAGCCTTGACCAATGACTTTTAAGTACCATGGAGAACAGGGGGCCAGAACTTCGGCAGTAAAGAATAAAA GGCCAGACAGAGAGGCAGCAGCACATATCTGCTTCCGACACAGCTGCAATCACTAGCAAGCTCTCAGGCCTGGCATC ATGGTGCATTTTACTGCTGAGGAGAAGGCTGCCGTCACTAGCCTGTGGAGCAAGATGAATGTGGAAGAGGCTGGAGG TGAAGCCTTGGGCAGGTAAGCATTGGTTCTCAATGCATGGGAATGAAGGGTGAATATTACCCTAGCAAGTTGATTGG GAAAGTCCTCAAGATTTTTTGCATCTCTAATTTTGTATCTGATATGGTGTCATTTCATAGACTCCTCGTTGTTTACC CCTGGACCCAGAGATTTTTTGACAGCTTTGGAAACCTGTCGTCTCCCTCTGCCATCCTGGGCAACCCCAAGGTCAAG GCCCATGGCAAGAAGGTGCTGACTTCCTTTGGAGATGCTATTAAAAACATGGACAACCTCAAGCCCGCCTTTGCTAA GCTGAGTGAGCTGCACTGTGACAAGCTGCATGTGGATCCTGAGAACTTCAAGGTGAGTTCAGGTGCTGGTGATGTGA TTTTTTGGCTTTATATTTTGACATTAATTGAAGCTCATAATCTTATTGGAAAGACCAACAAAGATCTCAGAAATCAT GGGTCGAGCTTGATGTTAGAACAGCAGACTTCTAGTGAGCATAACCAAAACTTACATGATTCAGAACTAGTGACAGT AAAGGACTACTAACAGCCTGAATTGGCTTAACTTTTCAGGAAATCTTGCCAGAACTTGATGTGTTTATCCCAGAGAA TTGTATTATAGAATTGTAGACTTGTGAAAGAAGAATGAAATTTGGCTTTTGGTAGATGAAAGTCCATTTCAAGGAAA TAGAAATGCCTTATTTTATGTGGGTCATGATAATTGAGGTTTAGAAGAGATTTTTGCAAAAAAAATAAAAGATTTGC TCAAAGAAAAATAAGACACATTTTCTAAAATATGTTAAATTTCCCATCAGTATTGTGACCAAGTGAAGGCTTGTTTC CGAATTTGTTGGGGATTTTAAACTCCCGCTGAGAACTCTTGCAGCACTCACATTCTACATTTACAAAAATTAGACAA TTGCTTAAAGAAAAACAGGGAGAGAGGGAACCCAATAATACTGGTAAAATGGGGAAGGGGGTGAGGGTGTAGGTAGG TAGAATGTTGAATGTAGGGCTCATAGAATAAAATTGAACCTAAGCTCATCTGAATTTTTTGGGTGGGCACAAACCTT GGAACAGTTTGAGGTCAGGGTTGTCTAGGAATGTAGGTATAAAGCCGTTTTTGTTTGTTTGTTTGTTTTTTCATCAA GTTGTTTTCGGAAACTTCTACTCAACATGCCTGTGTGTTATTTTGTCTTTTGCCTAACAGCTCCTGGGTAACGTGAT GGTGATTATTCTGGCTACTCACTTTGGCAAGGAGTTCACCCCTGAAGTGCAGGCTGCCTGGCAGAAGCTGGTGTCTG CTGTCGCCATTGCCCTGGCCCATAAGTACCACTGAGTTCTCTTCCAGTTTGCAGGTCTTCCTGTGACCCTGACACCC TCCTTCTGCACATGGGGACTGGGCTTGGCCTTGAGAGAAAGCCTTCTGTTTAATAAAGTACATTTTCTTCAGTAATC AAAAATTGCAATTTTATCTTCTCCATCTTTTACTCTTGTGTTAAAAGGAAAAAGTGTTCATGGGCTGAGGGATGGAG AGAAACATAGGAAGAACCAAGAGCTTCCTTAAGAAATGTATGGGGGCTTGTAAAATTAATGTGGATGTTATGGGAGA ATTCCCAAGATTCCCAAGGAGGATGATATGATGGAGAAAAATCTTTATCGGGGTGGGAAAATGGTTAATTAAGTGGC AGAGACTCCTAGGCAGTTTTTACTGCACCGGGGAAAGAAGGAGCTGTTGTGGTACCTGAGAAAGCAGATTTGTGGTA CATGTCACTTTTCATTAAAAACAAAAACAAAACAAAACAAAACTTCATAGATATCCAAGATATAGGCTGAGAATTAC TATTTTAATTTACTCTTATTTACATTTTGAAGTAGCTAGCTTGTCACATGTTTTATGAAATTGATTTGGAGATAAGA TGAGTGTGTATCAACAATAGCCTGCTCTTTCCATGAAGGATTCCATTATTTCATGGGTTAGCTGAAGCTAAGACACA TGATATCATTGTGCATTATCTTCTGATACAATGTAACATGCACTAAAATAAAGTTAGAGTTAGGACCTGAGTGGGAA AGTTTTTGGAGAGTGTGATGAAGACTTTCCGTGGGAGATAGAATACTAATAAAGGCTTAAATTCTAAAACCAGCAAG CTAGGGCTTCGTGACTTGCATGAAACTGGCTCTCTGGAAGTAGAAGGGAGAGTAAGACATACGTAGAGGACTAGGAA AGACCAGATAGTACAGGGCCTGGCTACAAAAATACAAGCTTTTACTATGCTATTGCAATACTAAACGATAAGCATTA GGATGTTAAGTGACTCAGGAAATAAGATTTTGGGAAAAAGTAATCTGCTTATGTGCACAAAATGGATTCAAGTTTGC AGATAAAATAAAATATGGATGATGATTCAAGGGGACAGATACAATGGTTCAAACCCAAGAGGAGCAGTGAGTCTGTG GAATTTTGAAGGATGGACAAAGGTGGGGTGAGAAAGACATAGTATTCGACCTGACTGTGGGAGATGAGAAGGAAGAA GGAGGTGATAAATGACTGAAAGCTCCCAGACTGGTGAAGATAACAGGAGGAAACCATGCACTTGACCCTGGTGACTC TCATGTGTGAAGGGTAGAGGGATATTAACAGATTTACTTTTTAGGAAGTGCTAGATTGGTCAGGGAGTTTTGACCTT CAGGTCTTGTGTCTTTCATATCAAGGAACCTTTGCATTTTCCAAGTTAGAGTGCCATATTTTGGCAAATATAACTTT ATTAGTAATTTTATAGTGCTCTCACATTGATCAGACTTTTTCCTGTGAATTACTTTTGAATTTGGCTGTATATATCC AGAATATGGGAGAGAGACAAATAATTATTGTAGTTGCAGGCTATCAACAATACTGGTCTCTCTGAGCCTTATAACCT TTCAATATGCCCCATAAACAGAGTAAACAGGGATTATTCATGGCACTAAATATTTTCACCTAGGTCAGTCAACAAAT GGAGGCAATGTGCATTTTTTGATACATATTTTTATATATTTATGGGGCATGTGATACTTACATGCCTAGAACATGTG ACTGATTAAGTCTAGATATTTAGGATATCCATTACTTTGAGCATTTATCATTTCTATGTATTGAGAAAATTTCAAAT CCTCATTTCTGACCATTTTGAAATATATAATAAATAGTAATTAACTATAGTCACCCTACTCAAATATCAACATTATA AACTAACTAATCCTTCTTTCCACTTTTTTACCAACCAACATCTCTTAAATCCCCTGCCATACACATCACACATTTTT CAGCTCTGATAACTATCATTCTACTCTCATACCACCATGAGACCACTTTTTTAGCTCCACAGATGAATAAAAACATG TGATATTTGACTTTCTGTATCTGGCTTATTTTATTATCTATCTCTTTGGCATACCAAGAGTTTGTTTTTGTTCTGCT TCAGGGCTTTCAATTAACATAATGACCTCTGGTTCCATCCATGTTGCTACAAATGACAAGATTTCATTCTTTTTCAT GGCAAAATAGTACTGTGCAAAAAATACAATTTTTTAATCCGTTCATCTGTTGATAGACACTTAGGTTGATCCCAAAC CTTAACTATTGTGAATAGGTGCTTCAATAAACATGAGTGTAATGTGTCCATTGGATATACTGATTTCCTTTCTTTTG GATAAATAACCACTAGTGAGATTGCTGGATTGTATGATAGTTCTGTTTTTAGTTTATTGAGAAATCTTCATACTGTT TTCCATAATGGTTGTACTATTTTACATTCCCACCAACAGTGTGTAAGAAAGAGTTCCCTTTTCTCCATATCCTCACA AGGATCTGTTATTTTTTGTCTTTTTTGTTAATAGCATTTTAACTAGAGTAAGTAGATATCTCATTGTAGTTTTGATT TGCATTTCCCTGATCATTAGTGATGTTGAGATTTTTTCATATGTTTGTTGGTCATTTGTATATCTTTTTCTGAGATT GTCTGTTCATGTCCTTATCCTACTTTTATTGGGATTGTTGTTATTTTCTTGATAATCATTGTGTCATTTTAGAGCCT GGATATTATTCTTTTGTCAGATGTATAGATTGTGAAGATTTTCTCCTCTGTGGGTTGTCTGTTTATTCTGCAGACTC TTCCTTTTGCCATGCAAAAGCTCTTTAGTTTAATTTAGTCCCAGATATTTTCTTTGTTTTTATGTGTTTGCATTTGT GTTCTTGTCATGAAATCCTTTCCTAAGCCAATGTGTAGAAGGGTTTTTCCGATGTTATTTTCTAGAATTGTTACAGT TTCAGGCTTAGATTTAAGTCCTTGATCCATCTTAAGTTGATTTTTGTATAAGGTGAGAGATGAAGATCCAGTTTCAT TCTCCTACATGTAGCTTGCCAGCTATCCCGACTCATTTGTTGAATAGGGTGCCCTTTCCCATTTATGTTTTTGTTTG CTTTGTCAAAGATCAGTTCGGATGTAAGTATTTGAGTTTATTTCTGGGTTCTCTATTCTGTTCCATTGGTCCGATGT GCCTATTTGTACACCAGCATCATGCTGTGTTTTTGGTGACTATGGCCTTATTGTATAGTTTGAAATGAGGTAATGTA ATGCCATTCAGATTTGTTCTTTTTTTTAGACTTGCTTGTTTATTGGGCTCTTTTTTGGTTCCATAAGAATTTTAGGA TTGTTTTTTCTAGTTCTGTGAAGGCTAATGGTGGTATTTATGGGAATTGCAATGCAATTTGTAGGTTGCTTCTGGCA TTATGGCCATTTTCACAATATTGATTCTACCCATCTATGAGAATGGCATGTGTTTCCATTTGTTTGTGTCTTATATG ATTACTATCAGCCGTGTTTTGTAGTTTTCCTTGTAGATGTCTTTCACCTCCTTGGTTAGGTATATATTCCTAAGTTT TTGTTTTGTTTTGTTTTGTTTTTTGCAGCTATTGTAAAAGGGGTTGAGTTATTGATTTTATTCTCATCTTGGTCATT GCTGGTATGTAAGAAAGCAACTCATTGGTGTACGTTAATTTTGTATCCAGAAACTTTGCTGAATTATTTTATCAGTT CTAGGGGGTTTTGGAGGAGTCTTTAGAGTTTTCTACATACACAATCATATCATCAGCAAACAGTGACAGTTTGACTT TCTCTTTAACAATTTGGATGTGCTTTACTTGTTTCTCTTGTCTGATTGCTCTTGCTAGGACTTCCAGTAATATGTTA AAGAGAAGTGGTGAGAGTGGGTATCCTTGTCTCATTCCAGTTTTCAGACAGAATGCTTTTAACTTTTTCCCATTCAA TATAATGTTGGCTGTGTGTTTACCATAGCTGGCTTTTATTACATTGAGGTATGTCCTTTGTAAACCGATTTTGCTGA GTTTTAGTCATAAAGTGATGTTGAATTTTGTTGAATGCAGTTTCTGTGGCTATTGAGATAATCACATGATTTTTGTT TCCAATTCTCTTTATGTTGTGTATCACACTTATTGACTTGCGTATGTTAAACCATCCGTGCATCCCTCGCATGAAAC CACTTGATCATGGGTTTTGATATGCCGTGTGGGATGCTATTAGCTATATTTTGTCAAGGATGTTGGCATCTATGTTC ATCAGGGATATTGATCTGTAGTGTTTTTTTTTTTTGGTTATGTTCTTTCCCAGTTTTGGTATTAAGGTGATACTGGC TTCATAGAATGATTTAGGGAGGATTCTCTCTTTCTCTATCTTGTAGAATACTGTCAATAGGATTGGTATCAATTCTT CTTTGAATGTCTGGTAGAATTCGAACGTCTCCTTTAGGTTTTCTAGTTTATTCATGTAAAGGTGTTCATAGTAACCT TGAATAATCTTTTGTATTTCTGTGGTATCAGTAATAGTATCTCCTGTTTTGTTTCTAACTGAGTTTATTTGCACTTC TCTCCTCTTTTCTTGGTTAATCTTGCTAATGGTCTATCAGTTTTATTTATCTTTTCAAAGAACCAGCTTTTTATTTC ATTTAGCTTTTGTATTTTTTTGCAGTTGTTTTAATTTCATTTAGTTCTCCTCTTATCTTAGTTATTCCCTTTCTTTT GCTGGGTTTTGGTTCTGTTTGTTTTTGTTTCTCTAGTTTCTTGTGGTGTGACCTTATATTGTCTGTCCTCTTTCAGA CTCTTTGACATCGACATTTAGGGCTGTGAACTTTCCTTTTAGCACCATCTTTGCTGTATCCTAGAGGTTTTGATAGG TGTGTCACTATTGTCGGTCAGTTCAAGTAATTTTGTTGTTCTTATTATACTTTAAGTTCTGGGATACATGTGCAGAA TGTGCAGGTTTGTTACATAGGTATAGATGTGCCATGGTGGTTTGCTGCTCCCATCAACCTGTCATCTACATTAGGTA TTTCTTTTAATGTTATCCCTCTCCTAACCCCCTCACCCCCCGACAGGCCCTGGTGTGTGATGTTCCCCTCCCTGTGT CCATGTGTTCTCATTGTTCAACTCCCACTTATGAGTGAGAACGTGTGGTGTTTGGTTTCTCTGTTCCTGTGTTAGTT TGCTCAGAATGATGTTTCCACCTTCACCATGTCCCTGCAAAGACATGAACTCATCATTTTATGGCTGCATATATTCC ATGGTGTATATGTGCCACATTTTCTTTATCCATTATATCGCTGATGGCCATTTGGGTTGGTTCCAAGTCTTTGGTAT TGTGAATAGTGCCGCAATAAACATACGTGTGCACATGTCTTTATAGTAGAATGATTTCTAATTCTTTGGGTATATAC CCAGTAATGGGATTGCTGGGTCAAACAGTATTTCTGGTTCTAGATCCTTGAGGAATTGCCACACTGTCTTCCACAAT GGTTGAACTAATTTACACACCCATCAACAGTGTAAAATTTTTCCTATTCTTCCACATCCTCTCCAGCACCTTTTGTT TCCTGACTTTTTAATAATTGCCATTCTAACTGGCATGAGATGGTATCTCATTGTGGTTTTGATTTGCATTTCTCTAA TGACCAGTGATGATGAGCTTCTTTTCATGTGTTTCTTGGCCACATAAATGACTTCTTTAGAGAAGCATCTGTTCATA TCCTTTGTCCACTTTTTGATGGGGTCGTTAGGTTTTTTCTTGTAAATTTGTTGAAGTTCTTTGTAGATTTTGGATGT TAGCCCTTTGTCAGATGGATAGATTGGCAAAAATTTTCTCCCATTCTGTAGGTTGCCTGTTCACTCTGATGATAGTC TTTTGCTGTGCAGAAGCTCTTTAGTTTAATTAGATCCCATATGTCAATTTTGGCCTTTGTTGTCATTGCTTTTGATG TTTAGTCGTGGAATTTTGCCCATGCCTATGTCCTGAATGGTATTGCCTAGGTTATCTTCTAGGATTTTTATGGTTTT AGGTTGCACATTTAAGTCTTTAATCCACCTTGAGTTAATTTTTGTATAAGGTGTAAGGAAGGGGTACAGTTTCAGTT TTATGCATATTGCTAGCCAGTTTTTCCAGCACCATTTATTAAATAGGGAATTCTTTCTCCATTGCTTTTGTGATGTT TGTCAAAGATCAGATGGTCGTAGATGTGTGGCATTATTTCTGAGGCTTCTGTTCTGTTCCACTGGTCTATATATCTG TTTTGGTACCAGTACCATGCTGTTTTTGTTACTGTAGCCTTGTAGTATAGCTTGAAGTCAGGTAGCATCATGCCTCC AGCTTTGTTCTTTTTGTTTAGGATTGTCTTGGCTATATGGGCTCTTTTTTGATTCCATATGACATTTAAAGTAGTTT TTTCTAATTCTTTGAAAAAAGTCAGTGGTAGCTTGATGGGGATAGCATTGAATCTATAAATTACTTTGGGCAGTATG GCCATTTTAAAGATATTGATTCTTTCTATCTATGAGCATGGAATGTTTTTCCATTTGTTTGTGTCCTCTCTTATTTC CTTGAGCAGTGAGTGGTTTGTAGCTCTCCTTGAAGAGGTTCTTCACATCCCTTATAAGTTGTATTTCTAGGTATTTT ATTTTATTCTCTTTGCAGCAATTGTGAATGGGAGTTCACCCATGATTTGGCTCTCTGCTTGTCTATTATTGGTGTAT AGGAATGCTTGTGATTTTTGCACACTGATTTTGTATCTTGAGACTTTGCTGAAGCTGTTTATCAGCTTAAGATTTTG GGCTGAGATGACAGGGTCTTCTAAATATACAATCATGTCATCTGCAAACAGAGACAATTTGACTTCCTCTCTTCCTA TTTGAATATGCTTTATTTCTTTCTCTTGCCTGATTGTCCTGGCGAGAACTTCCAATACTATGTTGAGTAAGAGTGGC GAGAGGGCATCCTTGTCTTGTGCCGGTTTTCAAAGCAAATGATTTTTAAATTTCCGTCTTGATTTCATTGTTGACCC AATGATCATTCAGGAGCAGGTTATTTAATTTCCCTGTATTTGCATGGTTTTGAAGGTTCCTTTTGTAGTTGATTTCC AATTTTATTCTACTGTGGTCTGAGAGAGTGCTTGATATAATTTCAATTTTTAAAAATTTATTGAGGCTTGTTTTGTG GCATATCATATGGCCTATCTTGGAGAAAGTTCCATGTGCTGATGAATAGAATGTGTATTCTGCAGTTGTTGGGTAGA ATGTCCTGTAAATATCTGTTAAGTCCATTTGTTCTTTAAATCCATTGTTTCTTTGTAGACTGTCTTGATGACCTGCC TAGTGCAGTCAGTGGAGTATTGAAGTCCCCCACTATTATTATGTTGCTGTCTAGTAGTAATTGTTTTATAAATTTGG GATCTCCAGTATTAGATGCATATATATTAAGAATTGTAATATTCTCCCATTGGACAAGGGCTTTTATCATTATATGA TGTCCCTCTTTGTCTTTTTTAACTGCTGTTTCTTTAAAGTTTGTTTTGTCTGACATAAGAATAGCTGCTTTGGCTCG CTTTTGGTGTCCATTTGTGTGGAATGTCATTTTCCACCCCTTTACCTTAAGTTTATGTGAGTCCTTATGTGTTAGGT GAGTCTCCTGAAGGCGGCAGATAACTGGTTGGTGAATTCTATTCATTCTGCAATTCTGTATCTTTTAAGTGGAGCAT TTAGTCCATTTACATTCAACATCAGTATTGAGGTGTGAGGTGACTATTCCATTCTTCGTGGTATTTGTTGCCTGTGT ATCTTTTTATCTGTATTTTTGTTGTATATGTCCTATGGGATTTATGCTTTAAAGAGGTTCTGTTTTGATGTGCTTCC AGGGTTTATTTCAAGATTTAGAGCTCCTTTTATCATTCTTGTAGTGTTGGCTTGGTAGTGCCGAATTCTCTCAGCAT TTGTTTTTCTGAAAAACACTGTGTATTTTCTTCATTTGTGAAGCTTAGTTTCACTGGATATAAAATTCTTGGCTGAT AATTGTTTTGTTTAAGAAGGCTGAAGATAGGGCCATATTCACTTCTAGCTTTTACGGTTTCTGCTGAGAAATCTGCT GTTAATCTGATAGGTTTTCTTTCATAGGTTACCTGGTAGTTTCACCTCACAGCTCTTAAGATTCTCTTTGTCTTTAG ATAACTTTGGATACTCTGATGACAATGTACCTAGGCAATGATATTTTTGCAATGAATTTCCCAGGTGTTTATTGAGC TTCTTTGTATTTGGATATCTAGGTCTCTAGCAAGGAGGGGGAAGTTTTCCTTGATTATTTCCATGGACAAGTTTTCC AAACTTTTAGATTTCTCTTCTTTCTCAGGAATGCTGATTATTCTTAGGTTTGATTGTTTAACATAATCCCAGATTTC TTGGAGGCTTTGTTCATATTTTCTTATTCTTTTTTCTTTGTCTTTGTTGGATTGGGTAATTCAAAAACTTTGTCTTC AAGCTCTGAATTTCTTCTGCTTGGATTCTATTGCTGAGACTTTCTAGAGCATTTTGCATTTCTATAAGTGCATCCAT TCATCCATTGTTTCCTGAAGTTTTGAATGTTTTTTATTTATGCTATCTCTTTAACTGAAGATTTCTCCCCTCATTTC TTGTATCATATTTTTGGTTTTTTTAAAATTGGACTTCACCTTCCTCGGATGCCTCCTTGATTAGCTTAATAACTGAC CTTCTGAATTATTTTTCAGGTAAATCAGGGATTTCTTCTTGGTTTGGATGCATTGCTGGTGAGCTAGTATGATTTTT TGGGGGGTGTTAAAGAACCTTGTTTTTCATATTACCAGAGTTAGTTTTCTGGTTCCTTCTCACTTGGGTAGGCTCTG TCAGAGGGAAAGTCTAGGCCTCAAGGCTGAGACTTTTGTCCCAGCAGGTGTTCCCTTGATGTAGCACAGTCCCCCTT TTCCTAGGACGTGGGGCTTCCTGAGAGCCGAACTGTAGTGATTGTTATCTCTCTTCTGGATCTAGCCACCCATCAGG TCTACCAGACTCCAGGCTGGTACTGGGGTTTGTCTGCACAGAGTCTTGTGACGTGAACCATCTGTGGGTCTCTCAGC CATAGATACAACCACCTGCTCCAATGGAGGTGGTAGAGGATGAAATGAACTCTGTGAGGGTCCTTACTTTTGGTTGT TCAATGCACTATCTTTTTGTGCTGGTTGGCCTCCTGCCAGGAGGTGGCACTTTCTAGAAAGCATCAGCAGAGGCAGT CAGGTGGTGGTGGCTGGGGGGGCTGGGGCACTAGAACTCCCAAGAATATATGCCCTTTGTCTTCAGCTACTAGGGTG AGTAAGGAAGGACCATCAGGTGGGGGCAGGACTAGTCGTGTCTGAGCTCAGAGTCTCCTTGGGCAGGTCTTTCTGTG GCTACTGTGGGAGGATGGGGGTGTAGTTTCCAGGTCAATGGATTTATGTTCCTAGGACAATTATGGCTGCCTCTGCT GTGTCATGCAGGTCATCAGGAAAGTGGGGGAAAGCAAGCAGTCACGTGACTTGCCCAGCTCCCATGCAACTCAAAAG GTTGGTCTCACTTCCAGCGTGCACCCTCCCCCGCAACAGCTCCGAATCTGTTTCCATGCAGTCAGTGAGCAAGGCTG AGAACTTGCCCAGGCTACCAGCTGCGAAACCAAGTAGGGCTGTCCTACTTCCCTGCCAGTGGAGTCTGCACACCAAA TTCATGTCCCCCCACCAACCCCCCCACTGCCCAGCCCCTAGATCTGGCCAGGTGGAGATTTTCTTTTTCCTGTCTCT TTTCCCAGTTCCTCTGGCAGCCCTCCCAAATGACCCCTGTGAGGCAAGGCAGAAATGGCTTCCTAGGGGACCCAGAG AGCCCACAGGGCTTTTCCCGCTGCTTCCTCTACCCCTGTATTTTGCTTGGCCCTCTAAATTGACTCAGCTCCAGGTA AGGTCAGAATCTTCTCCTGTGGTCTAGATCTTCAGGTTCCCAGTGAGGATGTGTGTTTGGGGGTAGACGGTCCCCCT TTTCCACTTCCACAGTTTGGGCACTCACAATATTTGGGGTGTTTCCCGGGTCCTACATGAGCAATCTGCTTCTTTCA GAGGGTGTGTGCGTTCTCTCAGCTTTCTTGAATTTATTTCTGCAGGTGGTTCTGCAAAAAAAATTCCTGATGGGAGA CTTCACATGCTGCTCTGTGCATCCGAGTGGGAGCTGCAATGTACTTCTGCTGCCACCCATCTGCCATCACCCTCTAA TTTGTCGGTAATATGCATTTTTAATCAATCTTTTTTTCTCTCTCTCTCTTTTCTTCTCCCCCAAAACTATACTGCCC TTTGATATCAAGGAATCAAGGCCGTGATGTTGAGGGGTGGGCAGTGGATACACTCTTTACCCCTTAGGGAGCATATC TAGATTTAGATATTGCCAATTCAAGATAACTTAATTGAAAGCAAATTCATAATGAATACACACACACACACACACAT CTGCATGACAAGATTTTTAATAGTTGAAAGAATAACTAATAATTGTCCACAGGCAATAAGGGCTTTTTAAGCAAAAC AGTTGTGATAAAACAGGTCATTCTTAGAATAGTAATCCAGCCAATAGTACAGGTTGCTTAGAGATTATGACATTACC AGAGTTAAAATTCAATAATGGCTTCTCACTCCCTACCACTGAGGACAAGTTTATGTCCTTAGGTTTATGCTTCCCTG AAACAATACCACCTGCTATTCTCCACTTTACATATCAACGGCACTGGTTCTTTATCTAACTCTCTGGCACAGCAGGA GTTTGTTTTCTTCTGCTTCAGAGCTTTGAATTTACTATTTCAGCTTCTAAACTTTATTTGCAATGCCTTCCCATGGC AGACTCCTTCTGTCATTTTGCCTCTGTTCGAAAACTTTTTCCTTAATTTCATTCTTAGTTAATAATATCTGAAATTA TTTTGTTGTTTAACTTAATTATTAATTTTATGTATGTTCTACCTAGATATAATCTTCTAGAGGATTGTTTTATTCTC TGACTTATTTAACTTAAATGCCCACTACCTTTAAAAATTATGACATTTATTTAACAGATATTTGCTGAACAAATGTT TGAAAATACATGGGAAAGAATGCTTGAAAACACTTGAAATTGCTTGTGTAAAGAAACAGTTTTATCAGTTAGGATTT AATCAATGTCAGAAGCAATGATATAGGAAAAATCGAGGAATAAGACAGTTATGGATAAGGAGAAATCAACAAACTCT TAAAAGATATTGCCTCAAAAGCATAAGAGGAAATAAGGGTTTATACATGACTTTTAGAACACTGCCTGGGTTTTTGG ATAAATGGGGAAGTTGTTGGAAAACAGGAGGGATCCTAGATATTCCTTAGTCTGAGGAGGAGCAATTAAGATTCACT TGTTTAGAGGCTGGGAGTGGTGGCTCACGCCTGTAATCCCAGAATTTTGGGAGGCCAAGGCAGGCAGATCACCTGAG GTCAAGAGTTCAAGACCAACCTGGCCAACATGGTGAAATCCCATCTCTACAAAAATACAAAAATTAGACAGGCATGA TGGCAAGTGCCTGTAATCCCAGCTACTTGGGAGGCTGAGGAAGGAGAATTGCTTGAACCTGGAAGGCAGGAGTTGCA GTGAGCCGAGATCATACCACTGCACTCCAGCCTGGGTGACAGAACAAGACTCTGTCTCAAAAAAAAAAAAGAGAGAT TCAAAAGATTCACTTGTTTAGGCCTTAGCGGGCTTAGACACCAGTCTCTGACACATTCTTAAAGGTCAGGCTCTACA AATGGAACCCAACCAGACTCTCAGATATGGCCAAAGATCTATACACACCCATCTCACAGATCCCCTATCTTAAAGAG ACCCTAATTTGGGTTCACCTCAGTCTCTATAATCTGTACCAGCATACCAATAAAAATCTTTCTCACCCATCCTTAGA TTGAGAGAAGTCACTTATTATTATGTGAGTAACTGGAAGATACTGATAAGTTGACAAATCTTTTTCTTTCCTTTCTT ATTCAACTTTTATTTTAACTTCCAAAGAACAAGTGCAATATGTGCAGCTTTGTTGCGCAGGTCAACATGTATCTTTC TGGTCTTTTAGCCGCCTAACACTTTGAGCAGATATAAGCCTTACACAGGATTATGAAGTCTGAAAGGATTCCACCAA TATTATTATAATTCCTATCAACCTGATAAGTTAGGGGAAGGTAGAGCTCTCCTCCAATAAGCCAGATTTCCAGAGTT TCTGACGTCATAATCTACCAAGGTCATGGATCGAGTTCAGAGAAAAAACAAAAGCAAAACCAAACCTACCAAAAAAT AAAAATCCCAAAGAAAAAATAAAGAAAAAAACAGCATGAATACTTCCTGCCATGTTAAGTGGCCAATATGTCAGAAA CAGCACTGAGTTACAGATAAAGATGTCTAAACTACAGTGACATCCCAGCTGTCACAGTGTGTGGACTATTAGTCAAT AAAACAGTCCCTGCCTCTTAAGAGTTGTTTTCCATGCAAATACATGTCTTATGTCTTAGAATAAGATTCCCTAAGAA GTGAACCTAGCATTTATACAAGATAATTAATTCTAATCCATAGTATCTGGTAAAGAGCATTCTACCATCATCTTTAC CGAGCATAGAAGAGCTACACCAAAACCCTGGGTCATCAGCCAGCACATACACTTATCCAGTGATAAATACACATCAT CGGGTGCCTACATACATACCTGAATATAAAAAAAATACTTTTGCTGAGATGAAACAGGCGTGATTTATTTCAAATAG GTACGGATAAGTAGATATTGAAGTAAGGATTCAGTCTTATATTATATTACATAACATTAATCTATTCCTGCACTGAA ACTGTTGCTTTATAGGATTTTTCACTACACTAATGAGAACTTAAGAGATAATGGCCTAAAACCACAGAGAGTATATT CAAGAATAAGTATAGCACTTCTTATTTGGAAACCAATGCTTACTAAATGAGACTAAGACGTGTCCCATCAAAAATCC TGGACCTATGCCTAAAACACATTTCACAATCCCTGAACTTTTCAAAAATTGGTACATGCTTTAACTTTAAACTACAG GCCTCACTGGAGCTACAGACAAGAAGGTGAAAAACGGCTGACAAAAGAAGTCCTGGTATCTTCTATGGTGGGAGAAG AAAACTAGCTAAAGGGAAGAATAAATTAGAGAAAAATTGGAATGACTGAATCGGAACAAGGCAAAGGCTATAAAAAA AATTAAGCAGCAGTATCCTCTTGGGGGCCCCTTCCCCACACTATCTCAATGCAAATATCTGTCTGAAACGGTTCCTG GCTAAACTCCACCCATGGGTTGGCCAGCCTTGCCTTGACCAATAGCCTTGACAAGGCAAACTTGACCAATAGTCTTA GAGTATCCAGTGAGGCCAGGGGCCGGCGGCTGGCTAGGGATGAAGAATAAAAGGAAGCACCCTTCAGCAGTTCCACA CACTCGCTTCTGGAACGTCTGAGGTTATCAATAAGCTCCTAGTCCAGACGCCATGGGTCATTTCACAGAGGAGGACA AGGCTACTATCACAAGCCTGTGGGGCAAGGTGAATGTGGAAGATGCTGGAGGAGAAACCCTGGGAAGGTAGGCTCTG GTGACCAGGACAAGGGAGGGAAGGAAGGACCCTGTGCCTGGCAAAAGTCCAGGTCGCTTCTCAGGATTTGTGGCACC TTCTGACTGTCAAACTGTTCTTGTCAATCTCACAGGCTCCTGGTTGTCTACCCATGGACCCAGAGGTTCTTTGACAG CTTTGGCAACCTGTCCTCTGCCTCTGCCATCATGGGCAACCCCAAAGTCAAGGCACATGGCAAGAAGGTGCTGACTT CCTTGGGAGATGCCATAAAGCACCTGGATGATCTCAAGGGCACCTTTGCCCAGCTGAGTGAACTGCACTGTGACAAG CTGCATGTGGATCCTGAGAACTTCAAGGTGAGTCCAGGAGATGTTTCAGCACTGTTGCCTTTAGTCTCGAGGCAACT TAGACAACTGAGTATTGATCTGAGCACAGCAGGGTGTGAGCTGTTTGAAGATACTGGGGTTGGGAGTGAAGAAACTG CAGAGGACTAACTGGGCTGAGACCCAGTGGCAATGTTTTAGGGCCTAAGGAGTGCCTCTGAAAATCTAGATGGACAA CTTTGACTTTGAGAAAAGAGAGGTGGAAATGAGGAAAATGACTTTTCTTTATTAGATTTCGGTAGAAAGAACTTTCA CCTTTCCCCTATTTTTGTTATTCGTTTTAAAACATCTATCTGGAGGCAGGACAAGTATGGTCGTTAAAAAGATGCAG GCAGAAGGCATATATTGGCTCAGTCAAAGTGGGGAACTTTGGTGGCCAAACATACATTGCTAAGGCTATTCCTATAT CAGCTGGACACATATAAAATGCTGCTAATGCTTCATTACAAACTTATATCCTTTAATTCCAGATGGGGGCAAAGTAT GTCCAGGGGTGAGGAACAATTGAAACATTTGGGCTGGAGTAGATTTTGAAAGTCAGCTCTGTGTGTGTGTGTGTGTG TGTGCGCGCGTGTGTTTGTGTGTGTGTGAGAGCGTGTGTTTCTTTTAACGTTTTCAGCCTACAGCATACAGGGTTCA TGGTGGCAAGAAGATAACAAGATTTAAATTATGGCCAGTGACTAGTGCTGCAAGAAGAACAACTACCTGCATTTAAT GGGAAAGCAAAATCTCAGGCTTTGAGGGAAGTTAACATAGGCTTGATTCTGGGTGGAAGCTTGGTGTGTAGTTATCT GGAGGCCAGGCTGGAGCTCTCAGCTCACTATGGGTTCATCTTTATTGTCTCCTTTCATCTCAACAGCTCCTGGGAAA TGTGCTGGTGACCGTTTTGGCAATCCATTTCGGCAAAGAATTCACCCCTGAGGTGCAGGCTTCCTGGCAGAAGATGG TGACTGGAGTGGCCAGTGCCCTGTCCTCCAGATACCACTGAGCTCACTGCCCATGATGCAGAGCTTTCAAGGATAGG CTTTATTCTGCAAGCAATACAAATAATAAATCTATTCTGCTAAGAGATCACACATGGTTGTCTTCAGTTCTTTTTTT TATGTCTTTTTAAATATATGAGCCACAAAGGGTTTTATGTTGAGGGATGTGTTTATGTGTATTTATACATGGCTATG TGTGTTTGTGTCATGTGCACACTCCACACTTTTTTGTTTACGTTAGATGTGGGTTTTGATGAGCAAATAAAAGAACT AGGCAATAAAGAAACTTATACATGGGAGCGTCTGCAAGTGGGAGTAAAAGGTGCAGGAGAAATCTGGTTGGAAGAAA GACCTCTATAGGACAGGACTCCTCAGAAACAGATGTTTTGGAAGAGATGGGGAAAGGTTCAGTGAAGGGGGCTGAAC CCCCTTCCCTGGATTGCAGCACAGCAGCGAGGAAGGGGCTCAACGAAGAAAAAGTGTTCCAAGCTTTAGGAAGTCAA GGTTTAGGCAGGGATAGCCATTCTATTTTATTAGGGGCAATACTATTTCCAACGGCATCTGGCTTTTCTCAGCCCTT GTGAGGCTCTACGGGGAGGTTGAGGTGTTAGAGATCAGAGCAGGAAACAGGTTTTTCTTTCCACGGTAACTACAATG AAGTGATCCTTACTTTACTAAGGAACTTTTTCATTTTAAGTGTTGACGCATGCCTAAAGAGGTGAAATTAATCCCAT ACCCTTAAGTCTACAGACTGGTCACAGCATTTCAAGGAGGAGACCTCATTGTAAGCTTCTAGGGAGGTGGGGACCTA GGTGAAGGAAATGAGCCAGCAGAAGCTCACAAGTCAGCATCAGCGTGTCATGTCTCAGCAGCAGAACAGCACGGTCA GATGAAAATATAGTGTGAAGAATTTGTATAACATTAATTGAGAAGGCAGATTCACTGGAGTTCTTATATAATTGAAA GTTAATGCACGTTAATAAGCAAGAGTTTAGTTTAATGTGATGGTGTTATGAACTTAACGCTTGTGTCTCCAGAAAAT TCACATGCTGAATCCCCAACTCCCAATTGGCTCCATTTGTGGGGGAGGCTTTGGAAAAGTAATCAGGTTTAGAGGAG CTCATGAGAGCAGATCCCCATCATAGAATTATTTTCCTCATCAGAAGCAGAGAGATTAGCCATTTCTCTTCCTTCTG GTGAGGACACAGTGGGAAGTCAGCCACCTGCAACCCAGGAAGAGAGCCCTGACCAGGAACCAGCAGAAAAGTGAGAA AAAATCCTGTTGTTGAAGTCACCCAGTCTATGCTATTTTGTTATAGCACCTTGCACTAAGTAAGGCAGATGAAGAAA GAGAAAAAAATAAGCTTCGGTGTTCAGTGGATTAGAAACCATGTTTATCTCAGGTTTACAAATCTCCACTTGTCCTC TGTGTTTCAGAATAAAATACCAACTCTACTACTCTCATCTGTAAGATGCAAATAGTAAGCCTGATCCCTTCTGTCTA ACTTCGAATTCTATTTTTTCTTCAACGTACTTTAGGCTTGTAATGTGTTTATATACAGTGAAATGTCAAGTTCTTTC TTTATATTTCTTTCTTTCTTTTTTTTCCTCAGCCTCAGAGTTTTCCACATGCCCTTCCTACCTTCAGGAACTTCTTT CTCCAAACGTCTTCTGCCTGGCCTCCATTCAAATCATAAAGGACCCACTTCAAATGCCATCACTCACTACCATTTCA CAATTCGCACTTTCTTTCTTTGTCCTTTTTTTTTTTAGTAAAACAAGTTTATAAAAAATTGAAGGAATAAATGAATG GCTACTTCATAGGCAGAGTAGACACAAGGGCTACTGGTTGCCGATTTTTATTGTTATTTTTCAATAGTATGCTAAAC AAGGGGTAGATTATTTATGCTGCCCATTTTTAGACCATAAAAGATAACTTCCTGATGTTGCCATGGCATTTTTTTTC CTTTTAATTTTATTTCATTTCATTTTAATTTCGAAGGTACATGTGCAGGATGTGCAGGCTTGTTACATGGGTAAATG TGTGTCTTTCTGGCCTTTTAGCCATCTGTATCAATGAGCAGATATAAGCTTTACACAGGATCATGAAGGATGAAAGA ATTTCACCAATATTATAATAATTTCAATCAACCTGATAGCTTAGGGGATAAACTAATTTGAAGATACAGCTTGCCTC CGATAAGCCAGAATTCCAGAGCTTCTGGCATTATAATCTAGCAAGGTTAGAGATCATGGATCACTTTCAGAGAAAAA CAAAAACAAACTAACCAAAAGCAAAACAGAACCAAAAAACCTCCATAAATACTTCCTACCCAGTTAATGGTCCAATA TGTCAGAAACAGCACTGTGTTAGAAATAAAGCTGTCTAAAGTACACTAATATTCGAGTTATAATAGTGTGTGGACTA TTAGTCAATAAAAACAACCCTTGCCTCTTTAGAGTTGTTTTCCATGTACACGCACATCTTATGTCTTAGAGTAAGAT TCCCTGAGAAGTGAACCTAGCATTTATACAAGATAATTAATTCTAATCCACAGTACCTGCCAAAGAACATTCTACCA TCATCTTTACTGAGCATAGAAGAGCTACGCCAAAACCCTGGGTCATCAGCCAGCACACACACTTATCCAGTGGTAAA TACACATCATCTGGTGTATACATACATACCTGAATATGGAATCAAATATTTTTCTAAGATGAAACAGTCATGATTTA TTTCAAATAGGTACGGATAAGTAGATATTGAGGTAAGCATTAGGTCTTATATTATGTAACACTAATCTATTACTGCG CTGAAACTGTGGTCTTTATGAAAATTGTTTTCACTACACTATTGAGAAATTAAGAGATAATGGCAAAAGTCACAAAG AGTATATTCAAAAAGAAGTATAGCACTTTTTCCTTAGAAACCACTGCTAACTGAAAGAGACTAAGATTTGTCCCGTC AAAAATCCTGGACCTATGCCTAAAACACATTTCACAATCCCTGAACTTTTCAAAAATTGGTACATGCTTTAGCTTTA AACTACAGGCCTCACTGGAGCTACAGACAAGAAGGTAAAAAACGGCTGACAAAAGAAGTCCTGGTATCCTCTATGAT GGGAGAAGGAAACTAGCTAAAGGGAAGAATAAATTAGAGAAAAACTGGAATGACTGAATCGGAACAAGGCAAAGGCT ATAAAAAAAATTAAGCAGCAGTATCCTCTTGGGGGCCCCTTCCCCACACTATCTCAATGCAAATATCTGTCTGAAAC GGTCCCTGGCTAAACTCCACCCATGGGTTGGCCAGCCTTGCCTTGACCAATAGCCTTGACAAGGCAAACTTGACCAA TAGTCTTAGAGTATCCAGTGAGGCCAGGGGCCGGCGGCTGGCTAGGGATGAAGAATAAAAGGAAGCACCCTTCAGCA GTTCCACACACTCGCTTCTGGAACGTCTGAGATTATCAATAAGCTCCTAGTCCAGACGCCATGGGTCATTTCACAGA GGAGGACAAGGCTACTATCACAAGCCTGTGGGGCAAGGTGAATGTGGAAGATGCTGGAGGAGAAACCCTGGGAAGGT AGGCTCTGGTGACCAGGACAAGGGAGGGAAGGAAGGACCCTGTGCCTGGCAAAAGTCCAGGTCGCTTCTCAGGATTT GTGGCACCTTCTGACTGTCAAACTGTTCTTGTCAATCTCACAGGCTCCTGGTTGTCTACCCATGGACCCAGAGGTTC TTTGACAGCTTTGGCAACCTGTCCTCTGCCTCTGCCATCATGGGCAACCCCAAAGTCAAGGCACATGGCAAGAAGGT GCTGACTTCCTTGGGAGATGCCATAAAGCACCTGGATGATCTCAAGGGCACCTTTGCCCAGCTGAGTGAACTGCACT GTGACAAGCTGCATGTGGATCCTGAGAACTTCAAGGTGAGTCCAGGAGATGTTTCAGCACTGTTGCCTTTAGTCTCG AGGCAACTTAGACAACTGAGTATTGATCTGAGCACAGCAGGGTGTGAGCTGTTTGAAGATACTGGGGTTGGGAGTGA AGAAACTGCAGAGGACTAACTGGGCTGAGACCCAGTGGCAATGTTTTAGGGCCTAAGGAGTGCCTCTGAAAATCTAG ATGGACAACTTTGACTTTGAGAAAAGAGAGGTGGAAATGAGGAAAATGACTTTTCTTTATTAGATTTCGGTAGAAAG AACTTTCACCTTTCCCCTATTTTTGTTATTCGTTTTAAAACATCTATCTGGAGGCAGGACAAGTATGGTCGTTAAAA AGATGCAGGCAGAAGGCATATATTGGCTCAGTCAAAGTGGGGAACTTTGGTGGCCAAACATACATTGCTAAGGCTAT TCCTATATCAGCTGGACACATATAAAATGCTGCTAATGCTTCATTACAAACTTATATCCTTTAATTCCAGATGGGGG CAAAGTATGTCCAGGGGTGAGGAACAATTGAAACATTTGGGCTGGAGTAGATTTTGAAAGTCAGCTCTGTGTGTGTG TGTGTGTGTGTGTGTGTCAGCGTGTGTTTCTTTTAACGTCTTCAGCCTACAACATACAGGGTTCATGGTGGGAAGAA GATAGCAAGATTTAAATTATGGCCAGTGACTAGTGCTTGAAGGGGAACAACTACCTGCATTTAATGGGAAGGCAAAA TCTCAGGCTTTGAGGGAAGTTAACATAGGCTTGATTCTGGGTGGAAGCTGGGTGTGTAGTTATCTGGAGGCCAGGCT GGAGCTCTCAGCTCACTATGGGTTCATCTTTATTGTCTCCTTTCATCTCAACAGCTCCTGGGAAATGTGCTGGTGAC CGTTTTGGCAATCCATTTCGGCAAAGAATTCACCCCTGAGGTGCAGGCTTCCTGGCAGAAGATGGTGACTGCAGTGG CCAGTGCCCTGTCCTCCAGATACCACTGAGCCTCTTGCCCATGATTCAGAGCTTTCAAGGATAGGCTTTATTCTGCA AGCAATACAAATAATAAATCTATTCTGCTGAGAGATCACACATGATTTTCTTCAGCTCTTTTTTTTACATCTTTTTA AATATATGAGCCACAAAGGGTTTATATTGAGGGAAGTGTGTATGTGTATTTCTGCATGCCTGTTTGTGTTTGTGGTG TGTGCATGCTCCTCATTTATTTTTATATGAGATGTGCATTTTGATGAGCAAATAAAAGCAGTAAAGACACTTGTACA CGGGAGTTCTGCAAGTGGGAGTAAATGGTGTTGGAGAAATCCGGTGGGAAGAAAGACCTCTATAGGACAGGACTTCT CAGAAACAGATGTTTTGGAAGAGATGGGAAAAGGTTCAGTGAAGACCTGGGGGCTGGATTGATTGCAGCTGAGTAGC AAGGATGGTTCTTAATGAAGGGAAAGTGTTCCAAGCTTTAGGAATTCAAGGTTTAGTCAGGTGTAGCAATTCTATTT TATTAGGAGGAATACTATTTCTAATGGCACTTAGCTTTTCACAGCCCTTGTGGATGCCTAAGAAAGTGAAATTAATC CCATGCCCTCAAGTGTGCAGATTGGTCACAGCATTTCAAGGGAGAGACCTCATTGTAAGACTCTGGGGGAGGTGGGG ACTTAGGTGTAAGAAATGAATCAGCAGAGGCTCACAAGTCAGCATGAGCATGTTATGTCTGAGAAACAGACCAGCAC TGTGAGATCAAAATGTAGTGGGAAGAATTTGTACAACATTAATTGGAAGGTTTACTTAATGGAATTTTTGTATAGTT GGATGTTAGTGCATCTCTATAAGTAAGAGTTTAATATGATGGTGTTACGGACCTGGTGTTTGTGTCTCCTCAAAATT CACATGCTGAATCCCCAACTCCCAACTGACCTTATCTGTGGGGGAGGCTTTTGAAAAGTAATTAGGTTTAGCTGAGC TCATAAGAGCAGATCCCCATCATAAAATTATTTTCCTTATCAGAAGCAGAGAGACAAGCCATTTCTCTTTCCTCCCG GTGAGGACACAGTGAGAAGTCCGCCATCTGCAATCCAGGAAGAGAACCCTGACCACGAGTCAGCCTTCAGAAATGTG AGAAAAAACTCTGTTGTTGAAGCCACCCAGTCTTTTGTATTTTGTTATAGCACCTTACACTGAGTAAGGCAGATGAA GAAGGAGAAAAAAATAAGCTTGGGTTTTGAGTGAACTACAGACCATGTTATCTCAGGTTTGCAAAGCTCCCCTCGTC CCCTATGTTTCAGCATAAAATACCTACTCTACTACTCTCATCTATAAGACCCAAATAATAAGCCTGCGCCCTTCTCT CTAACTTTGATTTCTCCTATTTTTACTTCAACATGCTTTACTCTAGCCTTGTAATGTCTTTACATACAGTGAAATGT AAAGTTCTTTATTCTTTTTTTCTTTCTTTCTTTTTTCTCCTCAGCCTCAGAATTTGGCACATGCCCTTCCTTCTTTC AGGAACTTCTCCAACATCTCTGCCTGGCTCCATCATATCATAAAGGTCCCACTTCAAATGCAGTCACTACCGTTTCA GGATATGCACTTTCTTTCTTTTTTGTTTTTTGTTTTTTTTAAGTCAAAGCAAATTTCTTGAGAGAGTAAAGAAATAA ACGAATGACTACTGCATAGGCAGAGCAGCCCCGAGGGCCGCTGGTTGTTCCTTTTATGGTTATTTCTTGATGATATG TTAAACAAGTTTTGGATTATTTATGCCTTCTCTTTTTAGGCCATATAGGGTAACTTTCTGACATTGCCATGGCATGT TTCTTTTAATTTAATTTACTGTTACCTTAAATTCAGGGGTACACGTACAGGATATGCAGGTTTGTTTTATAGGTAAA AGTGTGCCATGGTTTTAATGGGTTTTTTTTTTCTTGTAAAGTTGTTTAAGTTTCTTGTTTACTCTGGATATTGGCCT TTGTCAGAAGAATAGATTGGAAAATCTTTTTCCCATTCTGTAGATTGTCTTTCGCTCTGATGGTAGTTTCTTTTGCT GAGCAGGAGCTCTTTAGTTTAATTAGATTCCATTGGTCAATTTTTGCTTTTGCTGCAATTGCTTTTCACGCTTTCAT CATGAAATCTGTGCCCGTGTTTATATCATGAATAGTATTGCCTTGATTTTTTTCTAGGCTTTTTATAGTTTGGGGTT TTTCATTTAAGTCTCTAATCCATCCGGAGTTAATTTTGGATAAGGTATAAGGAAGGAGTCCAGTTTCATTTTTCAGC ATATGGCTAGCCAGTTCTCCCCCATCATTTATTAAATTGAAAATCCTTTCCCCATTGCTTGCTTTTGTCAGGTTTCT AAAAGACAGATGGTTGTAGGTACAATATGCAGTTTCTTCAAGTCATATAATACCATCTGAAATCTCTTATTAATTCA TTTCTTTTAGTATGTATGCTGGTCTCCTCTGCTCACTATAGTGAGGGCACCATTAGCCAGAGAATCTGTCTGTCTAG TTCATGTAAGATTCTCAGAATTAAGAAAAATGGATGGCATATGAATGAAACTTCATGGATGACATATGGAATCTAAT GTGTATTTGTTGAATTAATGCATAAGATGCAACAAGGGAAAGGTTGACAACTGCAGTGATAACCTGGTATTGATGAT ATAAGAGTCTATAGATCACAGTAGAAGCAATAATCATGGAAAACAATTGGAAATGGGGAACAGCCACAAACAAGAAA GAATCAATACTACCAGGAAAGTGACTGCAGGTCACTTTTCCTGGAGCGGGTGAGAGAAAAGTGGAAGTTGCAGTAAC TGCCGAATTCCTGGTTGGCTGATGGAAAGATGGGGCAACTGTTCACTGGTACGCAGGGTTTTAGATGTATGTACCTA AGGATATGAGGTATGGCAATGAACAGAAATTCTTTTGGGAATGAGTTTTAGGGCCATTAAAGGACATGACCTGAAGT TTCCTCTGAGGCCAGTCCCCACAACTCAATATAAATGTGTTTCCTGCATATAGTCAAAGTTGCCACTTCTTTTTCTT CATATCATCGATCTCTGCTCTTAAAGATAATCTTGGTTTTGCCTCAAACTGTTTGTCACTACAAACTTTCCCCATGT TCCTAAGTAAAACAGGTAACTGCCTCTCAACTATATCAAGTAGACTAAAATATTGTGTCTCTAATATCAGAAATTCA GCTTTAATATATTGGGTTTAACTCTTTGAAATTTAGAGTCTCCTTGAAATACACATGGGGGTGATTTCCTAAACTTT ATTTCTTGTAAGGATTTATCTCAGGGGTAACACACAAACCAGCATCCTGAACCTCTAAGTATGAGGACAGTAAGCCT TAAGAATATAAAATAAACTGTTCTTCTCTCTGCCGGTGGAAGTGTGCCCTGTCTATTCCTGAAATTGCTTGTTTGAG ACGCATGAGACGTGCAGCACATGAGACACGTGCAGCAGCCTGTGGAATATTGTCAGTGAAGAATGTCTTTGCCTGAT TAGATATAAAGACAAGTTAAACACAGCATTAGACTATAGATCAAGCCTGTGCCAGACACAAATGACCTAATGCCCAG CACGGGCCACGGAATCTCCTATCCTCTTGCTTGAACAGAGCAGCACACTTCTCCCCCAACACTATTAGATGTTCTGG CATAATTTTGTAGATATGTAGGATTTGACATGGACTATTGTTCAATGATTCAGAGGAAATCTCCTTTGTTCAGATAA GTACACTGACTACTAAATGGATTAAAAAACACAGTAATAAAACCCAGTTTTCCCCTTACTTCCCTAGTTTGTTTCTT ATTCTGCTTTCTTCCAAGTTGATGCTGGATAGAGGTGTTTATTTCTATTCTAAAAAGTGATGAAATTGGCCGGGCGC GGTGGCTCACACCTGTAATCCCAGCACTTTGGGAGGCTGAGGTGGGCGGATCACGAGGTCAGGAGATCAAGACCATC CTGGCTAACATGGTGAAACCCCATCTCTACTAAAAATACAAAAAATTAGCCAGAGACGGTGGCGGGTGCCTGTAGTC CCAGCTACTCGGGAGGCTGAGGCAGGAGAATGGCGTGAACCTGGGAGGCAGAGCTGCAGTGAGCAGAGATCGCGCCA CTGCACACTCCAGCCTGGGTGACAAAGCGAGACTCCATCTCAAAAAAAAAAAAAAAAAAAAAAAGAAAGAAAGAAAG AAAAAAAAAGTGATGAAATTGTGTATTCAATGTAGTCTCAAGAGAATTGAAAACCAAGAAAGGCTGTGGCTTCTTCC ACATAAAGCCTGGATGAATAACAGGATAACACGTTGTTACATTGTCACAACTCCTGATCCAGGAATTGATGGCTAAG ATATTCGTAATTCTTATCCTTTTCAGTTGTAACTTATTCCTATTTGTCAGCATTCAGGTTATTAGCGGCTGCTGGCG AAGTCCTTGAGAAATAAACTGCACACTGGATGGTGGGGGTAGTGTAGGAAAATGGAGGGGAAGGAAGTAAAGTTTCA AATTAAGCCTGAACAGCAAAGTTCCCCTGAGAAGGCCACCTGGATTCTATCAGAAACTCGAATGTCCATCTTGCAAA ACTTCCTTGCCCAAACCCCACCCCTGGAGTCACAACCCACCCTTGACCAATAGATTCATTTCACTGAGGGAGGCAAA GGGCTGGTCAATAGATTCATTTCACTGGGAGAGGCAAAGGGCTGGGGGCCAGAGAGGAGAAGTAAAAAGCCACACAT GAAGCAGCAATGCAGGCATGCTTCTGGCTCATCTGTGATCACCAGGAAACTCCCAGATCTGACACTGTAGTGCATTT CACTGCTGACAAGAAGGCTGCTGCCACCAGCCTGTGAAGCAAGGTTAAGGTGAGAAGGCTGGAGGTGAGATTCTGGG CAGGTAGGTACTGGAAGCCGGGACAAGGTGCAGAAAGGCAGAAAGTGTTTCTGAAAGAGGGATTAGCCCGTTGTCTT ACATAGTCTGACTTTGCACCTGCTCTGTGATTATGACTATCCCACAGTCTCCTGGTTGTCTACCCATGGACCTAGAG GTACTTTGAAAGTTTTGGATATCTGGGCTCTGACTGTGCAATAATGGGCAACCCCAAAGTCAAGGCACATGGCAAGA AGGTGCTGATCTCCTTCGGAAAAGCTGTTATGCTCACGGATGACCTCAAAGGCACCTTTGCTACACTGAGTGACCTG CACTGTAACAAGCTGCACGTGGACCCTGAGAACTTCCTGGTGAGTAGTAAGTACACTCACGCTTTCTTCTTTACCCT TAGATATTTGCACTATGGGTACTTTTGAAAGCAGAGGTGGCTTTCTCTTGTGTTATGAGTCAGCTATGGGATATGAT ATTTCAGCAGTGGGATTTTGAGAGTTATGTTGCTGTAAATAACATAACTAAAATTTGGTAGAGCAAGGACTATGAAT AATGGAAGGCCACTTACCATTTGATAGCTCTGAAAAACACATCTTATAAAAAATTCTGGCCAAAATCAAACTGAGTG TTTTGGATGAGGGAACAGAAGTTGAGATAGAGAAAATAACATCTTTCCTTTGGTCAGCGAAATTTTCTATAAAAATT AATAGTCACTTTTCTGCATAGTCCTGGAGGTTAGAAAAAGATCAACTGAACAAAGTAGTGGGAAGCTGTTAAAAGAG GATTGTTTCCCTCCGAATGATGATGGTATACTTTTGTACGCATGGTACAGGATTCTTTGTTATGAGTGTTTGGGAAA ATTGTATGTATGTATGTATGTATGTGATGACTGGGGACTTATCCTATCCATTACTGTTCCTTGAAGTACTATTATCC TACTTTTTAAAAGGACGAAGTCTCTAAAAAAAAAATGAAACAATCACAATATGTTGGGGTAGTGAGTTGGCATAGCA AGTAAGAGAAGGATAGGACACAATGGGAGGTGCAGGGCTGCCAGTCATATTGAAGCTGATATCTAGCCCATAATGGT GAGAGTTGCTCAAACTCTGGTCAAAAAGGATGTAAGTGTTATATCTATTTACTGCAAGTCCAGCTTGAGGCCTTCTA TTCACTATGTACCATTTTCTTTTTTATCTTCACTCCCTCCCCAGCTCTTAGGCAACGTGATATTGATTGTTTTGGCA ACCCACTTCAGCGAGGATTTTACCCTACAGATACAGGCTTCTTGGCAGTAACTAACAAATGCTGTGGTTAATGCTGT AGCCCACAAGACCACTGAGTTCCCTGTCCACTATGTTTGTACCTATGTCCCAAAATCTCATCTCCTTTAGATGGGGG AGGTTGGGGAGAAGAGCAGTATCCTGCCTGCTGATTCAGTTCCTGCATGATAAAAATAGAATAAAGAAATATGCTCT CTAAGAAATATCATTGTACTCTTTTTCTGTCTTTATATTTTACCCTGATTCAGCCAAAAGGACGCACTATTTCTGAT GGAAATGAGAATGTTGGAGAATGGGAGTTTAAGGACAGAGAAGATACTTTCTTGCAATCCTGCAAGAAAAGAGAGAA CTCGTGGGTGGATTTAGTGGGGTAGTTACTCCTAGGAAGGGGAAATCGTCTCTAGAATAAGACAATGTTTTTACAGA AAGGGAGGTCAATGGAGGTACTCTTTGGAGGTGTAAGAGGATTGTTGGTAGTGTGTAGAGGTATGTTAGGACTCAAA TTAGAAGTTCTGTATAGGCTATTATTTGTATGAAACTCAGGATATAGCTCATTTGGTGACTGCAGTTCACTTCTACT TATTTTAAACAACATATTTTTTATGATTTATAATGAAGTGGGGATGGGGCTTCCTAGAGACCAATCAAGGGCCAAAC CTTGAACTTTCTCTTAACGTCTTCAATGGTATTAATAGAGAATTATCTCTAAGGCATGTGAACTGGCTGTCTTGGTT TTCATCTGTACTTCATCTGCTACCTCTGTGACCTGAAACATATTTATAATTCCATTAAGCTGTGCATATGATAGATT TATCATATGTATTTTCCTTAAAGGATTTTTGTAAGAACTAATTGAATTGATACCTGTAAAGTCTTTATCACACTACC CAATAAATAATAAATCTCTTTGTTCAGCTCTCTGTTTCTATAAATATGTACAAGTTTTATTGTTTTTAGTGGTAGTG ATTTTATTCTCTTTCTATATATATACACACACATGTGTGCATTCATAAATATATACAATTTTTATGAATAAAAAATT ATTAGCAATCAATATTGAAAACCACTGATTTTTGTTTATGTGAGCAAACAGCAGATTAAAAGGCTGAGATTTAGGAA ACAGCACGTTAAGTCAAGTTGATAGAGGAGAATATGGACATTTAAAAGAGGCAGGATGATATAAAATTAGGGAAACT GGATGCAGAGACCAGATGAAGTAAGAAAAATAGCTATCGTTTTGAGCAAAAATCACTGAAGTTTCTTGCATATGAGA GTGACATAATAAATAGGGAAACGTAGAAAATTGATTCACATGTATATATATATATAGAACTGATTAGACAAAGTCTA ACTTGGGTATAGTCAGAGGAGCTTGCTGTAATTATATTGAGGTGATGGATAAAGAACTGAAGTTGATGGAAACAATG AAGTTAAGAAAAAAAATCGAGTAAGAGACCATTGTGGCAGTGATTGCACAGAACTGGAAAACATTGTGAAACAGAGA GTCAGAGATGACAGCTAAAATCCCTGTCTGTGAATGAAAAGAAGGAAATTTATTGACAGAACAGCAAATGCCTACAA GCCCCCTGTTTGGATCTGGCAATGAACGTAGCCATTCTGTGGCAATCACTTCAAACTCCTGTACCCAAGACCCTTAG GAAGTATGTAGCACCCTCAAACCTAAAACCTCAAAGAAAGAGGTTTTAGAAGATATAATACCCTTTCTTCTCCAGTT TCATTAATCCCAAAACCTCTTTCTCAAAGTATTTCCTCTATGTGTCCACCCCAAAGAGCTCACCTCACCATATCTCT TGAGTGGGAGCACATAGATAGGCGGTGCTACCATCTAACAGCTTCTGAAATTCCTTTGTCATATTTTTGAGTCCCCA CTAATAACCCACAAAGCAGAATAAATACCAGTTGCTCATGTACAATAATCACTCAACTGCTGTCTTGTAGCATACAT TAATTAAGCACATTCTTTGAATAATTACTGTGTCCAAACAATCACACTTTAAAATCTCACACTTGTGCTATCCCTTG CCCTTCTGAATGTCACTCTGTATTTTAAATGAAGAGATGAGGGTTGAATTTCCTGTGTTACTTATTGTTCATTTCTC GATGAGGAGTTTTCACATTCACCTTTACTGGAAAACACATAAGTACACATCTTACAGGAAAAATATACCAAACTGAC ATGTAGCATGAATGCTTGTGCATGTAGTCATATAAAATCTTGTAGCAATGTAAACATTCTCTGATATACACATACAG ATGTGTCTATATGTCTACACAATTTCTTATGCTCCATGAACAAACATTCCATGCACACATAAGAACACACACTGTTA CAGATGCATACTTGAGTGCATTGACAAAATTACCCCAGTCAATCTAGAGAATTTGGATTTCTGCATTTGACTCTGTT AGCTTTGTACATGCTGTTCATTTACTCTGGGTGATGTCTTTCCCTCATTTTGCCTTGTCTATCTTGTACTCATACTT TAAGTCCTAACTTATATGTTATCTCAACTAAGAAGCTATTTTTTTTTAATTTTAACTGGGCTTAAAGCCCTGTCTAT AAACTCTGCTACAATTATGGGCTCTTTCTTATAATATTTAGTGTTTTTCCTACTAATGTACTTAATCTGCTCATTGT ATATTCCTACCACTAAATTTTAACCTCTTTTATGGTAGAGACATTGTCTTGTAAACTCTTATTTCCCTAGTATTTGG AGATGAAAAAAAAGATTAAATTATCCAAAATTAGATCTCTCTTTTCTACATTATGAGTATTACACTATCCATAGGGA AGTTTGTTTGAGACCTAAACTGAGGAACCTTTGGTTCTAAAATGACTATGTGATATCTTAGTATTTATAGGTCATGA GGTTCCTTCCTCTGCCTCTGCTATAGTTTGATTAGTCAGCAAGCATGTGTCATGCATTTATTCACATCAGAATTTCA TACACTAATAAGACATAGTATCAGAAGTCAGTTTATTAGTTATATCAGTTAGGGTCCATCAAGGAAAGGACAAACCA TTATCAGTTACTCAACCTAGAATTAAATACAGCTCTTAATAGTTAATTATCCTTGTATTGGAAGAGCTAAAATATCA AATAAAGGACAGTGCAGAAATCTAGATGTTAGTAACATCAGAAAACCTCTTCCGCCATTAGGCCTAGAAGGGCAGAA GGAGAAAATGTTTATACCACCAGAGTCCAGAACCAGAGCCCATAACCAGAGGTCCACTGGATTCAGTGAGCTAGTGG GTGCTCCTTGGAGAGAGCCAGAACTGTCTAATGGGGGCATCAAAGTATCAGCCATAAAAAACCATAAAAAAGACTGT CTGCTGTAGGAGATCCGTTCAGAGAGAGAGAGAGACCAGAAATAATCTTGCTTATGCTTTCCCTCAGCCAGTGTTTA CCATTGCAGAATGTACATGCGACTGAAAGGGTGAGGAAACCTGGGAAATGTCAGTTCCTCAAATACAGAGAACACTG AGGGAAGGATGAGAAATAAATGTGAAAGCAGACATGAATGGTAATTGACAGAAGGAAACTAGGATGTGTCCAGTAAA TGAATAATTACAGTGTGCAGTGATTATTGCAATGATTAATGTATTGATAAGATAATATGAAAACACAGAATTCAAAC AGCAGTGAACTGAGATTAGAATTGTGGAGAGCACTGGCATTTAAGAATGTCACACTTAGAATGTGTCTCTAGGCATT GTTCTGTGCATATATCATCTCAATATTCATTATCTGAAAATTATGAATTAGGTACAAAGCTCAAATAATTTATTTTT TCAGGTTAGCAAGAACTTTTTTTTTTTTTTTTTCTGAGATGGAGCATTGCTATGGTTGCCCAGGCTGGAGTGCAATG GCATGATCCAGGCTCACTGCAACATCTGCCTCCCAGGTTCAAGCGATTCTCCTGCCTCAGCCTCCCAAGTAGCTGGC ATTACAGGCATGTGCCACCACCATGCCTGGCTAATTTTCTATTTTTAGTAGATAGGGGGTTTCACCATGTTGGTCAG GCTGATCTCGAACTCCTAACATCAGGTGATCCACCCTCCTCGGCCTCTGAATGTACTGGGATCACAGGCGTGAGCCA CCACACCCAGCCAAGAATGTGAATTTTGTAGAAGGATATAACCCATATTTCTCTGACCCTAGAGTCCTTAGTATACC TCCCATACCATGTGGCTCATCCTCCTTACATACATTTCCCATCTTTCACCCTACCTTTTCCTTTTTGTTTCAGCTTT TCACTGTGTGTCAAAATCTAGAACCTTATCTCCTACCTGCTCTGAAACCAACAGCAAGTTGACTTCCATTCTAACCC ACATTGGCATTACACTAATTAAAATCGATACTGAGTTCTAAAATCATCTGGGATTTTGGGGACTATGTCTTACTTCA TACTTCCTTGAGATTTCACATTAAATGTTGGTGTTCATTAAAGGTCCTTCATTTAACTTTGTATTCATCACACTCTT GGATTCACAGTTATATCTAAACTCTTATATATAGCCTGTATAATCCCAATTCCCAAGTCTGATTTCTAACCTCTGAC CTCCAACCTCAGTGCCAAACCCATATATCAAACAATGTACTGGGCTTATTTATATAGATGTCCTATAGGCACCTCAG ACTCAGCATGGGTATTTCACTTGTTATACTAAAACTGTTTCTCTTCCAGTGTTTTCCATTTTAGTCATTAGATAGCT ACTTGCCCATTCACCAAGGTCACAGATTAAAATCATTTCCCTACCTCTAATCAACAGTTCAATTCTGCTTCAATTTG TCCCTATCTATTAATCACCACTCTTACTGCCCAGTCAGGTCCTCATTGTTTCCTGAACAAGAGTAGATGCTATTCTT TCCACTTTAAGACCTTATCCTGGCTGGATGCGGTGGCTCAGGCTTGTAAACCCAGCACTTTGGGAGGCCGAGGCAGG CAGATCACTTGAGGTCAGGAGTTCAAGACCAGCCTGACCAACATGGTGAAACCCCATCTCTACTAAAAATACAAAAT CAGCCGGGCGTGTGGTGCATGCCTGCAGTCCCAGCTATTCAGGTGGCTGAGGCAGGAGAATTGCTTGAACCCAGGAG GCGGAGGTTGCGGTGAGCCTAGATTGCACCATTGCACTCTAGCTTGGGCAATAGGGATGAAACTCCATCTCAGAAGA GAAAAGAAAAAAAGACCTTATTCTGTTACACAAATCCTCTCAATGCAATCCATATAGAATAAACATGTAACCAGATC TCCCAATGTGTAAAATCATTTCAGGTAGAACAGAATTAAAGTGAAAAGCCAAGTCTTTGGAATTAACAGACAAAGTT CAAATAACAGTCCTCATGGCCTTAAGAATTTACCTAACATTTTTTTTAGAATCAATTTTCTTATATATGAATTGGAA ACATAATTCCTCCCTCACAAACACATTCTAAGATTTTAAGGAGATATTGATGAAGTACATCATCTGTCATTTTTAAC AGTTAGTGGTAGTGATTCACACAGCACATTATGATCTGTTCTTGTATGTTCTGTTCCATTCTGTATTCTTGACCTGG TTGTATTCTTTCTGAGCTCCAGATCCACATATCTAAGTACATCTTTTTGCATTTTACAAGAGTGCATACAATACAAT GTATCCAAGACTGTATTTCTGATTTTATCGTACCACTAAACTCACAAATGTGGCCCTATTCTTGTGTTCACGACTGA CATCACCGTCATGGTCCAAGTCTGATAATAGAAATGGCATTGTCACTTTCTTCCCTACTGCAACAGAAGCCCAGCTA TTTGTCTCCCATTTTCTCTACTTCTAAAATACATTTCTTCACTAAGTGAGAATAATCTTTTAAAGACACAAATCAAA CCATGCCACCACCTTTCTTGAATTATTCAATATCTTTCGTTGGCTTCCAGGTTACAGAAAAATAACTTGTAACAAAG TTTAAAGGTCATTCATGGCTCCTCTCTACCCTATTTTATAACATTTCCCCTTGTGATCAGAATCTCAGGCACATCAT CCATCTTTCTATATACAAATAAAGTCATATAGTTTGAACTCACCTCTGGTTACTTTTAATCAACCAAATGCTGTAAA ATGCATTTGTATCGCTACGTGTTAAGCAGTAGTTGATTCTTTTCATTTCTTGTTAATATTCTATTCTTTGACTATAC CGTAATTTATCAATTCTACTGTTGGTAAGCATTTAAGTGGCTACCGGTTTGAGGTTTTTATGATTATTGCTGTCATA AGCATTTCTATACATGTCTTTGGATACACACATGCATGTGTTTCTGAATATCTAAAAATGTAATTGCTAGGTAATAG ACTTATCAAGCATCCAGCATTTGTGGATACTATTAAAGGTTTTCCAAAGGGGTTATACTATTGTACAGTGTCACCAA CAGAGTTTGAGTTTCTATTGATCCATATCACCACCAAAATTTGAACTGTCAGTCTTATCTCTTCTCTTGTCTCTTTT TTCCTCTTTTTTTTCCTTCCCTTCCCCTCTCTTCGTTTCTTTTCTCTCCTCTTCTCTTCTTTCCTCTCTTCCCTTCC CTTTCTCTTTCTCTTCCCTATCCCTTCTCCTCTCCTCTCCCCTCCTTTTTTCTCCTCTCCTCTCCATTATTTATTTT TCCTTCTTCTCCTCCATCCCTTCCATCCTCTCTCTTCCCCTCTTCCTTCCTTCCTTTCTCCATTTCTTCCTCCTCTT TCCCTCAATCCTTCCTTTTGGATATGCTCATGGGTGTGTATTTGTCTGCCATTGTGGCATTATTTGAATTCAGAAAA GAGTGAAAAACTACTGGGATCTTCATTCTGGGTCTAATTCCACATTTTTTTTTAAGAACACACTCTGTAAAAATGTT CTGTACTAGCATATTCCCAGGAACTTCGTTAAATTTAATCTGGCTGAATATGGTAAATCTACTTTGCACTTTGCATT CTTTCTTTAGTCATACCATAATTTTAAACATTCAAAATATTTGTATATAATATTTGATTTTATCTGTCATTAAAATG TTAACCTTAAAATTCATGTTTCCAGAACCTATTTCAATAACTGGTAAATAAACACTATTCATTTTTTAAATATTCTT TTAATGGATATTTATTTCAATATAATAAAAAATTAGAGTTTTATTATAGGAAGAATTTACCAAAAGAAGGAGGAAGC AAGCAAGTTTAAACTGCAGCAATAGTTGTCCATTCCAACCTCTCAAAATTCCCTTGGAGACAAAATCTCTAGAGGCA AAGAAGAACTTTATATTGAGTCAACTTGTTAAAACATCTGCTTTTAGATAAGTTTTCTTAGTATAAAGTGACAGAAA CAAATAAGTTAAACTCTAAGATACATTCCACTATATTAGCCTAAAACACTTCTGCAAAAATGAAACTAGGAGGATAT TTTTAGAAACAACTGCTGAAAGAGATGCGGTGGGGAGATATGCAGAGGAGAACAGGGTTTCTGAGTCAAGACACACA TGACAGAACAGCCAATCTCAGGGCAAGTTAAGGGAATAGTGGAATGAAGGTTCATTTTTCATTCTCACAAACTAATG AAACCCTGCTTATCTTAAACCAACCTGCTCACTGGAGCAGGGAGGACAGGACCAGCATAAAAGGCAGGGCAGAGTCG ACTGTTGCTTACACTTTCTTCTGACATAACAGTGTTCACTAGCAACCTCAAACAGACACCATGGTGCATCTGACTCC TGAGGAGAAGACTGCTGTCAATGCCCTGTGGGGCAAAGTGAACGTGGATGCAGTTGGTGGTGAGGCCCTGGGCAGGT TGGTATCAAGGTTATAAGAGAGGCTCAAGGAGGCAAATGGAAACTGGGCATGTGTAGACAGAGAAGACTCTTGGGTT TCTGATAGGCACTGACTCTCTGTCCCTTGGGCTGTTTTCCTACCCTCAGATTACTGGTGGTCTACCCTTGGACCCAG AGGTTCTTTGAGTCCTTTGGGGATCTGTCCTCTCCTGATGCTGTTATGGGCAACCCTAAGGTGAAGGCTCATGGCAA GAAGGTGCTAGGTGCCTTTAGTGATGGCCTGGCTCACCTGGACAACCTCAAGGGCACTTTTTCTCAGCTGAGTGAGC TGCACTGTGACAAGCTGCACGTGGATCCTGAGAACTTCAGGGTGAGTCCAGGAGATGCTTCACTTTTCTCTTTTTAC TTTCTAATCTTACATTTTGGTTCTTTTACCTACCTGCTCTTCTCCCACATTTTTGTCATTTTACTATATTTTATCAT TTAATGCTTCTAAAATTTTGTTAATTTTTTATTTAAATATTCTGCATTTTTTCCTTCCTCACAATCTTGCTATTTTA AATTATTTAATATCCTGTCTTTCTCTCCCAACCCCCTCCCTTCATTTTTCCTTCTCTAACAACAACTCAAATTATGC ATACCAGCTCTCACCTGCTAATTCTGCACTTAGAATAATCCTTTTGTCTCTCCACATGGGTATGGGAGAGGCTCCAA CTCAAAGATGAGAGGCATAGAATACTGTTTTAGAGGCTATAAATCATTTTACAATAAGGAATAATTGGAATTTTATA AATTCTGTAGTAAATGGAATGGAAAGGAAAGTGAATATTTGATTATGAAAGACTAGGCAGTTACACTGGAGGTGGGG CAGAAGTCGTTGCTAGGAGACAGCCCATCATCACACTGATTAATCAATTAATTTGTATCTATTAATCTGTTTATAGT AATTAATTTGTATATGCTATATACACATACAAAATTAAAACTAATTTGGAATTAATTTGTATATAGTATTATACAGC ATATATAGCATATATGTACATATATAGACTACATGCTAGTTAAGTACATAGAGGATGTGTGTGTATAGATATATGTT ATATGTATGCATTCATATATGTACTTATTTATGCTGATGGGAATAACCTGGGGATCAGTTTTGTCTAAGATTTGGGC AGAAAAAAATGGGTGTTGGCTCAGTTTCTCAGAAGCCAGTCTTTATTTCTCTGTTAACCATATGCATGTATCTGCCT ACCTCTTCTCCGCAGCTCTTGGGCAATGTGCTGGTGTGTGTGCTGGCCCGCAACTTTGGCAAGGAATTCACCCCACA AATGCAGGCTGCCTATCAGAAGGTGGTGGCTGGTGTGGCTAATGCCCTGGCTCACAAGTACCATTGAGATCCTGGAC TGTTTCCTGATAACCATAAGAAGACCCTATTTCCCTAGATTCTATTTTCTGAACTTGGGAACACAATGCCTACTTCA AGGGTATGGCTTCTGCCTAATAAAGAATGTTCAGCTCAACTTCCTGATTAATTTCACTTATTTCATTTTTTTGTCCA GGTGTGTAAGAAGGTTCCTGAGGCTCTACAGATAGGGAGCACTTGTTTATTTTACAAAGAGTACATGGGAAAAGAGA AAAGCAAGGGAACCGTACAAGGCATTAATGGGTGACACTTCTACCTCCAAAGAGCAGAAATTATCAAGAACTCTTGA TACAAAGATAATACTGGCACTGCAGAGGTTCTAGGGAAGACCTCAACCCTAAGACATAGCCTCAAGGGTAATAGCTA CGATTAAACTCCAACAATTACTGAGAAAATAATGTGCTCAATTAAAGGCATAATGATTACTCAAGACAATGTTATGT TGTCTTTCTTCCTCCTTCCTTTGCCTGCACATTGTAGCCCATAATACTATACCCCATCAAGTGTTCCTGCTCCAAGA AATAGCTTCCTCCTCTTACTTGCCCCAGAACATCTCTGTAAAGAATTTCCTCTTATCTTCCCATATTTCAGTCAAGA TTCATTGCTCACGTATTACTTGTGACCTCTCTTGACCCCAGCCACAATAAACTTCTCTATACTACCCAAAAAATCTT TCCAAACCCTCCCCGACACCATATTTTTATATTTTTCTTATTTATTTCATGCACACACACACACTCCGTGCTTTATA AGCAATTCTGCCTATTCTCTACCTTCTTACAATGCCTACTGTGCCTCATATTAAATTCATCAATGGGCAGAAAGAAA ATATTTATTCAAGAAAACAGTGAATGAATGAACGAATGAGTAAATGAGTAAATGAAGGAATGATTATTCCTTGCTTT AGAACTTCTGGAATTAGAGGACAATATTAATAATACCATCGCACAGTGTTTCTTTGTTGTTAATGCTACAACATACA AAGAGGAAGCATGCAGTAAACAACCGAACAGTTATTTCCTTTCTGATCATAGGAGTAATATTTTTTTCCTTGAGCAC ATTTTTGCCATAGGTAAAATTAGAAGGATTTTTAGAACTTTCTCAGTTGTATACATTTTTAAAAATCTGTATTATAT GCATGTTGATTAATTTTAAACTTACTTGAATACCTAAACAGAATCTGTTGTTTCCTTGTGTTTGAAAGTGCTTTCAC AGTAACTCTGTCTGTACTGCCAGAATATACTGACAATGTGTTATAGTTAACTGTTTTGATCACAACATTTTGAATTG ACTGGCAGCAGAAGCTCTTTTTATATCCATGTGTTTTCCTTAAGTCATTATACATAGTAGGCATGAGACTCTTTATA CTGAATAAGATATTTAGGAACCACTGGTTTACATATCAGAAGCAGAGCTACTCAGGGCATTTTGGGGAAGATCACTT TCACATTCCTGAGCATAGGGAAGTTCTCATAAGAGTAAGATATTAAAAGGAGATACTTGTGTGGTATTCGAAAGACA GTAAGAGAGATTGTAGACCTTATGATCTTGATAGGGAAAACAAACTACATTCCTTTCTCCAAAAGTCAAAAAAAAAG AGCAAATATAGCTTACTATACCTTCTATTCCTACACCATTAGAAGTAGTCAGTGAGTCTAGGCAAGATGTTGGCCCT AAAAATCCAAATACCAGAGAATTCATGAGAACATCACCTGGATGGGACATGTGCCGAGCAACACAATTACTATATGC TAGGCATTGCTATCTTCATATTGAAGATGAGGAGGTCAAGAGATGAAAAAAGACTTGGCACCTTGTTGTTATATTAA AATTATTTGTTAGAGTAGAGCTTTTGTAAGAGTCTAGGAGTGTGGGAGCTAAATGATGATACACATGGACACAAAGA ATAGATCAACAGACACCCAGGCCTACTTGAGGGTTGAGGGTGGGAAGAGGGAGACGATGAAAAAGAACCTATTGGGT ATTAAGTTCATCACTGAGTGATGAAATAATCTGTACATCAAGACCCAGTGATATGCAATTTACCTATATAACTTGTA CATGTACCCCCAAATTTAAAATAAAGTTAAAACAAAGTATAGGAATGGAATTAATTCCTCAAGATTTGGCTTTAATT TTATTTGATAATTTATCAAATGGTTGTTTTTCTTTTCTCACTATGGCGTTGCTTTATAAACTATGTTCAGTATGTCT GAATGAAAGGGTGTGTGTGTGTGTGAAAGAGAGGGAGAGAGGAAGGGAAGAGAGGACGTAATAATGTGAATTTGAGT TCATGAAAATTTTTCAATAAAATAATTTAATGTCAGGAGAATTAAGCCTAATAGTCTCCTAAATCATCCATCTCTTG AGCTTCAGAGCAGTCCTCTGAATTAATGCCTACATGTTTGTAAAGGGTGTTCAGACTGAAGCCAAGATTCTACCTCT AAAGAGATGCAATCTCAAATTTATCTGAAGACTGTACCTCTGCTCTCCATAAATTGACACCATGGCCCACTTAATGA GGTTAAAAAAAAGCTAATTCTGAATGAAAATCTGAGCCCAGTGGAGGAAATATTAATGAACAAGGTGCAGACTGAAA TATAAATTTTCTGTAATAATTATGCATATACTTTAGCAAAGTTCTGTCTATGTTGACTTTATTGCTTTTGGTAAGAA ATACAACTTTTTAAAGTGAACTAAACTATCCTATTTCCAAACTATTTTGTGTGTGTGCGGTTTGTTTCTATGGGTTC TGGTTTTCTTGGAGCATTTTTATTTCATTTTAATTAATTAATTCTGAGAGCTGCTGAGTTGTGTTTACTGAGAGATT GTGTATCTGCGAGAGAAGTCTGTAGCAAGTAGCTAGACTGTGCTTGACCTAGGAACATATACAGTAGATTGCTAAAA TGTCTCACTTGGGGAATTTTAGACTAAACAGTAGAGCATGTATAAAAATACTCTAGTCAAGTGCTGCTTTTGAAACA AATGATAAAACCACACTCCCATAGATGAGTGTCATGATTTTCATGGAGGAAGTTAATATTCATCCTCTAAGTATACC CAGACTAGGGCCATTCTGATATAAAACATTAGGACTTAAGAAAGATTAATAGACTGGAGTAAAGGAAATGGACCTCT GTCTCTCTCGCTGTCTCTTTTTTGAGGACTTGTGTGTGTGTGTGTGTGTGTGTGTGTGTGTGTTGTGGTCAGTGGGG CTGGAATAAAAGTAGAATAGACCTGCACCTGCTGTGGCATCCATTCACAGAGTAGAAGCAAGCTCACAATAGTGAAG ATGTCAGTAAGCTTGAATAGTTTTTCAGGAACTTTGAATGCTGATTTAGATTTGAAACTGAGGCTCTGACCATAACC AAATTTGCACTATTTATTGCTTCTTGAAACTTATTTGCCTGGTATGCCTGGGCTTTTGATGGTCTTAGTATAGCTTG CAGCCTTGTCCCTGCAGGGTATTATGGGTAATAGAAAGAAAAGTCTGCGTTACACTCTAGTCACACTAAGTAACTAC CATTGGAAAAGCAACCCCTGCCTTGAAGCCAGGATGATGGTATCTGCAGCAGTTGCCAACACAAGAGAAGGATCCAT AGTTCATCATTTAAAAAAGAAAAAAAATAGAAAAAGGAAAACTATTTCTGAGCATAAGAAGTTGTAGGGTAAGTCT TTAAGAAGGTGACAATTTCTGCCAATCAGGATTTCAAAGCTCTTGCTTTGACAATTTTGGTCTTTCAGAATACTATA AATATAACCTATATTATAATTTCATAAAGTCTGTGCATTTTCTTTGACCCAGGATATTTGCAAAAGACATATTCAAA CTTCCGCAGAACACTTTATTTCACATATACATGCCTCTTATATCAGGGATGTGAAACAGGGTCTTGAAAACTGTCTA AATCTAAAACAATGCTAATGCAGGTTTAAATTTAATAAAATAAAATCCAAAATCTAACAGCCAAGTCAAATCTGTAT GTTTTAACATTTAAAATATTTTAAAGACGTCTTTTCCCAGGATTCAACATGTGAAATCTTTTCTCAGGGATACACGT GTGCCTAGATCCTCATTGCTTTAGTTTTTTACAGAGGAATGAATATAAAAAGAAAATACTTAAATTTTATCCCTCTT ACCTCTATAATCATACATAGGCATAATTTTTTAACCTAGGCTCCAGATAGCCATAGAAGAACCAAACACTTTCTGCG TGTGTGAGAATAATCAGAGTGAGATTTTTTCACAAGTACCTGATGAGGGTTGAGACAGGTAGAAAAAGTGAGAGATC TCTATTTATTTAGCAATAATAGAGAAAGCATTTAAGAGAATAAAGCAATGGAAATAAGAAATTTGTAAATTTCCTTC TGATAACTAGAAATAGAGGATCCAGTTTCTTTTGGTTAACCTAAATTTTATTTCATTTTATTGTTTTATTTTATTTT ATTTTATTTTATTTTGTGTAATCGTAGTTTCAGAGTGTTAGAGCTGAAAGGAAGAAGTAGGAGAAACATGCAAAGTA AAAGTATAACACTTTCCTTACTAAACCGACTGGGTTTCCAGGTAGGGGCAGGATTCAGGATGACTGACAGGGCCCTT AGGGAACACTGAGACCCTACGCTGACCTCATAAATGCTTGCTACCTTTGCTGTTTTAATTACATCTTTTAATAGCAG GAAGCAGAACTCTGCACTTCAAAAGTTTTTCCTCACCTGAGGAGTTAATTTAGTACAAGGGGAAAAAGTACAGGGGG ATGGGAGAAAGGCGATCACGTTGGGAAGCTATAGAGAAAGAAGAGTAAATTTTAGTAAAGGAGGTTTAAACAAACAA AATATAAAGAGAAATAGGAACTTGAATCAAGGAAATGATTTTAAAACGCAGTATTCTTAGTGGACTAGAGGAAAAAA ATAATCTGAGCCAAGTAGAAGACCTTTTCCCCTCCTACCCCTACTTTCTAAGTCACAGAGGCTTTTTGTTCCCCCAG ACACTCTTGCAGATTAGTCCAGGCAGAAACAGTTAGATGTCCCCAGTTAACCTCCTATTTGACACCACTGATTACCC CATTGATAGTCACACTTTGGGTTGTAAGTGACTTTTTATTTATTTGTATTTTTGACTGCATTAAGAGGTCTCTAGTT TTTTATCTCTTGTTTCCCAAAACCTAATAAGTAACTAATGCACAGAGCACATTGATTTGTATTTATTCTATTTTTAG ACATAATTTATTAGCATGCATGAGCAAATTAAGAAAAACAACAACAAATGAATGCATATATATGTATATGTATGTGT GTATATATACACATATATATATATATTTTTTTTCTTTTCTTACCAGAAGGTTTTAATCCAAATAAGGAGAAGATATG CTTAGAACTGAGGTAGAGTTTTCATCCATTCTGTCCTGTAAGTATTTTGCATATTCTGGAGACGCAGGAAGAGATCC ATCTACATATCCCAAAGCTGAATTATGGTAGACAAAGCTCTTCCACTTTTAGTGCATCAATTTCTTATTTGTGTAAT AAGAAAATTGGGAAAACGATCTTCAATATGCTTACCAAGCTGTGATTCCAAATATTACGTAAATACACTTGCAAAGG AGGATGTTTTTAGTAGCAATTTGTACTGATGGTATGGGGCCAAGAGATATATCTTAGAGGGAGGGCTGAGGGTTTGA AGTCCAACTCCTAAGCCAGTGCCAGAAGAGCCAAGGACAGGTACGGCTGTCATCACTTAGACCTCACCCTGTGGAGC CACACCCTAGGGTTGGCCAATCTACTCCCAGGAGCAGGGAGGGCAGGAGCCAGGGCTGGGCATAAAAGTCAGGGCAG AGCCATCTATTGCTTACATTTGCTTCTGACACAACTGTGTTCACTAGCAACCTCAAACAGACACCATGGTGCACCTG ACTCCTGAGGAGAAGTCTGCCGTTACTGCCCTGTGGGGCAAGGTGAACGTGGATGAAGTTGGTGGTGAGGCCCTGGG CAGGTTGGTATCAAGGTTACAAGACAGGTTTAAGGAGACCAATAGAAACTGGGCATGTGGAGACAGAGAAGACTCTT GGGTTTCTGATAGGCACTGACTCTCTCTGCCTATTGGTCTATTTTCCCACCCTTAGGCTGCTGGTGGTCTACCCTTG GACCCAGAGGTTCTTTGAGTCCTTTGGGGATCTGTCCACTCCTGATGCTGTTATGGGCAACCCTAAGGTGAAGGCTC ATGGCAAGAAAGTGCTCGGTGCCTTTAGTGATGGCCTGGCTCACCTGGACAACCTCAAGGGCACCTTTGCCACACTG AGTGAGCTGCACTGTGACAAGCTGCACGTGGATCCTGAGAACTTCAGGGTGAGTCTATGGGACCCTTGATGTTTTCT TTCCCCTTCTTTTCTATGGTTAAGTTCATGTCATAGGAAGGGGAGAAGTAACAGGGTACAGTTTAGAATGGGAAACA GACGAATGATTGCATCAGTGTGGAAGTCTCAGGATCGTTTTAGTTTCTTTTATTTGCTGTTCATAACAATTGTTTTC TTTTGTTTAATTCTTGCTTTCTTTTTTTTTCTTCTCCGCAATTTTTACTATTATACTTAATGCCTTAACATTGTGTA TAACAAAAGGAAATATCTCTGAGATACATTAAGTAACTTAAAAAAAAACTTTACACAGTCTGCCTAGTACATTACTA TTTGGAATATATGTGTGCTTATTTGCATATTCATAATCTCCCTACTTTATTTTCTTTTATTTTTAATTGATACATAA TCATTATACATATTTATGGGTTAAAGTGTAATGTTTTAATATGTGTACACATATTGACCAAATCAGGGTAATTTTGC ATTTGTAATTTTAAAAAATGCTTTCTTCTTTTAATATACTTTTTTGTTTATCTTATTTCTAATACTTTCCCTAATCT CTTTCTTTCAGGGCAATAATGATACAATGTATCATGCCTCTTTGCACCATTCTAAAGAATAACAGTGATAATTTCTG GGTTAAGGCAATAGCAATATTTCTGCATATAAATATTTCTGCATATAAATTGTAACTGATGTAAGAGGTTTCATATT GCTAATAGCAGCTACAATCCAGCTACCATTCTGCTTTTATTTTATGGTTGGGATAAGGCTGGATTATTCTGAGTCCA AGCTAGGCCCTTTTGCTAATCATGTTCATACCTCTTATCTTCCTCCCACAGCTCCTGGGCAACGTGCTGGTCTGTGT GCTGGCCCATCACTTTGGCAAAGAATTCACCCCACCAGTGCAGGCTGCCTATCAGAAAGTGGTGGCTGGTGTGGCTA ATGCCCTGGCCCACAAGTATCACTAAGCTCGCTTTCTTGCTGTCCAATTTCTATTAAAGGTTCCTTTGTTCCCTAAG TCCAACTACTAAACTGGGGGATATTATGAAGGGCCTTGAGCATCTGGATTCTGCCTAATAAAAAACATTTATTTTCA TTGCAATGATGTATTTAAATTATTTCTGAATATTTTACTAAAAAGGGAATGTGGGAGGTCAGTGCATTTAAAACATA AAGAAATGAAGAGCTAGTTCAAACCTTGGGAAAATACACTATATCTTAAACTCCATGAAAGAAGGTGAGGCTGCAAA CAGCTAATGCACATTGGCAACAGCCCTGATGCCTATGCCTTATTCATCCCTCAGAAAAGGATTCAAGTAGAGGCTTG ATTTGGAGGTTAAAGTTTTGCTATGCTGTATTTTACATTACTTATTGTTTTAGCTGTCCTCATGAATGTCTTTTCAC TACCCATTTGCTTATCCTGCATCTCTCAGCCTTGACTCCACTCAGTTCTCTTGCTTAGAGATACCACCTTTCCCCTG AAGTGTTCCTTCCATGTTTTACGGCGAGATGGTTTCTCCTCGCCTGGCCACTCAGCCTTAGTTGTCTCTGTTGTCTT ATAGAGGTCTACTTGAAGAAGGAAAAACAGGGGGCATGGTTTGACTGTCCTGTGAGCCCTTCTTCCCTGCCTCCCCC ACTCACAGTGACCCGGAATCTGCAGTGCTAGTCTCCCGGAACTATCACTCTTTCACAGTCTGCTTTGGAAGGACTGG GCTTAGTATGAAAAGTTAGGACTGAGAAGAATTTGAAAGGGGGCTTTTTGTAGCTTGATATTCACTACTGTCTTATT ACCCTATCATAGGCCCACCCCAAATGGAAGTCCCATTCTTCCTCAGGATGTTTAAGATTAGCATTCAGGAAGAGATC AGAGGTCTGCTGGCTCCCTTATCATGTCCCTTATGGTGCTTCTGGCTCTGCAGTTATTAGCATAGTGTTACCATCAA CCACCTTAACTTCATTTTTCTTATTCAATACCTAGGTAGGTAGATGCTAGATTCTGGAAATAAAATATGAGTCTCAA GTGGTCCTTGTCCTCTCTCCCAGTCAAATTCTGAATCTAGTTGGCAAGATTCTGAAATCAAGGCATATAATCAGTAA TAAGTGATGATAGAAGGGTATATAGAAGAATTTTATTATATGAGAGGGTGAAACCTAAAATGAAATGAAATCAGACC CTTGTCTTACACCATAAACAAAAATAAATTTGAATGGGTTAAAGAATTAAACTAAGACCTAAAACCATAAAAATTTT TAAAGAAATCAAAAGAAGAAAATTCTAATATTCATGTTGCAGCCGTTTTTTGAATTTGATATGAGAAGCAAAGGCAA CAAAAGGAAAAATAAAGAAGTGAGGCTACATCAAACTAAAAAATTTCCACACAAAAAAGAAAACAATGAACAAATGA AAGGTGAACCATGAAATGGCATATTTGCAAACCAAATATTTCTTAAATATTTTGGTTAATATCCAAAATATATAAGA AACACAGATGATTCAATAACAAACAAAAAATTAAAAATAGGAAAATAAAAAAATTAAAAAGAAGAAAATCCTGCCAT TTATGCGAGAATTGATGAACCTGGAGGATGTAAAACTAAGAAAAATAAGCCTGACACAAAAAGACAAATACTACACA ACCTTGCTCATATGTGAAACATAAAAAAGTCACTCTCATGGAAACAGACAGTAGAGGTATGGTTTCCAGGGGTTGGG GGTGGGAGAATCAGGAAACTATTACTCAAAGGGTATAAAATTTCAGTTATGTGGGATGAATAAATTCTAGATATCTA ATGTACAGCATCGTGACTGTAGTTAATTGTACTGTAAGTATATTTAAAATTTGCAAAGAGAGTAGATTTTTTTGTTT TTTTAGATGGAGTTTTGCTCTTGTTGTCCAGGCTGGAGTGCAATGGCAAGATCTTGGCTCACTGCAACCTCCGCCTC CTGGGTTCAAGCAAATCTCCTGCCTCAGCCTCCCGAGTAGCTGGGATTACAGGCATGCGACACCATGCCCAGCTAAT TTTGTATTTTTAGTAGAGACGGGGTTTCTCCATGTTGGTCAGGCTGATCCGCCTCCTCGGCCACCAAAGGGCTGGGA TTACAGGCGTGACCACCGGGCCTGGCCGAGAGTAGATCTTAAAAGCATTTACCACAAGAAAAAGGTAACTATGTGAG ATAATGGGTATGTTAATTAGCTTGATTGTGGTAATCATTTCACAAGGTATACATATATTAAAACATCATGTTGTACA CCTTAAATATATACAATTTTTATTTGTGAATGATACCTCAATAAAGTTGAAGAATAATAAAAAAGAATAGACATCAC ATGAATTAAAAAACTAAAAAATAAAAAAATGCATCTTGATGATTAGAATTGCATTCTTGATTTTTCAGATACAAATA TCCATTTGACTGTTTACTCTTTTCCAAAACAATACAATAAATTTTAGCACTTTATCTTCATTTTCCCCTTCCCAATC TATAATTTTATATATATATATTTTAGATATTTTGTATAGTTTTACTCCCTAGATTTTCTAGTGTTATTATTAAATAG TGAAGAAATGTTTACACTTATGTACAAAATGTTTTGCATGCTTTTCTTCATTTCTAACATTCTCTCTAAGTTTATTC TATTTTTTCCTGATTATCCTTAATATTATCTCTTTCTGCTGGAAATATATTGTTACTTTTGGTTTATCTAAAAATGG CTTCATTTTCTTCATTCTAAAATCATGTTAAATTAATACCACTCATGTGTAAGTAAGATAGTGGAATAAATAGAAAT CCAAAAACTAAATCTCACAAAATATAATAATGTGATATATAAAAATATAGCTTTTAAATTTAGCTTGGAAATAAAAA ACAAACAGTAATTGAACAACTATACTTTTTGAAAAGAGTAAAGTGAAATGCTTAACTGCATATACCACAATCGATTA CACAATTAGGTGTGAAGGTAAAATTCAGTCACGAAAAAACTAGAATAAAAATATGGGAAGACATGTATATAATCTTA GAGATAACAGTGTTATTTAATTATCAACCCAAAGTAGAAACTATCAAGGGAGAAATAAATTCAGTCAACAATAAAAG CATTTAAGAAGTTATTCTAGGCTGGGAGCGGTGGCTCACACCTGCAATTGCAGCACTTTGGGAGGCCTAGACAGGCG GATCACGACGTCAGGAGTTCAAGATCAGCCTGGCCAACATAGTGAAACCTCATCGCTACTAAAAATATAAAAACTTA GCCTGGCGTGGTGGCAGGCATGTGTAATCCCAGCAATTTGGGAGGCTGAGGCAGGAGAATCGCTTGATCCTGGGAGG CAGAGGTTGCAGTGAGCCAAGATTGTGCCACTGCATTCCAGCCCAGGTGACAGCATGAGACTCCGTCACAAAAAAAA AAGAAAAAAAAGGGGGGGGGGGGCGGTGGAGCCAAGATGACCGAATAGGAACAGCTCCAGTCTATAGCTCCCATCGT GAGTGACGCAGAAGACGGGTGATTTCTGCATTTCCAACTGAGGTACCAGGTTCATCTCACAGGGAAGTGCCAGGCAG TGGGTGCAGGACAGTAGTGCAGTGCACTGTGCATGAGCCGAAGCAGGGCGAGGCATCACCTCACCCGGGAAGCACAA GGGGTCAGGGAATTCCCTTTCCTAGTCAAAGAAAAGGGTGACAGATGGCACCTGGAAAATCGGGTCACTCCCGCCCT AATACTGCGCTCTTCCAACAAGCTTAACAAATGGCACACCAGGAGATTATATCCCATGCCTGGCTCAGAGGGTCCTA CGCCCATGGAGCCTCGCTCATTGCTAGCACAGCAGTCTGAGGTCAAACTGCAAGGTGGCAGTGAGGCTGGGGGAGGG GTGCCCACCATTGTCCAGGCTTGAGCAGGTAAACAAAGCCGCCTGGAAGCTCGAACTGGGTGGAGCCCACCACAGCT CAAGGAGGCCTGCCTGCCTCTGTAGGCTCCACCTCTAGGGGCAGGGCACAGACAAACAAAAGACAACAAGAACCTCT GCAGACTTAAATGTCCCTGTCTGACAGCTTTGAAGAGAGTAGTGGTTCTCCCAGCACATAGCTTCAGATCTGAGAAC AGGCAGACTGCCTCCTCAAGTGGGTCCCTGACCCCCGAGTAGCCTAACTGGGAGGCATCCCCCAGTAGGGCGGACTG ACACCTCACATGGCTGGTACTCCTCTAAGACAAAACTTCCAGAGGAATGATCAGGCAGCAGCATTTGCGGTTCACCA ATATCCACTGTTCTGCAGCCACCGCTGCTGATACCCAGGAAAACAGCATCTGGAGTGGACCTCCAGTAAACTCCAAC AGACCTGCAGCTGAGGGTCCTGACTGTTAGAAGGAAAACTAACAAACAGAAAGGACATCCACACCAAAAACCCATCT GTACATCACCATCATCAAAGACCAAAGGTAGATAAAACCATAAAGATGGGGAAAAAGCAGAGCAGAAAAACTGGACA CTCTAAAAATGAGAGTGCCTCTCCTTCTCCAAAGTAACGCAGCTCCTCACCAGCAATGGAACAAAGCTGGGCAGAGA ATGACTTTGACGAGTTGAGAGAGGAAGGCTTCAGAAGATCAAACTACTCCAAGCTAAAGGAGGAAGTTCGAACAAAC GGCAAAGAAGTAAAAAACTTTGAAAAAAAATTAGATGAATGGATAACTAGAATAACCAATGCACAGAAGTCCTTAAA GGACCTGATGGAGCTGAAAACCAAGGCAGGAGAACTACGTGACAAATACACAAGCCTCAGTAACCGATGAGATCAAC TGGAAGAAAGGGTATCAATGACGGAAGATGAAATGAATGAAATGAAGCATGAAGAGAAGTTTAGAGAAAAAAGAATA AAAAGAAACGAACAAAGCCTCCAAGAAATATGGGACTATGTGAAAAGACCAAATCTACATCTAATTGGTGTAGCTGA AAGTGATGGGGAGAATGGAACCAAGTTGGAAAACACTCTGCAGGATATTATCCAGGAGAACTTCCCCAATCTAGCAA GGCAGCCCAAATTCACATTCAGGAAATACAGAGAACGCCACAAAGATACTCCTAGAGAAAAGCAACTCCAAGACACA TAACTGACAGATTCACCAAAGTTGAAATGAAGGAAAAAATGTTAAGGGCAGCCAGAGAGAAAGGTCGGGTTACCCAC AAAGGGAAGCCCATCAGACTAACAGCTGATCTATCGGCAGAAACTCTACAAGCCAGAAGAAAGTGGGGGCCAATATT CAACATTGTTAAAGAAAAGAATTTTCGGCCCAGAATTTCATATCCAGCCAAACTAAGCTTCATAAGCATTGGAGAAA TAAAATCCTTTACAGACAAGCAAATGCTGAGAGATTTTGTCACCACCAGGCCTGCCCTACAAGAGCTCCTGAAGGAA GCACTAAACATGGAAAGGAACAACTAGTATCAGCCACTGCAAAAACATGCCAAATTGTAAACGACCATCAAGGCTAG GAAGAAACTGCATCAAGGAGCAAAATAACCAGCTAACATCATAATGACAGGATCAAATTCATACATAACAATACTCA CCTTAAATGTAAATAGGCTAAATGCTCCAATTAAAAGACACAGACTGGCAAATTGGATAAGGAGTCAAGACCCATCT GTCGTTATGTATTCAGGAAACCCATCTCACGTGCAGAGACACACATAGGCTCGAAATAAAAGGATGGAGGAATATCT ACCAAGCAAATGGAAAACAAAAAAAGGCAGGGGTTGCAATCCTAGTCTCTGATAAAACAGATTTTAAACCAACAAAG ATCAAAAGAGACAAAGAAGGCCATTACATAATGGCAAAGGGATCTATTCAAGAAGAAGAACTAACTATACTAAATAT ATATGCACCCAATACAGGAGCACCCAGATTCATAAAACAAGTCCTGAGTGACCTACAAAGAGACTTAGATGCCCACA CAATAATAATGGGAGACTTTAACACCCCACTGTCAACATTAGACAGATCAACGAGACAGAAAGTTAACAAGGATATC CAGGAATTGGACTCAGCTCTGCACCAAGCAGACCTAATAGACATCTACAGAACTCTCCACCCCAAATCAACAGAATA TACATTCTTTTCAGCACCACACCACACCTATTCCAAAACTGACCACATAGTTGGAAGTAAAGCTCTCCTCAGCAAAT GTAAAAGAACAGAAACTATAACAAACTGTCTCTCAGACCACAGTGCAATCAAACTAGAACTCAGGATTAAGAAACTC ACTCAAAACCACTCAGCTACATGGAAACTGAACAGCCTGCTCCTGAATGACTACTGGGTACATAACAAAATGAAGGC AGAAATAAAGATGTTCTTTGAAACAACGAGAACAAAGACACAACACACCAGAATCTCTGAGACACATTCAAAGCAGT GTGTAGAGGGAAATTTATAGCACTAAATGCCCACAAGGGAAAGCAGGAAAGATCTAAAATTGACACCCTAACATCAC AATTAAAAAACTAGAGAAGCAGGAGCAAACACATTCAAAAGCTAACAGAAGACAAGAAATAACTAAGATCAGAGCAG AAGTGAAGAAGATAGAGACACAAAAAACCCTTCAAAAAAATCAATGAATCCAGAAGCTGTTTTTTTGAAAAGATCAA CAAAATTGATAGACTGCTAGCAAGACTAATAAAGAAGAAAGGGGAGAAGAATCAAATAGACGCAATAAAAAATGACA CGGGGTATCACCACTGATCCCACAGAAATACAAACTACCGTCAGAGAATACTATAAACACCTCTACGCAAATAAACT AGAAAATCTAGAAGAAATGGATAAATTCCTCGACACATACACTCTGCCAAGACTAAACCAGGAAGAAGTTGTATCTC TGAATAGACCAATAACAGGCTCTGAAATTGAGGCAATAATTAATAGCTTATCAACCAAAAAAAGTCCGGGACCAGTA GGATTCATAGCCGAATTCTACCAGAGGTACAAGGAGGAGCTGGTACCATTCCTTCTGAAACTATTCCAATCAATAGA AAAAGAGGGAATCCTCCCTAACTCATTTTATGAGGCCAGCATCATCCTGATACCAAAGCCTGACAGAGACACAACAA AAAAAGAGAATGTTACACCAATATCCTTGATGAACATCGATGCAAAAATCCTCAATAAAATACTGGCAAACTGAATC CAGCAGCACATCAAAAAGCTTATCCTCCATGATCAAGTGGGCTTCATCCCTGCCATGCAAGGCTGGTTCAACATACG AAATCAATAAACATAATCCAGCATATAAACAGAACCAAAGACACAAACCATATGATTATCTCAATAGATGCAGAAAA GGCCTTTGACAAAATTCAACAATGCTTCATGCTAAAAACTCTCAATAAATTAGGTATTGATGGGACATATCTCAAAA TAATAAGAGCTATCTATGACAAACCCACAGCCAATATCATACTGAGTGGACAAAAACTGGAAGCATTCCCTTTGAAA ACTGGCACAAGGCAGGGATGCCCTCTCTCACCACTCCTATTCAACATAGTGTTGGAAGTTCTGGCCAGGGCAATCAG GCAGGAGAAGGAAATAAAGGGCATTCAATTAGGAAAAGAGGAAGGTGAAATTGTCCCTGTTTGCAGATGACATGATT GTATATCTAGAAAACCCCATTGTCTCAGCCCAAAATCTCCTTAAGCTGATAAGCAACTTCAGCAAAGTCTCAGGATA TAAAATCAGTGTGCAAAAATCACAAGTATTCCTATGCACCAATAACAGACAAACAGAGAGCCAAATCATGAGTGAAC TCCCATTCACAATTGCTTCAAAGAGAATAAAATACCTAGGAATCCAACTTACAAGGGATGTGAAGGACCTCTTCAAG GAGAACTACAAACCACTGCTCAATGAAATAAAAGAGGATACAAACAAATGGAAGAACATTCCATGCTTATGGGTAGG AAGAATCATATCGTGAAAATGGTCATACTGCCCAAGGTAATTTATAGATTCAATGCCATCCCCATCAAGCTACCAAT GACTTTCTTCACAGAACTGGAAAAAACTACTTTAAAGTTCATATGGAATCAAAAAAGAGCCCACATCACCAAGGCAA TCCTAAGCCAAAAGAACAAAGCTGGAGGCATCACGCTACCTGACTTCAAACTATACTACAATGCTACGGTAACCAAA ACAGCATGGTACTGGTACCAAAACAGAGATCTAGACCAATGGAACAGAACAGAGCCCTCAGAAATAATGCCGCATAT CTACAACTATCCGATCTTTGACAAACCTGAGAGAAACAAGCAATGGGGAAAGGATTCCCTATTTAATAAATGGTGCT GGGAAAACTGGCTAGCCATATGTAGAAAGCTGAAACTGGATCCTTCCTTACACCTTATACAAAAATTAATTCAAGAT GGATTAAAGACTTAAACATTAGACCTAAAACCATAAAAACCCTAGAAAAAAACCTAGGCAATACCATTCAGGACATA GGCATGGGCAAGGACTTCATGTCTAAAACACCAAAACGAATGGCAACAAAAGACAAAATGGACAAACGGGATCTAAT TAAACTAAAGAGCTTCTGCACAGCTAAAGAAACTACCATCAGAGTGAACAGGCAACCTACAAAATGGGAGAAAATTT TTGCAATCTACTCATCTGACAAAGGGCTAATATCCAGAATCTACAATGAACTCAAACAAATTTACAAGAAAAAACAA ACAACCCCATCAAAAAGTGGGCAAAGGATATGAACAGACACTTCTCAAAAGAAGACATTTATGTAATCAAAAAACAC ATGAAAAAATGCTCATCATCACTAGCCATCAGAGAAATGCAAATCAAAACCACAATGAGATACCATCTCACACCAGT TAGAATGGCGATCATTAAAAAGTCAGGAAACAACAGGTGCTGGAGAGGATGTGGAGAAACAGGAACAACTTTTACAC TGTTGGTGGGACTGTAAACTAGTTCAACCATTGCGGAAGTCAGTGTGGCAATTCCTCAGGAATCTAGAACTAGAAAT ACCATTTGACCCAGCCATCCCATTACTGGGTAGATACCCAAAGGATTATAAATCATGCTGCTATAAAGACACATGCA CACGTATGTTTATTGCAGCACTATTCACAATAGCAAAGACTTGGAACCAACCCAAATGTCCAACAACGATAGATTGG ATTAAGAAAATGTGGCACATATACACCATGGAATACTATGCAGCCATAAAAAATGATGAGTTCATGTCCTTTGTAGG GACATGGATGAAGCTGGAAACTATCATTCTCAGCAAACTATCACAAGGACAATAAACCAAACACCGCATGTTCTCAC TCATAGGTGGGAATTGAACAATGAGAACACATGGACACATGAAGAGGAACATCACACTCTGGGGACTGTTATGGGGT GGGGGGCAGGGGCAGGGATAGCACTAGGAGATATACCTAATGCTAAATGACGAGTTAATGGGTGCAGCACACCAACA TGGCACATGTATACATATATAACAAACCTGCCGTTGTGCACATGTACCCTAAAACTTGAAGTATAATAATAAAAAAA AGTTATCCTATTAAAACTGATCTCACACATCCGTAGAGCCATTATCAAGTCTTTCTCTTTGAAACAGACAGAAATTT AGTGTTTTCTCAGTCAGTTAAC

[0595] GenBank Accession No. U01317.1 GAATTCTAATCTCCCTCTCAACCCTACAGTCACCCATTTGGTATATTAAAGATGTGTTGTCTACTGTCTAGTATCCC TCAAGTAGTGTCAGGAATTAGTCATTTAAATAGTCTGCAAGCCAGGAGTGGTGGCTCATGTCTGTAATTCCAGCACT GGAGAGGTAGAAGTGGGAGGACTGCTTGAGCTCAAGAGTTTGATATTATCCTGGACAACATAGCAAGACCTCGTCTC TACTTAAAAAAAAAAAAATTAGCCAGGCATGTGATGTACACCTGTAGTCCCAGCTACTCAGGAGGCCGAAATGGGAG GATCCCTTGAGCTCAGGAGGTCAAGGCTGCAGTGAGACATGATCTTGCCACTGCACTCCAGCCTGGACAGCAGAGTG AAACCTTGCCTCACGAAACAGAATACAAAAACAAACAAACAAAAAACTGCTCCGCAATGCGCTTCCTTGATGCTCTA CCACATAGGTCTGGGTACTTTGTACACATTATCTCATTGCTGTTCGTAATTGTTAGATTAATTTTGTAATATTGATA TTATTCCTAGAAAGCTGAGGCCTCAAGATGATAACTTTTATTTTCTGGACTTGTAATAGCTTTCTCTTGTATTCACC ATGTTGTAACTTTCTTAGAGTAGTAACAATATAAAGTTATTGTGAGTTTTTGCAAACACAGCAAACACAACGACCCA TATAGACATTGATGTGAAATTGTCTATTGTCAATTTATGGGAAAACAAGTATGTACTTTTTCTACTAAGCCATTGAA ACAGGAATAACAGAACAAGATTGAAAGAATACATTTTCCGAAATTACTTGAGTATTATACAAAGACAAGCACGTGGA CCTGGGAGGAGGGTTATTGTCCATGACTGGTGTGTGGAGACAAATGCAGGTTTATAATAGATGGGATGGCATCTAGC GCAATGACTTTGCCATCACTTTTAGAGAGCTCTTGGGGACCCCAGTACACAAGAGGGGACGCAGGGTATATGTAGAC ATCTCATTCTTTTTCTTAGTGTGAGAATAAGAATAGCCATGACCTGAGTTTATAGACAATGAGCCCTTTTCTCTCTC CCACTCAGCAGCTATGAGATGGCTTGCCCTGCCTCTCTACTAGGCTGACTCACTCCAAGGCCCAGCAATGGGCAGGG CTCTGTCAGGGCTTTGATAGCACTATCTGCAGAGCCAGGGCCGAGAAGGGGTGGACTCCAGAGACTCTCCCTCCCAT TCCCGAGCAGGGTTTGCTTATTTATGCATTTAAATGATATATTTATTTTAAAAGAAATAACAGGAGACTGCCCAGCC CTGGCTGTGACATGGAAACTATGTAGAATATTTTGGGTTCCATTTTTTTTTCCTTCTTTCAGTTAGAGGAAAAGGGG CTCACTGCACATACACTAGACAGAAAGTCAGGAGCTTTGAATCCAAGCCTGATCATTTCCATGTCATACTGAGAAAG TCCCCACCCTTCTCTGAGCCTCAGTTTCTCTTTTTATAAGTAGGAGTCTGGAGTAAATGATTTCCAATGGCTCTCAT TTCAATACAAAATTTCCGTTTATTAAATGCATGAGCTTCTGTTACTCCAAGACTGAGAAGGAAATTGAACCTGAGAC TCATTGACTGGCAAGATGTCCCCAGAGGCTCTCATTCAGCAATAAAATTCTCACCTTCACCCAGGCCCACTGAGTGT CAGATTTGCATGCACTAGTTCACGTGTGTAAAAAGGAGGATGCTTCTTTCCTTTGTATTCTCACATACCTTTAGGAA AGAACTTAGCACCCTTCCCACACAGCCATCCCAATAACTCATTTCAGTGACTCAACCCTTGACTTTATAAAAGTCTT GGGCAGTATAGAGCAGAGATTAAGAGTACAGATGCTGGAGCCAGACCACCTGAGTGATTAGTGACTCAGTTTCTCTT AGTAATTGTATGACTCAGTTTCTTCATCTGTAAAATGGAGGGTTTTTTAATTAGTTTGTTTTTGAGAAAGGGTCTCA CTCTGTCACCCAAATGGGAGTGTAGTGGCAAAATCTCGGCTCACTGCAACTTGCACTTCCCAGGCTCAAGCGGTCCT CCCACCTCAACATCCTGAGTAGCTGGAACCACAGGTACACACCACCATACCTCGCTAATTTTTTGTATTTTTGGTAG AGATGGGGTTTCACATGTTACACAGGATGGTCTCAGACTCCGGAGCTCAAGCAATCTGCCCACCTCAGCCTTCCAAA GTGCTGGGATTATAAGCATGATTACAGGAGTTTTAACAGGCTCATAAGATTGTTCTGCAGCCCGAGTGAGTTAATAC ATGCAAAGAGTTTAAAGCAGTGACTTATAAATGCTAACTACTCTAGAAATGTTTGCTAGTATTTTTTGTTTAACTGC AATCATTCTTGCTGCAGGTGAAAACTAGTGTTCTGTACTTTATGCCCATTCATCTTTAACTGTAATAATAAAAATAA CTGACATTTATTGAAGGCTATCAGAGACTGTAATTAGTGCTTTGCATAATTAATCATATTTAATACTCTTGGATTCT TTCAGGTAGATACTATTATTATCCCCATTTTACTACAGTTAAAAAAACTACCTCTCAACTTGCTCAAGCATACACTC TCACACACACAAACATAAACTACTAGCAAATAGTAGAATTGAGATTTGGTCCTAATTATGTCTTTGCTCACTATCCA ATAAATATTTATTGACATGTACTTCTTGGCAGTCTGTATGCTGGATGCTGGGGATACAAAGATGTTTAAATTTAAGC TCCAGTCTCTGCTTCCAAAGGCCTCCCAGGCCAAGTTATCCATTCAGAAAGCATTTTTTACTCTTTGCATTCCACTG TTTTTCCTAAGTGACTAAAAAATTACACTTTATTCGTCTGTGTCCTGCTCTGGGATGATAGTCTGACTTTCCTAACC TGAGCCTAACATCCCTGACATCAGGAAAGACTACACCATGTGGAGAAGGGGTGGTGGTTTTGATTGCTGCTGTCTTC AGTTAGATGGTTAACTTTGTGAAGTTGAAAACTGTGGCTCTCTGGTTGACTGTTAGAGTTCTGGCACTTGTCACTAT GCCTATTATTTAACAAATGCATGAATGCTTCAGAATATGGGAATATTATCTTCTGGAATAGGGAATCAAGTTATATT ATGTAACCCAGGATTAGAAGATTCTTCTGTGTGTAAGAATTTCATAAACATTAAGCTGTCTAGCAAAAGCAAGGGCT TGGAAAATCTGTGAGCTCCTCACCATATAGAAAGCTTTTAACCCATCATTGAATAAATCCCTATAGGGGATTTCTAC CCTGAGCAAAAGGCTGGTCTTGATTAATTCCCAAACTCATATAGCTCTGAGAAAGTCTATGCTGTTAACGTTTTCTT GTCTGCTACCCCATCATATGCACAACAATAAATGCAGGCCTAGGCATGACTGAAGGCTCTCTCATAATTCTTGGTTG CATGAATCAGATTATCAACAGAAATGTTGAGACAAACTATGGGGAAGCAGGGTATGAAAGAGCTCTGAATGAAATGG AAACCGCAATGCTTCCTGCCCATTCAGGGCTCCAGCATGTAGAAATCTGGGGCTTTGTGAAGACTGGCTTAAAATCA GAAGCCCCATTGGATAAGAGTAGGGAAGAACCTAGAGCCTACGCTGAGCAGGTTTCCTTCATGTGACAGGGAGCCTC CTGCCCCGAACTTCCAGGGATCCTCTCTTAAGTGTTTCCTGCTGGAATCTCCTCACTTCTATCTGGAAATGGTTTCT CCACAGTCCAGCCCCTGGCTAGTTGAAAGAGTTACCCATGCAGAGGCCCTCCTAGCATCCAGAGACTAGTGCTTAGA TTCCTACTTTCAGCGTTGGACAACCTGGATCCACTTGCCCAGTGTTCTTCCTTAGTTCCTACCTTCGACCTTGATCC TCCTTTATCTTCCTGAACCCTGCTGAGATGATCTATGTGGGGAGAATGGCTTCTTTGAGAAACATCTTCTTCGTTAG TGGCCTGCCCCTCATTCCCACTTTAATATCCAGAATCACTATAAGAAGAATATAATAAGAGGAATAACTCTTATTAT AGGTAAGGGAAAATTAAGAGGCATACGTGATGGGATGAGTAAGAGAGGAGAGGGAAGGATTAATGGATGATAAAATC TACTACTATTTGTTGAGACCTTTTATAGTCTAATCAATTTTGCTATTGTTTTCCATCCTCACGCTAACTCCATAAAA AAACACTATTATTATCTTTATTTTGCCATGACAAGACTGAGCTCAGAAGAGTCAAGCATTTGCCTAAGGTCGGACAT GTCAGAGGCAGTGCCAGACCTATGTGAGACTCTGCAGCTACTGCTCATGGGCCCTGTGCTGCACTGATGAGGAGGAT CAGATGGATGGGGCAATGAAGCAAAGGAATCATTCTGTGGATAAAGGAGACAGCCATGAAGAAGTCTATGACTGTAA ATTTGGGAGCAGGAGTCTCTAAGGACTTGGATTTCAAGGAATTTTGACTCAGCAAACACAAGACCCTCACGGTGACT TTGCGAGCTGGTGTGCCAGATGTGTCTATCAGAGGTTCCAGGGAGGGTGGGGTGGGGTCAGGGCTGGCCACCAGCTA TCAGGGCCCAGATGGGTTATAGGCTGGCAGGCTCAGATAGGTGGTTAGGTCAGGTTGGTGGTGCTGGGTGGAGTCCA TGACTCCCAGGAGCCAGGAGAGATAGACCATGAGTAGAGGGCAGACATGGGAAAGGTGGGGGAGGCACAGCATAGCA GCATTTTTCATTCTACTACTACATGGGACTGCTCCCCTATACCCCCAGCTAGGGGCAAGTGCCTTGACTCCTATGTT TTCAGGATCATCATCTATAAAGTAAGAGTAATAATTGTGTCTATCTCATAGGGTTATTATGAGGATCAAAGGAGATG CACACTCTCTGGACCAGTGGCCTAACAGTTCAGGACAGAGCTATGGGCTTCCTATGTATGGGTCAGTGGTCTCAATG TAGCAGGCAAGTTCCAGAAGATAGCATCAACCACTGTTAGAGATATACTGCCAGTCTCAGAGCCTGATGTTAATTTA GCAATGGGCTGGGACCCTCCTCCAGTAGAACCTTCTAACCAGCTGCTGCAGTCAAAGTCGAATGCAGCTGGTTAGAC TTTTTTTAATGAAAGCTTAGCTTTCATTAAAGATTAAGCTCCTAAGCAGGGCACAGATGAAATTGTCTAACAGCAAC TTTGCCATCTAAAAAAATCTGACTTCACTGGAAACATGGAAGCCCAAGGTTCTGAACATGAGAAATTTTTAGGAATC TGCACAGGAGTTGAGAGGGAAACAAGATGGTGAAGGGACTAGAAACCACATGAGAGACACGAGGAAATAGTGTAGAT TTAGGCTGGAGGTAAATGAAAGAGAAGTGGGAATTAATACTTACTGAAATCTTTCTATATGTCAGGTGCCATTTTAT GATATTTAATAATCTCATTACATATGGTAATTCTGTGAGATATGTATTATTGAACATACTATAATTAATACTAATGA TAAGTAACACCTCTTGAGTACTTAGTATATGCTAGAATCAAATTTAAGTTTATCATATGAGGCCGGGCACGGTGGCT CATATATGGGATTACATGCCTGTAATCCCAGCACTTTGGGAGGCCAAGGCAATTGGATCACCTGAGGTCAGGAGTTC CAGACCAGCCTGGCCAACATGGTGAAACCCCTTCTCTACTAAAAAATACAAAAAATCAGCCAGGTGTGGTGGCACGC GTCTATAATCCCAGCTACTCAGGAGGCTGAGGCAGGAGAATCACTTGAACCCAGGAGGTGGAGGTTGCAGTGAGCTA AGATTGCACCACTGCACTCCAGCCTAGGCGACAGAGTGAGACTCCATCTCAAAAAAAAAAAAAGAAGTTTATTATAT GAATTAACTTAGTTTTACTCACACCAATACTCAGAAGTAGATTATTACCTCATTTATTGATGAGGAGCCCAATGTAC TTGTAGTGTAGATCAACTTATTGAAAGCACAAGCTAATAAGTAGACAATTAGTAATTAGAAGTCAGATGGTCTGAGC TCTCCTACTGTCTACATTACATGAGCTCTTATTAACTGGGGACTCGAAAATCAAAGACATGAAATAATTTGTCCAAG CTTACAGAACCACCAAGTAGTAAGGCTAGGATGTAGACCCAGTTCTGCTACCTCTGAAGACAGTGTTTTTTCCACAG CAAAACACAAACTCAGATATTGTGGATGCGAGAAATTAGAAGTAGATATTCCTGCCCTGTGGCCCTTGCTTCTTACT TTTACTTCTTGGCGATTGGAAGTTGTGGTCCAAGCCACAGTTGCAGACCATACTTCCTCAACCATAATTGCATTTCT TCAGGAAAGTTTGAGGGAGAAAAAGGTAAAGAAAAATTTAGAAACAACTTCAGAATAAAGAGATTTTCTCTTGGGTT ACAGAGATTGTCATATGACAAATTATAAGCAGACACTTGAGAAAACTGAAGGCCCATGCCTGCCCAAATTACCCTTT GACCCCTTGGTCAAGCTGCAACTTTGGTTAAAGGGAGTGTTTATGTGTTATAGTGTTCATTTACTCTTCTGGTCTAA CCCATTGGCTCCGTCTTCATCCTGCAGTGACCTCAGTGCCTCAGAAACATACATATGTTTGTCTAGTTTAAGTTTGT GTGAAATTCTAACTAGCGTCAAGAACTGAGGGCCCTAAACTATGCTAGGAATAGTGCTGTGGTGCTGTGATAGGTAC ACAAGAAATGAGAAGAAACTGCAGATTCTCTGCATCTCCCTTTGCCGGGTCTGACAACAAAGTTTCCCCAAATTTTA CCAATGCAAGCCATTTCTCCATATGCTAACTACTTTAAAATCATTTGGGGCTTCACATTGTCTTTCTCATCTGTAAA AAGAATGGAAGAACTCATTCCTACAGAACTCCCTATGTCTTCCCTGATGGGCTAGAGTTCCTCTTTCTCAAAAATTA GCCATTATTGTATTTCCTTCTAAGCCAAAGCTCAGAGGTCTTGTATTGCCCAGTGACATGCACACTGGTCAAAAGTA GGCTAAGTAGAAGGGTACTTTCACAGGAACAGAGAGCAAAAGAGGTGGGTGAATGAGAGGGTAAGTGAGAAAAGACA AATGAGAAGTTACAACATGATGGCTTGTTGTCTAAATATCTCCTAGGGAATTATTGTGAGAGGTCTGAATAGTGTTG TAAAATAAGCTGAATCTGCTGCCTAACATTAACAGTCAAGAAATACCTCCGAATAACTGTACCTCCAATTATTCTTT AAGGTAGCATGCAACTGTAATAGTTGCATGTATATATTTATCATAATACTGTAACAGAAAACACTTACTGAATATAT ACTGTGTCCCTAGTTCTTTACACAATAAACTAATCTCATCCTCATAATTCTATTAGCTAATACATATTATCATCCTA TATTTCAGAGACTTCAAGAAGTTAAGCAACTTGCTCAAGATCATCTAAGAAGTAGGTGGTATTTCTGGGCTCATTTG GCCCCTCCTAATCTCTCATGGCAACATGGCTGCCTAAAGTGTTGATTGCCTTAATTCATCAGGGATGGGCTCATACT CACTGCAGACCTTAACTGGCATCCTCTTTTCTTATGTGATCTGCCTGACCCTAGTAGAACTTATGAAATTTCTGATG AGAAAGGAGAGAGGAGAAAGGCAGAGCTGACTGTGATGAGTGATGAAGGTGCCTTCTCATCTGGGTACCAGTGGGGC CTCTAAGACTAAGTCACTCTGTCTCACTGTGTCTTAGCCAGTTCCTTACAGCTTGCCCTGATGGGAGATAGAGAATG GGTATCCTCCAACAAAAAAATAAATTTTCATTTCTCAAGGTCCAACTTATGTTTTCTTAATTTTTAAAAAAATCTTG ACCATTCTCCACTCTCTAAAATAATCCACAGTGAGAGAAACATTCTTTTCCCCCATCCCATAAATACCTCTATTAAA TATGGAAAATCTGGGCATGGTGTCTCACACCTGTAATCCCAGCACTTTGGGAGGCTGAGGTGGGTGGACTGCTTGGA GCTCAGGAGTTCAAGACCATCTTGGACAACATGGTGATACCCTGCCTCTACAAAAAGTACAAAAATTAGCCTGGCAT GGTGGTGTGCACCTGTAATCCCAGCTATTAGGGTGGCTGAGGCAGGAGAATTGCTTGAACCCGGGAGGCGGAGGTTG CAGTGAGCTGAGATCGTGCCACTGCACTCCAGCCTGGGGGACAGAGCACATTATAATTAACTGTTATTTTTTACTTG GACTCTTGTGGGGAATAAGATACATGTTTTATTCTTATTTATGATTCAAGCACTGAAAATAGTGTTTAGCATCCAGC AGGTGCTTCAAAACCATTTGCTGAATGATTACTATACTTTTTACAAGCTCAGCTCCCTCTATCCCTTCCAGCATCCT CATCTCTGATTAAATAAGCTTCAGTTTTTCCTTAGTTCCTGTTACATTTCTGTGTGTCTCCATTAGTGACCTCCCAT AGTCCAAGCATGAGCAGTTCTGGCCAGGCCCCTGTCGGGGTCAGTGCCCCACCCCCGCCTTCTGGTTCTGTGTAACC TTCTAAGCAAACCTTCTGGCTCAAGCACAGCAATGCTGAGTCATGATGAGTCATGCTGAGGCTTAGGGTGTGTGCCC AGATGTTCTCAGCCTAGAGTGATGACTCCTATCTGGGTCCCCAGCAGGATGCTTACAGGGCAGATGGCAAAAAAAAG GAGAAGCTGACCACCTGACTAAAACTCCACCTCAAACGGCATCATAAAGAAAATGGATGCCTGAGACAGAATGTGAC ATATTCTAGAATATATTATTTCCTGAATATATATATATATATATATACACATATACGTATATATATATATATATATA TATTTGTTGTTATCAATTGCCATAGAATGATTAGTTATTGTGAATCAAATATTTATCTTGCAGGTGGCCTCTATACC TAGAAGCGGCAGAATCAGGCTTTATTAATACATGTGTATAGATTTTTAGGATCTATACACATGTATTAATATGAAAC AAGGATATGGAAGAGGAAGGCATGAAAACAGGAAAAGAAAACAAACCTTGTTTGCCATTTTAAGGCACCCCTGGACA GCTAGGTGGCAAAAGGCCTGTGCTGTTAGAGGACACATGCTCACATACGGGGTCAGATCTGACTTGGGGTGCTACTG GGAAGCTCTCATCTTAAGGATACATCTCAGGCCAGTCTTGGTGCATTAGGAAGATGTAGGCAACTCTGATCCTGAGA GGAAAGAAACATTCCTCCAGGAGAGCTAAAAGGGTTCACCTGTGTGGGTAACTGTGAAGGACTACAAGAGGATGAAA AACAATGACAGACAGACATAATGCTTGTGGGAGAAAAAACAGGAGGTCAAGGGGATAGAGAAGGCTTCCAGAAGAAT GGCTTTGAAGCTGGCTTCTGTAGGAGTTCACAGTGGCAAAGATGTTTCAGAAATGTGACATGACTTAAGGAACTATA CAAAAAGGAACAAATTTAAGGAGAGGCAGATAAATTAGTTCAACAGACATGCAAGGAATTTTCAGATGAATGTTATG TCTCCACTGAGCTTCTTGAGGTTAGCAGCTGTGAGGGTTTTGCAGGCCCAGGACCCATTACAGGACCTCACGTATAC TTGACACTGTTTTTTGTATTCATTTGTGAATGAATGACCTCTTGTCAGTCTACTCGGTTTCGCTGTGAATGAATGAT GTCTTGTCAGCCTACTTGGTTTCGCTAAGAGCACAGAGAGAAGATTTAGTGATGCTATGTAAAAACTTCCTTTTTGG TTCAAGTGTATGTTTGTGATAGAAATGAAGACAGGCTACATGATGCATATCTAACATAAACACAAACATTAAGAAAG GAAATCAACCTGAAGAGTATTTATACAGATAACAAAATACAGAGAGTGAGTTAAATGTGTAATAACTGTGGCACAGG CTGGAATATGAGCCATTTAAATCACAAATTAATTAGAAAAAAAACAGTGGGGAAAAAATTCCATGGATGGGTCTAGA AAGACTAGCATTGTTTTAGGTTGAGTGGCAGTGTTTAAAGGGTGATATCAGACTAAACTTGAAATATGTGGCTAAAT AACTAGAATACTCTTTATTTTTTCGTATCATGAATAGCAGATATAGCTTGATGGCCCCATGCTTGGTTTAACATCCT TGCTGTTCCTGACATGAAATCCTTAATTTTTGACAAAGGGGCTATTCATTTTCATTTTATATTGGGCCTAGAAATTA TGTAGATGGTCCTGAGGAAAAGTTTATAGCTTGTCTATTTCTCTCTCTAACATAGTTGTCAGCACAATGCCTAGGCT ATAGGAAGTACTCAAAGCTTGTTAAATTGAATTCTATCCTTCTTATTCAATTCTACACATGGAGGAAAAACTCATCA GGGATGGAGGCACGCCTCTAAGGAAGGCAGGTGTGGCTCTGCAGTGTGATTGGGTACTTGCAGGACGAAGGGTGGGG TGGGAGTGGCTAACCTTCCATTCCTAGTGCAGAGGTCACAGCCTAAACATCAAATTCCTTGAGGTGCGGTGGCTCAC TCCTGTAATCACAGCAGTTTGGGACGCCAAGGTGGGCAGATCACTTGAGGTCAGGAGTTGGACACCAGCCCAGCCAA CATAGTGAAACCTGGTCTCTGCTTAAAAATATAAAAATTAGCTGGACGTGGTGACGGGAGCCTGTAATCCAACTACT TGGGAGGCTGAGGCAGGAGAATCGCTTGAACCGGGGAGGTGGAGTTTGCACTGAGCAGAGATCATGCCATTGCACTC CAGCCTCCAGAGCGAGACTCTGTCTAAAGAAAAACGAAAACAAACAAACAAACAAACAAACAAAACCCATCAAATTC CCTGACCGAACAGAATTCTGTCTGATTGTTCTCTGACTTATCTACCATTTTCCCTCCTTAAAGAAACTGTGGAACTT CCTTCAGCTAGAGGGGCCTGGCTCAGAAGCCTCTGGTCAGCATCCAAGAAATACTTGATGTCACTTTGGCTAAAGGT ATGATGTGTAGACAAGCTCCAGAGATGGTTTCTCATTTCCATATCCACCCACCCAGCTTTCCAATTTTAAAGCCAAT TCTGAGGTAGAGACTGTGATGAACAAACACCTTGACAAAATTCAACCCAAAGACTCACTTTGCCTAGCTTCAAAATC CTTACTCTGACATATACTCACAGCCAGAAATTAGCATGCACTAGAGTGTGCATGAGTGCAACACACACACACACCAA TTCCATATTCTCTGTCAGAAAATCCTGTTGGTTTTTCGTGAAAGGATGTTTTCAGAGGCTGACCCCTTGCCTTCACC TCCAATGCTACCACTCTGGTCTAAGTCACTGTCACCACCACCTAAATTATAGCTGTTGACTCATAACAATCTTCCTG CTTCTACCACTGCCCCACTACAATTTCTTCCCAATATACTATCCAAATTAGTCTTTTCAAAATGTAAGTCATATATG GTCACCTCTTTGTTCAAAGTCTTCTGATAGTTTCCTATATCATTTATAATAAAACCAAATCCTTACAATTCTCTACA ATAGTTGTTCATGCATATATTATGTTTATTACAGATACGCATATATATAGCTCTCATATAAATAAATATATATATTT ATGTGTATGTGTGTAGAGTGTTTTTTCTTACAACTCTATGATGTAGGTATTATTAGTGTCCCAAATTTTATAATTTA GGACTTCTATGATCTCATCTTTTATTCTCCCCTTCACCGAATCTCATCCTACATTGGCCTTATTGATATTCCTTGAA AATTCTAAGCATCTTACATCTTTAGGGTATTTACATTTGCCATTCCCTATGCCCTAAATATTTAATCATAGTTTCAT ATAAATGGGTTCCTCATCATCTATGGGTACTCTCTCAGGTGTTAACTTTATAGTGAGGACTTTCCTGCCATACTACT TAAAGTAGCGATACCCTTTCACCCTGTCCTAATCACACTCTGGCCTTCATTTCAGTTTTTTTTTTTTCTCCATAGCA CCTAATCTCATTGGTATATAACATGTTTCATTTGCTTATTTAATGTCAAGCTCTTTCCACTATCAAGTCCATGAAAA CAGGAACTTTATTCCTCTATTCTGTTTTTGTGCTGTATTCTTAGCAATTTTACAATTTTGAATGAAATGAATGAGCA GTCAAACACATATACAACTATAATTAAAAGGATGTATGCTGACACATCCACTGCTATGCACACACAAAGAAATCAGT GGAGTAGAGCTGGAAGCGCTAAGCCTGCATAGAGCTAGTTAGCCCTCCGCAGGCAGAGCCTTGATGGGATTACTGAG TTCTAGAATTGGACTCATTTGTTTTGTAGGCTGAGATTTGCTCTTGAAAACTTGTTCTGACCAAAATAAAAGGCTCA AAAGATGAATATCGAAACCAGGGTGTTTTTTACACTGGAATTTATAACTAGAGCACTCATGTTTATGTAAGCAATTA ATTGTTTCATCAGTCAGGTAAAAGTAAAGAAAAACTGTGCCAAGGCAGGTAGCCTAATGCAATATGCCACTAAAGTA AACATTATTCCATAGGTGTCAGATATGGCTTATTCATCCATCTTCATGGGAAGGATGGCCTTGGCCTGGACATCAGT GTTATGTGAGGTTCAAAACACCTCTAGGCTATAAGGCAACAGAGCTCCTTTTTTTTTTTTCTGTGCTTTCCTGGCTG TCCAAATCTCTAATGATAAGCATACTTCTATTCAATGAGAATATTCTGTAAGATTATAGTTAAGAATTGTGGGAGCC ATTCCGTCTCTTATAGTTAAATTTGAGCTTCTTTTATGATCACTGTTTTTTTAATATGCTTTAAGTTCTGGGGTACA TGTGCCATGGTGGTTTGCTGCACCCATCAACCCGTCATCTACATTAGGTATTTCTCCTAATGCTATCCTTCCCCTAG CCCCCCACCCCCAACAGGCCCCAGTGTGTGATGTTCCCCTCCCTGTGTCCATGGATCACTGGTTTTTTTTTTTTTTT TTTTTTTTTTTTTAAAGTCTCAGTTAAATTTTTGGAATGTAATTTATTTTCCTGGTATCCTAGGACCTGCAAGTTAT CTGGTCACTTTAGCCCTCACGTTTTGATGATAATCACATATTTGTAAACACAACACACACACACACACACACACACA TATATATATATAAAACATATATATACATAAACACACATAACATATTTATCGGGCATTTCTGAGCAACTAACTCATGC AGGACTCTCAAACACTAACCTATAGCCTTTTCTATGTATCTACTTGTGTAGAAACCAAGCGTGGGGACTGAGAAGGC AATAGCAGGAGCATTCTGACTCTCACTGCCTTTGGCTAGGTCCCTCCCTCATCACAGCTCAGCATAGTCCGAGCTCT TATCTATATCCACACACAGTTTCTGACGCTGCCCAGCTATCACCATCCCAAGTCTAAAGAAAAAAATAATGGGTTTG CCCATCTCTGTTGATTAGAAAACAAAACAAAATAAAATAAGCCCCTAAGCTCCCAGAAAACATGACTAAACCAGCAA GAAGAAGAAAATACAATAGGTATATGAGGAGACTGGTGACACTAGTGTCTGAATGAGGCTTGAGTACAGAAAAGAGG CTCTAGCAGCATAGTGGTTTAGAGGAGATGTTTCTTTCCTTCACAGATGCCTTAGCCTCAATAAGCTTGCGGTTGTG GAAGTTTACTTTCAGAACAAACTCCTGTGGGGCTAGAATTATTGATGGCTAAAAGAAGCCCGGGGGAGGGAAAAATC ATTCAGCATCCTCACCCTTAGTGACACAAAACAGAGGGGGCCTGGTTTTCCATATTTCCTCATGATGGATGATCTCG TTAATGAAGGTGGTCTGACGAGATCATTGCTTCTTCCATTTAAGCCTTGCTCACTTGCCAATCCTCAGTTTTAACCT TCTCCAGAGAAATACACATTTTTTATTCAGGAAACATACTATGTTATAGTTTCAATACTAAATAATCAAAGTACTGA AGATAGCATGCATAGGCAAGAAAAAGTCCTTAGCTTTATGTTGCTGTTGTTTCAGAATTTAAAAAAGATCACCAAGT CAAGGACTTCTCAGTTCTAGCACTAGAGGTGGAATCTTAGCATATAATCAGAGGTTTTTCAAAATTTCTAGACATGA GATTCAAAGCCCTGCACTTAAAATAGTCTCATTTGAATTAACTCTTTATATAAATTGAAAGCACATTCTGAACTACT TCAGAGTATTGTTTTATTTCTATGTTCTTAGTTCATAAATACATTAGGCAATGCAATTTAATTAAAAAAACCCAAGA ATTTCTTAGAATTTTAATCATGAAAATAAATGAAGGCATCTTTACTTACTCAAGGTCCCAAAAGGTCAAAGAAACCA GGAAAGTAAAGCTATATTTCAGCGGAAAATGGGATATTTATGAGTTTTCTAAGTTGACAGACTCAAGTTTTAACCTT CAGTGCCCATGATGTAGGAAAGTGTGGCATAACTGGCTGATTCTGGCTTTCTACTCCTTTTTCCCATTAAAGATCCC TCCTGCTTAATTAACATTCACAAGTAACTCTGGTTGTACTTTAGGCACAGTGGCTCCCGAGGTCAGTCACACAATAG GATGTCTGTGCTCCAAGTTGCCAGAGAGAGAGATTACTCTTGAGAATGAGCCTCAGCCCTGGCTCAAACTCACCTGC AAACTTCGTGAGAGATGAGGCAGAGGTACACTACGAAAGCAACAGTTAGAAGCTAAATGATGAGAACACATGGACTC ATAGAGGGAAACAACGCATACTGGGGCCTATCAGAGGGTGGAGGGTGAGAGAAGGAGAGGATCAGGAAAAATCACTA ATGGATGCTAAGCGTAATACCTGAGTGATGAGATCATCTATACAACAAACCCCCTTGACATTCATTTATCTATGTAA CAAACCTGCACATCCTGTACACGTACCCCTGAACTTAAAATAAAAGTTGAAAACAAGAAAGCAACAGTTTGAACACT TGTTATGGTCTATTCTCTCATTCTTTACAATTACACTAGAAAATAGCCACAGGCTCCTGCAAGGCAGCCACAGAATT TATGACTTGTGATATCCAAGTCATTCCTGGATAATGCAAAATCTAACACAAAATCTAGTAGAATCATTTGCTTACAT CTATTTTTGTTCTGAGAATATAGATTTAGATACATAATGGAAGCAGAATAATTTAAAATCTGGCTAATTTAGAATCC TAAGCAGCTCTTTTCCTATCAGTGGTTTACAAGCCTTGTTTATATTTTTCCTATTTTAAAAATAAAAATAAAGTAAG TTATTTGTGGTAAAGAATATTCATTAAAGTATTTATTTCTTAGATAATACCATGAAAAACATTCAGTGAAGTGAAGG GCCTACTTTACCCAACAAGAATCTAATTTATATAATTTTTCATACTAATAGCATCTAAGAACAGTACAATATTTGAC TCTTCAGGTTAAACATATGTCATAAATTAGCCAGAAAGATTTAAGAAAATATTGGATGTTTCCTTGTTTAAATTAGG CATCTTACAGTTTTTAGAATCCTGCATAGAACTTAAGAAATTACAAATGCTAAAGCAAACCCAAACAGGCAGGAATT AATCTTCATCGAATTTGGGTGTTTCTTTCTAAAAGTCCTTTATACTTAAATGTCTTAAGACATACATAGATTTTATT TTACTAATTTTAATTATACAGACAATAAATGAATATTCTTACTGATTACTTTTTCTGACTGTCTAATCTTTCTGATC TATCCTGGATGGCCATAACACTTATCTCTCTGAACTTTGGGCTTTTAATATAGGAAAGAAAAGCAATAATCCATTTT TCATGGTATCTCATATGATAAACAAATAAAATGCTTAAAAATGAGCAGGTGAAGCAATTTATCTTGAACCAACAAGC ATCGAAGCAATAATGAGACTGCCCGCAGCCTACCTGACTTCTGAGTCAGGATTTATAAGCCTTGTTACTGAGACACA AACCTGGGCCTTTCAATGCTATAACCTTTCTTGAAGCTCCTCCCTACCACCTTTAGCCATAAGGAAACATGGAATGG GTCAGATCCCTGGATGCAAGCCAGGTCTGGAACCATAGGCAGTAAGGAGAGAAGAAAATGTGGGCTCTGCAACTGGC TCCGAGGGAGCAGGAGAGAATCAACCCCATACTCTGAATCTAAGAGAAGACTGGTGTCCATACTCTGAATGGGAAGA ATGATGGGATTACCCATAGGGCTTGTTTTAGGGAGAAACCTGTTCTCCAAACTCTTGGCCTTGAGATACCTGGTCCT TATTCCTTGGACTTTGGCAATGTCTGACCCTCACATTCAAGTTCTGAGGAAGGGCCACTGCCTTCATACTGTGGATC TGTAGCAAATTCCCCCTGAAAACCCAGAGCTGTATCTTAATTGTTTAAAAAAATTATATTATCTCAAGGACTGTTCT TCTCTGAGTAGCCAAGCTCAGCTTGGTTCAAGCTACAAGCAGCTGAGCTGCTTTTTGTCTAGTCATTGTTCTTTTAT TTCAGTGGATCAAATACGTTCTTTCCAAACCTAGGATCTTGTCTTCCTAGGCTATATATTTTGTCCCAGGAAGTCTT AATCTGGGGTCCACAGAACACTAGGGGGCTGGTGAAGTTTATAGAAAAAAAATCTGTATTTTTACTTACATGTAACT GAAATTTAGCATTTTCTTCTACTTTGAATGCAAAGGACAAACTAGAATGACATCATCAGTACCTATTGCATAGTTAT AAAGAGAAACCACAGATATTTTCATACTACACCATAGGTATTGCAGATCTTTTTGTTTTTGTTTTTGTTTGAGATGG AGTTTCGCTCTTATTGCCCAGGCTGGAGTGCAGTGGCATGATTTCGGCTCACTGCAACCTCCCCTTCCTGCATTCAA GCAATTCTCCTGCCTTGGCCTCCAGAGTAGCTGGGGATTACAGGCACCTGCCACCATGCCAGTCTAATTTTTGTATT TTTAGTAGAGATGGGGTTTCGCCATGTTGGCCAGGCTGGTCTTGAACTCCTGACCTCAGATGATCTGCCCGCCTTGG CCTCCTGAAGTGCTGGGATTATAGGTGTGAGCCACCACGCCTGGCCCATTGCAGATATTTTTAATTCACATTTATCT GCATCACTACTTGGATCTTAAGGTAGCTGTAGACCCAATCCTAGATCTAATGCTTTCATAAAGAAGCAAATATAATA AATACTATACCACAAATGTAATGTTTGATGTCTGATAATGATATTTCAGTGTAATTAAACTTAGCACTCCTATGTAT ATTATTTGATGCAATAAAAACATATTTTTTTTAGCACTTACAGTCTGCCAAACTGGCCTGTGACACAAAAAAAGTTT AGGAATTCCTGGTTTTGTCTGTGTTAGCCAATGGTTAGAATATATGCTCAGAAAGATACCATTGGTTAATAGCTGAA AGAAAATGGAGTAGAAATTCAGTGGCCTGGAATAATAACAATTTGGGCAGTCATTAAGTCAGGTGAAGACTTCTGGA ATCATGGGAGAAAAGCAAGGGAGACATTCTTACTTGCCACAAGTGTTTTTTTTTTTTTTTTTTTATCACAAACATAA GAAAATATAATAAATAACAAAGTCAGGTTATAGAAGAGAGAAACGCTCTTAGTAAACTTGGAATATGGAATCCCCAA AGGCACTTGACTTGGGAGACAGGAGCCATACTGCTAAGTGAAAAAGACGAAGAACCTCTAGGGCCTGAACATAGGAA ATTGTAGGAACAGAAATTCCTAGATCTGGTGGGGCAAGGGGAGCCATAGGAGAAAGAAATGGTAGAAATGGATGGAG ACGGAGGCAGAGGTGGGCAGATCATGAGGTCAAGAGATCGAGACCATCCTGGCAAACATGGTGAAATCCCGTCTCTA CTAAAAATAAAAAAATTAGCTGGGCATGGTGGCATGCGCCTGTAGTCCCAGCTGCTCGGGAGGCTGAGGCAGGAGAA TCGTTTGAACCCAGGAGGCGAAGGTTGCAGTGAGCTGAGATAGTGCCATTGCACTCCAGTCTGGCAACAGAGTGAGA CTCCGTCTCAAAAAAAAAAAAAAGAAAGAAAGAAAAGAAAAAGAAAAAAGAAAAAATAAATGGATGTAGAACAAGCC AGAAGGAGGAACTGGGCTGGGGCAATGAGATTATGGTGATGTAAGGGACTTTTATAGAATTAACAATGCTGGAATTT GTGGAACTCTGCTTCTATTATTCCCCCAATCATTACTTCTGTCACATTGATAGTTAAATAATTTCTGTGAATTTATT CCTTGATTCTAAAATATGAGGATAATGACAATGGTATTATAAGGGCAGATTAAGTGATATAGCATAAGCAATATTCT TCAGGCACATGGATCGAATTGAATACACTGTAAATCCCAACTTCCAGTTTCAGCTCTACCAAGTAAAGAGCTAGCAA GTCATCAAAATGGGGACATACAGAAAAAAAAAAGGACACTAGAGGAATAATATACCCTGACTCCTAGCCTGATTAAT ATATCGATTCACTTTTTTCTCTGTTTGATGACAAATTCTGGCTTTAAATAATTTTAGGATTTTAGGCTTCTCAGCTC CCTTCCCAGTGAGAAGTATAAGCAGGACAGACAGGCAAGCAAGAAGAGAGCCCCAGGCAATACTCACAAAGTAGCCA GTGTCCCCTGTGGTCATAGAGAAATGAAAAGAGAGAGGATTCCCTGGAAGCACTGGATGTAATCTTTTCTGTCTGTC CTCTCTAGGGAATCACCCCAAGGTACTGTACTTTGGGATTAAGGCTTTAGTCCCACTGTGGACTACTTGCTATTCTG TTCAGTTTCTAGAAGGAACTATGTACGGTTTTTGTCTCCCTAGAGAAACTAAGGTACAGAAGTTTTGTTTACAATGC ACTCCTTAAGAGAGCTAGAACTGGGTGAGATTCTGTTTTAACAGCTTTATTTTCTTTTCCTTGGCCCTGTTTTTGTC AACTGTCACCACCTTTAAGGCAAATGTTAAATGTGCTTTGGCTGAAACTTTTTTTCCTATTTTGAGATTTGCTCCTT TATATGAGGCTTTCTTGGAAAAGGAGAATGGGAGAGATGGATATCATTTTGGAAGATGATGAAGAGGGTAAAAAAGG GGACAAATGGAAATTTGTGTTGCAGATAGATGAGGAGCCAACAAAAAAGAGCCTCAGGATCCAGCACACATTATCAC AAACTTAGTGTCCATCCATCACTGCTGACCCTCTCCGGACCTGACTCCACCCCTGAGGACACAGGTCAGCCTTGACC AATGACTTTTAAGTACCATGGAGAACAGGGGGCCAGAACTTCGGCAGTAAAGAATAAAAGGCCAGACAGAGAGGCAG CAGCACATATCTGCTTCCGACACAGCTGCAATCACTAGCAAGCTCTCAGGCCTGGCATCATGGTGCATTTTACTGCT GAGGAGAAGGCTGCCGTCACTAGCCTGTGGAGCAAGATGAATGTGGAAGAGGCTGGAGGTGAAGCCTTGGGCAGGTA AGCATTGGTTCTCAATGCATGGGAATGAAGGGTGAATATTACCCTAGCAAGTTGATTGGGAAAGTCCTCAAGATTTT TTGCATCTCTAATTTTGTATCTGATATGGTGTCATTTCATAGACTCCTCGTTGTTTACCCCTGGACCCAGAGATTTT TTGACAGCTTTGGAAACCTGTCGTCTCCCTCTGCCATCCTGGGCAACCCCAAGGTCAAGGCCCATGGCAAGAAGGTG CTGACTTCCTTTGGAGATGCTATTAAAAACATGGACAACCTCAAGCCCGCCTTTGCTAAGCTGAGTGAGCTGCACTG TGACAAGCTGCATGTGGATCCTGAGAACTTCAAGGTGAGTTCAGGTGCTGGTGATGTGATTTTTTGGCTTTATATTT TGACATTAATTGAAGCTCATAATCTTATTGGAAAGACCAACAAAGATCTCAGAAATCATGGGTCGAGCTTGATGTTA GAACAGCAGACTTCTAGTGAGCATAACCAAAACTTACATGATTCAGAACTAGTGACAGTAAAGGACTACTAACAGCC TGAATTGGCTTAACTTTTCAGGAAATCTTGCCAGAACTTGATGTGTTTATCCCAGAGAATTGTATTATAGAATTGTA GACTTGTGAAAGAAGAATGAAATTTGGCTTTTGGTAGATGAAAGTCCATTTCAAGGAAATAGAAATGCCTTATTTTA TGTGGGTCATGATAATTGAGGTTTAGAAGAGATTTTTGCAAAAAAAATAAAAGATTTGCTCAAAGAAAAATAAGACA CATTTTCTAAAATATGTTAAATTTCCCATCAGTATTGTGACCAAGTGAAGGCTTGTTTCCGAATTTGTTGGGGATTT TAAACTCCCGCTGAGAACTCTTGCAGCACTCACATTCTACATTTACAAAAATTAGACAATTGCTTAAAGAAAAACAG GGAGAGAGGGAACCCAATAATACTGGTAAAATGGGGAAGGGGGTGAGGGTGTAGGTAGGTAGAATGTTGAATGTAGG GCTCATAGAATAAAATTGAACCTAAGCTCATCTGAATTTTTTGGGTGGGCACAAACCTTGGAACAGTTTGAGGTCAG GGTTGTCTAGGAATGTAGGTATAAAGCCGTTTTTGTTTGTTTGTTTGTTTTTTCATCAAGTTGTTTTCGGAAACTTC TACTCAACATGCCTGTGTGTTATTTTGTCTTTTGCCTAACAGCTCCTGGGTAACGTGATGGTGATTATTCTGGCTAC TCACTTTGGCAAGGAGTTCACCCCTGAAGTGCAGGCTGCCTGGCAGAAGCTGGTGTCTGCTGTCGCCATTGCCCTGG CCCATAAGTACCACTGAGTTCTCTTCCAGTTTGCAGGTCTTCCTGTGACCCTGACACCCTCCTTCTGCACATGGGGA CTGGGCTTGGCCTTGAGAGAAAGCCTTCTGTTTAATAAAGTACATTTTCTTCAGTAATCAAAAATTGCAATTTTATC TTCTCCATCTTTTACTCTTGTGTTAAAAGGAAAAAGTGTTCATGGGCTGAGGGATGGAGAGAAACATAGGAAGAACC AAGAGCTTCCTTAAGAAATGTATGGGGGCTTGTAAAATTAATGTGGATGTTATGGGAGAATTCCCAAGATTCCCAAG GAGGATGATATGATGGAGAAAAATCTTTATCGGGGTGGGAAAATGGTTAATTAAGTGGCAGAGACTCCTAGGCAGTT TTTACTGCACCGGGGAAAGAAGGAGCTGTTGTGGTACCTGAGAAAGCAGATTTGTGGTACATGTCACTTTTCATTAA AAACAAAAACAAAACAAAACAAAACTTCATAGATATCCAAGATATAGGCTGAGAATTACTATTTTAATTTACTCTTA TTTACATTTTGAAGTAGCTAGCTTGTCACATGTTTTATGAAATTGATTTGGAGATAAGATGAGTGTGTATCAACAAT AGCCTGCTCTTTCCATGAAGGATTCCATTATTTCATGGGTTAGCTGAAGCTAAGACACATGATATCATTGTGCATTA TCTTCTGATACAATGTAACATGCACTAAAATAAAGTTAGAGTTAGGACCTGAGTGGGAAAGTTTTTGGAGAGTGTGA TGAAGACTTTCCGTGGGAGATAGAATACTAATAAAGGCTTAAATTCTAAAACCAGCAAGCTAGGGCTTCGTGACTTG CATGAAACTGGCTCTCTGGAAGTAGAAGGGAGAGTAAGACATACGTAGAGGACTAGGAAAGACCAGATAGTACAGGG CCTGGCTACAAAAATACAAGCTTTTACTATGCTATTGCAATACTAAACGATAAGCATTAGGATGTTAAGTGACTCAG GAAATAAGATTTTGGGAAAAAGTAATCTGCTTATGTGCACAAAATGGATTCAAGTTTGCAGATAAAATAAAATATGG ATGATGATTCAAGGGGACAGATACAATGGTTCAAACCCAAGAGGAGCAGTGAGTCTGTGGAATTTTGAAGGATGGAC AAAGGTGGGGTGAGAAAGACATAGTATTCGACCTGACTGTGGGAGATGAGAAGGAAGAAGGAGGTGATAAATGACTG AAAGCTCCCAGACTGGTGAAGATAACAGGAGGAAACCATGCACTTGACCCTGGTGACTCTCATGTGTGAAGGGTAGA GGGATATTAACAGATTTACTTTTTAGGAAGTGCTAGATTGGTCAGGGAGTTTTGACCTTCAGGTCTTGTGTCTTTCA TATCAAGGAACCTTTGCATTTTCCAAGTTAGAGTGCCATATTTTGGCAAATATAACTTTATTAGTAATTTTATAGTG CTCTCACATTGATCAGACTTTTTCCTGTGAATTACTTTTGAATTTGGCTGTATATATCCAGAATATGGGAGAGAGAC AAATAATTATTGTAGTTGCAGGCTATCAACAATACTGGTCTCTCTGAGCCTTATAACCTTTCAATATGCCCCATAAA CAGAGTAAACAGGGATTATTCATGGCACTAAATATTTTCACCTAGGTCAGTCAACAAATGGAGGCAATGTGCATTTT TTGATACATATTTTTATATATTTATGGGGCATGTGATACTTACATGCCTAGAACATGTGACTGATTAAGTCTAGATA TTTAGGATATCCATTACTTTGAGCATTTATCATTTCTATGTATTGAGAAAATTTCAAATCCTCATTTCTGACCATTT TGAAATATATAATAAATAGTAATTAACTATAGTCACCCTACTCAAATATCAACATTATAAACTAACTAATCCTTCTT TCCACTTTTTTACCAACCAACATCTCTTAAATCCCCTGCCATACACATCACACATTTTTCAGCTCTGATAACTATCA TTCTACTCTCATACCACCATGAGACCACTTTTTTAGCTCCACAGATGAATAAAAACATGTGATATTTGACTTTCTGT ATCTGGCTTATTTTATTATCTATCTCTTTGGCATACCAAGAGTTTGTTTTTGTTCTGCTTCAGGGCTTTCAATTAAC ATAATGACCTCTGGTTCCATCCATGTTGCTACAAATGACAAGATTTCATTCTTTTTCATGGCAAAATAGTACTGTGC AAAAAATACAATTTTTTAATCCGTTCATCTGTTGATAGACACTTAGGTTGATCCCAAACCTTAACTATTGTGAATAG GTGCTTCAATAAACATGAGTGTAATGTGTCCATTGGATATACTGATTTCCTTTCTTTTGGATAAATAACCACTAGTG AGATTGCTGGATTGTATGATAGTTCTGTTTTTAGTTTATTGAGAAATCTTCATACTGTTTTCCATAATGGTTGTACT ATTTTACATTCCCACCAACAGTGTGTAAGAAAGAGTTCCCTTTTCTCCATATCCTCACAAGGATCTGTTATTTTTTG TCTTTTTTGTTAATAGCATTTTAACTAGAGTAAGTAGATATCTCATTGTAGTTTTGATTTGCATTTCCCTGATCATT AGTGATGTTGAGATTTTTTCATATGTTTGTTGGTCATTTGTATATCTTTTTCTGAGATTGTCTGTTCATGTCCTTAT CCTACTTTTATTGGGATTGTTGTTATTTTCTTGATAATCATTGTGTCATTTTAGAGCCTGGATATTATTCTTTTGTC AGATGTATAGATTGTGAAGATTTTCTCCTCTGTGGGTTGTCTGTTTATTCTGCAGACTCTTCCTTTTGCCATGCAAA AGCTCTTTAGTTTAATTTAGTCCCAGATATTTTCTTTGTTTTTATGTGTTTGCATTTGTGTTCTTGTCATGAAATCC TTTCCTAAGCCAATGTGTAGAAGGGTTTTTCCGATGTTATTTTCTAGAATTGTTACAGTTTCAGGCTTAGATTTAAG TCCTTGATCCATCTTAAGTTGATTTTTGTATAAGGTGAGAGATGAAGATCCAGTTTCATTCTCCTACATGTAGCTTG CCAGCTATCCCGACTCATTTGTTGAATAGGGTGCCCTTTCCCATTTATGTTTTTGTTTGCTTTGTCAAAGATCAGTT CGGATGTAAGTATTTGAGTTTATTTCTGGGTTCTCTATTCTGTTCCATTGGTCCGATGTGCCTATTTGTACACCAGC ATCATGCTGTGTTTTTGGTGACTATGGCCTTATTGTATAGTTTGAAATGAGGTAATGTAATGCCATTCAGATTTGTT CTTTTTTTTAGACTTGCTTGTTTATTGGGCTCTTTTTTGGTTCCATAAGAATTTTAGGATTGTTTTTTCTAGTTCTG TGAAGGCTAATGGTGGTATTTATGGGAATTGCAATGCAATTTGTAGGTTGCTTCTGGCATTATGGCCATTTTCACAA TATTGATTCTACCCATCTATGAGAATGGCATGTGTTTCCATTTGTTTGTGTCTTATATGATTACTATCAGCCGTGTT TTGTAGTTTTCCTTGTAGATGTCTTTCACCTCCTTGGTTAGGTATATATTCCTAAGTTTTTGTTTTGTTTTGTTTTG TTTTTTGCAGCTATTGTAAAAGGGGTTGAGTTATTGATTTTATTCTCATCTTGGTCATTGCTGGTATGTAAGAAAGC AACTCATTGGTGTACGTTAATTTTGTATCCAGAAACTTTGCTGAATTATTTTATCAGTTCTAGGGGGTTTTGGAGGA GTCTTTAGAGTTTTCTACATACACAATCATATCATCAGCAAACAGTGACAGTTTGACTTTCTCTTTAACAATTTGGA TGTGCTTTACTTGTTTCTCTTGTCTGATTGCTCTTGCTAGGACTTCCAGTAATATGTTAAAGAGAAGTGGTGAGAGT GGGTATCCTTGTCTCATTCCAGTTTTCAGACAGAATGCTTTTAACTTTTTCCCATTCAATATAATGTTGGCTGTGTG TTTACCATAGCTGGCTTTTATTACATTGAGGTATGTCCTTTGTAAACCGATTTTGCTGAGTTTTAGTCATAAAGTGA TGTTGAATTTTGTTGAATGCAGTTTCTGTGGCTATTGAGATAATCACATGATTTTTGTTTCCAATTCTCTTTATGTT GTGTATCACACTTATTGACTTGCGTATGTTAAACCATCCGTGCATCCCTCGCATGAAACCACTTGATCATGGGTTTT GATATGCCGTGTGGGATGCTATTAGCTATATTTTGTCAAGGATGTTGGCATCTATGTTCATCAGGGATATTGATCTG TAGTGTTTTTTTTTTTTGGTTATGTTCTTTCCCAGTTTTGGTATTAAGGTGATACTGGCTTCATAGAATGATTTAGG GAGGATTCTCTCTTTCTCTATCTTGTAGAATACTGTCAATAGGATTGGTATCAATTCTTCTTTGAATGTCTGGTAGA ATTCGAACGTCTCCTTTAGGTTTTCTAGTTTATTCATGTAAAGGTGTTCATAGTAACCTTGAATAATCTTTTGTATT TCTGTGGTATCAGTAATAGTATCTCCTGTTTTGTTTCTAACTGAGTTTATTTGCACTTCTCTCCTCTTTTCTTGGTT AATCTTGCTAATGGTCTATCAGTTTTATTTATCTTTTCAAAGAACCAGCTTTTTATTTCATTTAGCTTTTGTATTTT TTTGCAGTTGTTTTAATTTCATTTAGTTCTCCTCTTATCTTAGTTATTCCCTTTCTTTTGCTGGGTTTTGGTTCTGT TTGTTTTTGTTTCTCTAGTTTCTTGTGGTGTGACCTTATATTGTCTGTCCTCTTTCAGACTCTTTGACATCGACATT TAGGGCTGTGAACTTTCCTTTTAGCACCATCTTTGCTGTATCCTAGAGGTTTTGATAGGTGTGTCACTATTGTCGGT CAGTTCAAGTAATTTTGTTGTTCTTATTATACTTTAAGTTCTGGGATACATGTGCAGAATGTGCAGGTTTGTTACAT AGGTATAGATGTGCCATGGTGGTTTGCTGCTCCCATCAACCTGTCATCTACATTAGGTATTTCTTTTAATGTTATCC CTCTCCTAACCCCCTCACCCCCCGACAGGCCCTGGTGTGTGATGTTCCCCTCCCTGTGTCCATGTGTTCTCATTGTT CAACTCCCACTTATGAGTGAGAACGTGTGGTGTTTGGTTTCTCTGTTCCTGTGTTAGTTTGCTCAGAATGATGTTTC CACCTTCACCATGTCCCTGCAAAGACATGAACTCATCATTTTATGGCTGCATATATTCCATGGTGTATATGTGCCAC ATTTTCTTTATCCATTATATCGCTGATGGCCATTTGGGTTGGTTCCAAGTCTTTGGTATTGTGAATAGTGCCGCAAT AAACATACGTGTGCACATGTCTTTATAGTAGAATGATTTCTAATTCTTTGGGTATATACCCAGTAATGGGATTGCTG GGTCAAACAGTATTTCTGGTTCTAGATCCTTGAGGAATTGCCACACTGTCTTCCACAATGGTTGAACTAATTTACAC ACCCATCAACAGTGTAAAATTTTTCCTATTCTTCCACATCCTCTCCAGCACCTTTTGTTTCCTGACTTTTTAATAAT TGCCATTCTAACTGGCATGAGATGGTATCTCATTGTGGTTTTGATTTGCATTTCTCTAATGACCAGTGATGATGAGC TTCTTTTCATGTGTTTCTTGGCCACATAAATGACTTCTTTAGAGAAGCATCTGTTCATATCCTTTGTCCACTTTTTG ATGGGGTCGTTAGGTTTTTTCTTGTAAATTTGTTGAAGTTCTTTGTAGATTTTGGATGTTAGCCCTTTGTCAGATGG ATAGATTGGCAAAAATTTTCTCCCATTCTGTAGGTTGCCTGTTCACTCTGATGATAGTCTTTTGCTGTGCAGAAGCT CTTTAGTTTAATTAGATCCCATATGTCAATTTTGGCCTTTGTTGTCATTGCTTTTGATGTTTAGTCGTGGAATTTTG CCCATGCCTATGTCCTGAATGGTATTGCCTAGGTTATCTTCTAGGATTTTTATGGTTTTAGGTTGCACATTTAAGTC TTTAATCCACCTTGAGTTAATTTTTGTATAAGGTGTAAGGAAGGGGTACAGTTTCAGTTTTATGCATATTGCTAGCC AGTTTTTCCAGCACCATTTATTAAATAGGGAATTCTTTCTCCATTGCTTTTGTGATGTTTGTCAAAGATCAGATGGT CGTAGATGTGTGGCATTATTTCTGAGGCTTCTGTTCTGTTCCACTGGTCTATATATCTGTTTTGGTACCAGTACCAT GCTGTTTTTGTTACTGTAGCCTTGTAGTATAGCTTGAAGTCAGGTAGCATCATGCCTCCAGCTTTGTTCTTTTTGTT TAGGATTGTCTTGGCTATATGGGCTCTTTTTTGATTCCATATGACATTTAAAGTAGTTTTTTCTAATTCTTTGAAAA AAGTCAGTGGTAGCTTGATGGGGATAGCATTGAATCTATAAATTACTTTGGGCAGTATGGCCATTTTAAAGATATTG ATTCTTTCTATCTATGAGCATGGAATGTTTTTCCATTTGTTTGTGTCCTCTCTTATTTCCTTGAGCAGTGAGTGGTT TGTAGCTCTCCTTGAAGAGGTTCTTCACATCCCTTATAAGTTGTATTTCTAGGTATTTTATTTTATTCTCTTTGCAG CAATTGTGAATGGGAGTTCACCCATGATTTGGCTCTCTGCTTGTCTATTATTGGTGTATAGGAATGCTTGTGATTTT TGCACACTGATTTTGTATCTTGAGACTTTGCTGAAGCTGTTTATCAGCTTAAGATTTTGGGCTGAGATGACAGGGTC TTCTAAATATACAATCATGTCATCTGCAAACAGAGACAATTTGACTTCCTCTCTTCCTATTTGAATATGCTTTATTT CTTTCTCTTGCCTGATTGTCCTGGCGAGAACTTCCAATACTATGTTGAGTAAGAGTGGCGAGAGGGCATCCTTGTCT TGTGCCGGTTTTCAAAGCAAATGATTTTTAAATTTCCGTCTTGATTTCATTGTTGACCCAATGATCATTCAGGAGCA GGTTATTTAATTTCCCTGTATTTGCATGGTTTTGAAGGTTCCTTTTGTAGTTGATTTCCAATTTTATTCTACTGTGG TCTGAGAGAGTGCTTGATATAATTTCAATTTTTAAAAATTTATTGAGGCTTGTTTTGTGGCATATCATATGGCCTAT CTTGGAGAAAGTTCCATGTGCTGATGAATAGAATGTGTATTCTGCAGTTGTTGGGTAGAATGTCCTGTAAATATCTG TTAAGTCCATTTGTTCTTTAAATCCATTGTTTCTTTGTAGACTGTCTTGATGACCTGCCTAGTGCAGTCAGTGGAGT ATTGAAGTCCCCCACTATTATTATGTTGCTGTCTAGTAGTAATTGTTTTATAAATTTGGGATCTCCAGTATTAGATG CATATATATTAAGAATTGTAATATTCTCCCATTGGACAAGGGCTTTTATCATTATATGATGTCCCTCTTTGTCTTTT TTAACTGCTGTTTCTTTAAAGTTTGTTTTGTCTGACATAAGAATAGCTGCTTTGGCTCGCTTTTGGTGTCCATTTGT GTGGAATGTCATTTTCCACCCCTTTACCTTAAGTTTATGTGAGTCCTTATGTGTTAGGTGAGTCTCCTGAAGGCGGC AGATAACTGGTTGGTGAATTCTATTCATTCTGCAATTCTGTATCTTTTAAGTGGAGCATTTAGTCCATTTACATTCA ACATCAGTATTGAGGTGTGAGGTGACTATTCCATTCTTCGTGGTATTTGTTGCCTGTGTATCTTTTTATCTGTATTT TTGTTGTATATGTCCTATGGGATTTATGCTTTAAAGAGGTTCTGTTTTGATGTGCTTCCAGGGTTTATTTCAAGATT TAGAGCTCCTTTTATCATTCTTGTAGTGTTGGCTTGGTAGTGCCGAATTCTCTCAGCATTTGTTTTTCTGAAAAACA CTGTGTATTTTCTTCATTTGTGAAGCTTAGTTTCACTGGATATAAAATTCTTGGCTGATAATTGTTTTGTTTAAGAA GGCTGAAGATAGGGCCATATTCACTTCTAGCTTTTACGGTTTCTGCTGAGAAATCTGCTGTTAATCTGATAGGTTTT CTTTCATAGGTTACCTGGTAGTTTCACCTCACAGCTCTTAAGATTCTCTTTGTCTTTAGATAACTTTGGATACTCTG ATGACAATGTACCTAGGCAATGATATTTTTGCAATGAATTTCCCAGGTGTTTATTGAGCTTCTTTGTATTTGGATAT CTAGGTCTCTAGCAAGGAGGGGGAAGTTTTCCTTGATTATTTCCATGGACAAGTTTTCCAAACTTTTAGATTTCTCT TCTTTCTCAGGAATGCTGATTATTCTTAGGTTTGATTGTTTAACATAATCCCAGATTTCTTGGAGGCTTTGTTCATA TTTTCTTATTCTTTTTTCTTTGTCTTTGTTGGATTGGGTAATTCAAAAACTTTGTCTTCAAGCTCTGAATTTCTTCT GCTTGGATTCTATTGCTGAGACTTTCTAGAGCATTTTGCATTTCTATAAGTGCATCCATTCATCCATTGTTTCCTGA AGTTTTGAATGTTTTTTATTTATGCTATCTCTTTAACTGAAGATTTCTCCCCTCATTTCTTGTATCATATTTTTGGT TTTTTTAAAATTGGACTTCACCTTCCTCGGATGCCTCCTTGATTAGCTTAATAACTGACCTTCTGAATTATTTTTCA GGTAAATCAGGGATTTCTTCTTGGTTTGGATGCATTGCTGGTGAGCTAGTATGATTTTTTGGGGGGTGTTAAAGAAC CTTGTTTTTCATATTACCAGAGTTAGTTTTCTGGTTCCTTCTCACTTGGGTAGGCTCTGTCAGAGGGAAAGTCTAGG CCTCAAGGCTGAGACTTTTGTCCCAGCAGGTGTTCCCTTGATGTAGCACAGTCCCCCTTTTCCTAGGACGTGGGGCT TCCTGAGAGCCGAACTGTAGTGATTGTTATCTCTCTTCTGGATCTAGCCACCCATCAGGTCTACCAGACTCCAGGCT GGTACTGGGGTTTGTCTGCACAGAGTCTTGTGACGTGAACCATCTGTGGGTCTCTCAGCCATAGATACAACCACCTG CTCCAATGGAGGTGGTAGAGGATGAAATGAACTCTGTGAGGGTCCTTACTTTTGGTTGTTCAATGCACTATCTTTTT GTGCTGGTTGGCCTCCTGCCAGGAGGTGGCACTTTCTAGAAAGCATCAGCAGAGGCAGTCAGGTGGTGGTGGCTGGG GGGGCTGGGGCACTAGAACTCCCAAGAATATATGCCCTTTGTCTTCAGCTACTAGGGTGAGTAAGGAAGGACCATCA GGTGGGGGCAGGACTAGTCGTGTCTGAGCTCAGAGTCTCCTTGGGCAGGTCTTTCTGTGGCTACTGTGGGAGGATGG GGGTGTAGTTTCCAGGTCAATGGATTTATGTTCCTAGGACAATTATGGCTGCCTCTGCTGTGTCATGCAGGTCATCA GGAAAGTGGGGGAAAGCAAGCAGTCACGTGACTTGCCCAGCTCCCATGCAACTCAAAAGGTTGGTCTCACTTCCAGC GTGCACCCTCCCCCGCAACAGCTCCGAATCTGTTTCCATGCAGTCAGTGAGCAAGGCTGAGAACTTGCCCAGGCTAC CAGCTGCGAAACCAAGTAGGGCTGTCCTACTTCCCTGCCAGTGGAGTCTGCACACCAAATTCATGTCCCCCCACCAA CCCCCCCACTGCCCAGCCCCTAGATCTGGCCAGGTGGAGATTTTCTTTTTCCTGTCTCTTTTCCCAGTTCCTCTGGC AGCCCTCCCAAATGACCCCTGTGAGGCAAGGCAGAAATGGCTTCCTAGGGGACCCAGAGAGCCCACAGGGCTTTTCC CGCTGCTTCCTCTACCCCTGTATTTTGCTTGGCCCTCTAAATTGACTCAGCTCCAGGTAAGGTCAGAATCTTCTCCT GTGGTCTAGATCTTCAGGTTCCCAGTGAGGATGTGTGTTTGGGGGTAGACGGTCCCCCTTTTCCACTTCCACAGTTT GGGCACTCACAATATTTGGGGTGTTTCCCGGGTCCTACATGAGCAATCTGCTTCTTTCAGAGGGTGTGTGCGTTCTC TCAGCTTTCTTGAATTTATTTCTGCAGGTGGTTCTGCAAAAAAAATTCCTGATGGGAGACTTCACATGCTGCTCTGT GCATCCGAGTGGGAGCTGCAATGTACTTCTGCTGCCACCCATCTGCCATCACCCTCTAATTTGTCGGTAATATGCAT TTTTAATCAATCTTTTTTTCTCTCTCTCTCTTTTCTTCTCCCCCAAAACTATACTGCCCTTTGATATCAAGGAATCA AGGCCGTGATGTTGAGGGGTGGGCAGTGGATACACTCTTTACCCCTTAGGGAGCATATCTAGATTTAGATATTGCCA ATTCAAGATAACTTAATTGAAAGCAAATTCATAATGAATACACACACACACACACACATCTGCATGACAAGATTTTT AATAGTTGAAAGAATAACTAATAATTGTCCACAGGCAATAAGGGCTTTTTAAGCAAAACAGTTGTGATAAAACAGGT CATTCTTAGAATAGTAATCCAGCCAATAGTACAGGTTGCTTAGAGATTATGACATTACCAGAGTTAAAATTCAATAA TGGCTTCTCACTCCCTACCACTGAGGACAAGTTTATGTCCTTAGGTTTATGCTTCCCTGAAACAATACCACCTGCTA TTCTCCACTTTACATATCAACGGCACTGGTTCTTTATCTAACTCTCTGGCACAGCAGGAGTTTGTTTTCTTCTGCTT CAGAGCTTTGAATTTACTATTTCAGCTTCTAAACTTTATTTGCAATGCCTTCCCATGGCAGACTCCTTCTGTCATTT TGCCTCTGTTCGAAAACTTTTTCCTTAATTTCATTCTTAGTTAATAATATCTGAAATTATTTTGTTGTTTAACTTAA TTATTAATTTTATGTATGTTCTACCTAGATATAATCTTCTAGAGGATTGTTTTATTCTCTGACTTATTTAACTTAAA TGCCCACTACCTTTAAAAATTATGACATTTATTTAACAGATATTTGCTGAACAAATGTTTGAAAATACATGGGAAAG AATGCTTGAAAACACTTGAAATTGCTTGTGTAAAGAAACAGTTTTATCAGTTAGGATTTAATCAATGTCAGAAGCAA TGATATAGGAAAAATCGAGGAATAAGACAGTTATGGATAAGGAGAAATCAACAAACTCTTAAAAGATATTGCCTCAA AAGCATAAGAGGAAATAAGGGTTTATACATGACTTTTAGAACACTGCCTGGGTTTTTGGATAAATGGGGAAGTTGTT GGAAAACAGGAGGGATCCTAGATATTCCTTAGTCTGAGGAGGAGCAATTAAGATTCACTTGTTTAGAGGCTGGGAGT GGTGGCTCACGCCTGTAATCCCAGAATTTTGGGAGGCCAAGGCAGGCAGATCACCTGAGGTCAAGAGTTCAAGACCA ACCTGGCCAACATGGTGAAATCCCATCTCTACAAAAATACAAAAATTAGACAGGCATGATGGCAAGTGCCTGTAATC CCAGCTACTTGGGAGGCTGAGGAAGGAGAATTGCTTGAACCTGGAAGGCAGGAGTTGCAGTGAGCCGAGATCATACC ACTGCACTCCAGCCTGGGTGACAGAACAAGACTCTGTCTCAAAAAAAAAAAAGAGAGATTCAAAAGATTCACTTGTT TAGGCCTTAGCGGGCTTAGACACCAGTCTCTGACACATTCTTAAAGGTCAGGCTCTACAAATGGAACCCAACCAGAC TCTCAGATATGGCCAAAGATCTATACACACCCATCTCACAGATCCCCTATCTTAAAGAGACCCTAATTTGGGTTCAC CTCAGTCTCTATAATCTGTACCAGCATACCAATAAAAATCTTTCTCACCCATCCTTAGATTGAGAGAAGTCACTTAT TATTATGTGAGTAACTGGAAGATACTGATAAGTTGACAAATCTTTTTCTTTCCTTTCTTATTCAACTTTTATTTTAA CTTCCAAAGAACAAGTGCAATATGTGCAGCTTTGTTGCGCAGGTCAACATGTATCTTTCTGGTCTTTTAGCCGCCTA ACACTTTGAGCAGATATAAGCCTTACACAGGATTATGAAGTCTGAAAGGATTCCACCAATATTATTATAATTCCTAT CAACCTGATAAGTTAGGGGAAGGTAGAGCTCTCCTCCAATAAGCCAGATTTCCAGAGTTTCTGACGTCATAATCTAC CAAGGTCATGGATCGAGTTCAGAGAAAAAACAAAAGCAAAACCAAACCTACCAAAAAATAAAAATCCCAAAGAAAAA ATAAAGAAAAAAACAGCATGAATACTTCCTGCCATGTTAAGTGGCCAATATGTCAGAAACAGCACTGAGTTACAGAT AAAGATGTCTAAACTACAGTGACATCCCAGCTGTCACAGTGTGTGGACTATTAGTCAATAAAACAGTCCCTGCCTCT TAAGAGTTGTTTTCCATGCAAATACATGTCTTATGTCTTAGAATAAGATTCCCTAAGAAGTGAACCTAGCATTTATA CAAGATAATTAATTCTAATCCATAGTATCTGGTAAAGAGCATTCTACCATCATCTTTACCGAGCATAGAAGAGCTAC ACCAAAACCCTGGGTCATCAGCCAGCACATACACTTATCCAGTGATAAATACACATCATCGGGTGCCTACATACATA CCTGAATATAAAAAAAATACTTTTGCTGAGATGAAACAGGCGTGATTTATTTCAAATAGGTACGGATAAGTAGATAT TGAAGTAAGGATTCAGTCTTATATTATATTACATAACATTAATCTATTCCTGCACTGAAACTGTTGCTTTATAGGAT TTTTCACTACACTAATGAGAACTTAAGAGATAATGGCCTAAAACCACAGAGAGTATATTCAAGAATAAGTATAGCAC TTCTTATTTGGAAACCAATGCTTACTAAATGAGACTAAGACGTGTCCCATCAAAAATCCTGGACCTATGCCTAAAAC ACATTTCACAATCCCTGAACTTTTCAAAAATTGGTACATGCTTTAACTTTAAACTACAGGCCTCACTGGAGCTACAG ACAAGAAGGTGAAAAACGGCTGACAAAAGAAGTCCTGGTATCTTCTATGGTGGGAGAAGAAAACTAGCTAAAGGGAA GAATAAATTAGAGAAAAATTGGAATGACTGAATCGGAACAAGGCAAAGGCTATAAAAAAAATTAAGCAGCAGTATCC TCTTGGGGGCCCCTTCCCCACACTATCTCAATGCAAATATCTGTCTGAAACGGTTCCTGGCTAAACTCCACCCATGG GTTGGCCAGCCTTGCCTTGACCAATAGCCTTGACAAGGCAAACTTGACCAATAGTCTTAGAGTATCCAGTGAGGCCA GGGGCCGGCGGCTGGCTAGGGATGAAGAATAAAAGGAAGCACCCTTCAGCAGTTCCACACACTCGCTTCTGGAACGT CTGAGGTTATCAATAAGCTCCTAGTCCAGACGCCATGGGTCATTTCACAGAGGAGGACAAGGCTACTATCACAAGCC TGTGGGGCAAGGTGAATGTGGAAGATGCTGGAGGAGAAACCCTGGGAAGGTAGGCTCTGGTGACCAGGACAAGGGAG GGAAGGAAGGACCCTGTGCCTGGCAAAAGTCCAGGTCGCTTCTCAGGATTTGTGGCACCTTCTGACTGTCAAACTGT TCTTGTCAATCTCACAGGCTCCTGGTTGTCTACCCATGGACCCAGAGGTTCTTTGACAGCTTTGGCAACCTGTCCTC TGCCTCTGCCATCATGGGCAACCCCAAAGTCAAGGCACATGGCAAGAAGGTGCTGACTTCCTTGGGAGATGCCATAA AGCACCTGGATGATCTCAAGGGCACCTTTGCCCAGCTGAGTGAACTGCACTGTGACAAGCTGCATGTGGATCCTGAG AACTTCAAGGTGAGTCCAGGAGATGTTTCAGCACTGTTGCCTTTAGTCTCGAGGCAACTTAGACAACTGAGTATTGA TCTGAGCACAGCAGGGTGTGAGCTGTTTGAAGATACTGGGGTTGGGAGTGAAGAAACTGCAGAGGACTAACTGGGCT GAGACCCAGTGGCAATGTTTTAGGGCCTAAGGAGTGCCTCTGAAAATCTAGATGGACAACTTTGACTTTGAGAAAAG AGAGGTGGAAATGAGGAAAATGACTTTTCTTTATTAGATTTCGGTAGAAAGAACTTTCACCTTTCCCCTATTTTTGT TATTCGTTTTAAAACATCTATCTGGAGGCAGGACAAGTATGGTCGTTAAAAAGATGCAGGCAGAAGGCATATATTGG CTCAGTCAAAGTGGGGAACTTTGGTGGCCAAACATACATTGCTAAGGCTATTCCTATATCAGCTGGACACATATAAA ATGCTGCTAATGCTTCATTACAAACTTATATCCTTTAATTCCAGATGGGGGCAAAGTATGTCCAGGGGTGAGGAACA ATTGAAACATTTGGGCTGGAGTAGATTTTGAAAGTCAGCTCTGTGTGTGTGTGTGTGTGTGTGCGCGCGTGTGTTTG TGTGTGTGTGAGAGCGTGTGTTTCTTTTAACGTTTTCAGCCTACAGCATACAGGGTTCATGGTGGCAAGAAGATAAC AAGATTTAAATTATGGCCAGTGACTAGTGCTGCAAGAAGAACAACTACCTGCATTTAATGGGAAAGCAAAATCTCAG GCTTTGAGGGAAGTTAACATAGGCTTGATTCTGGGTGGAAGCTTGGTGTGTAGTTATCTGGAGGCCAGGCTGGAGCT CTCAGCTCACTATGGGTTCATCTTTATTGTCTCCTTTCATCTCAACAGCTCCTGGGAAATGTGCTGGTGACCGTTTT GGCAATCCATTTCGGCAAAGAATTCACCCCTGAGGTGCAGGCTTCCTGGCAGAAGATGGTGACTGGAGTGGCCAGTG CCCTGTCCTCCAGATACCACTGAGCTCACTGCCCATGATGCAGAGCTTTCAAGGATAGGCTTTATTCTGCAAGCAAT ACAAATAATAAATCTATTCTGCTAAGAGATCACACATGGTTGTCTTCAGTTCTTTTTTTTATGTCTTTTTAAATATA TGAGCCACAAAGGGTTTTATGTTGAGGGATGTGTTTATGTGTATTTATACATGGCTATGTGTGTTTGTGTCATGTGC ACACTCCACACTTTTTTGTTTACGTTAGATGTGGGTTTTGATGAGCAAATAAAAGAACTAGGCAATAAAGAAACTTA TACATGGGAGCGTCTGCAAGTGGGAGTAAAAGGTGCAGGAGAAATCTGGTTGGAAGAAAGACCTCTATAGGACAGGA CTCCTCAGAAACAGATGTTTTGGAAGAGATGGGGAAAGGTTCAGTGAAGGGGGCTGAACCCCCTTCCCTGGATTGCA GCACAGCAGCGAGGAAGGGGCTCAACGAAGAAAAAGTGTTCCAAGCTTTAGGAAGTCAAGGTTTAGGCAGGGATAGC CATTCTATTTTATTAGGGGCAATACTATTTCCAACGGCATCTGGCTTTTCTCAGCCCTTGTGAGGCTCTACGGGGAG GTTGAGGTGTTAGAGATCAGAGCAGGAAACAGGTTTTTCTTTCCACGGTAACTACAATGAAGTGATCCTTACTTTAC TAAGGAACTTTTTCATTTTAAGTGTTGACGCATGCCTAAAGAGGTGAAATTAATCCCATACCCTTAAGTCTACAGAC TGGTCACAGCATTTCAAGGAGGAGACCTCATTGTAAGCTTCTAGGGAGGTGGGGACCTAGGTGAAGGAAATGAGCCA GCAGAAGCTCACAAGTCAGCATCAGCGTGTCATGTCTCAGCAGCAGAACAGCACGGTCAGATGAAAATATAGTGTGA AGAATTTGTATAACATTAATTGAGAAGGCAGATTCACTGGAGTTCTTATATAATTGAAAGTTAATGCACGTTAATAA GCAAGAGTTTAGTTTAATGTGATGGTGTTATGAACTTAACGCTTGTGTCTCCAGAAAATTCACATGCTGAATCCCCA ACTCCCAATTGGCTCCATTTGTGGGGGAGGCTTTGGAAAAGTAATCAGGTTTAGAGGAGCTCATGAGAGCAGATCCC CATCATAGAATTATTTTCCTCATCAGAAGCAGAGAGATTAGCCATTTCTCTTCCTTCTGGTGAGGACACAGTGGGAA GTCAGCCACCTGCAACCCAGGAAGAGAGCCCTGACCAGGAACCAGCAGAAAAGTGAGAAAAAATCCTGTTGTTGAAG TCACCCAGTCTATGCTATTTTGTTATAGCACCTTGCACTAAGTAAGGCAGATGAAGAAAGAGAAAAAAATAAGCTTC GGTGTTCAGTGGATTAGAAACCATGTTTATCTCAGGTTTACAAATCTCCACTTGTCCTCTGTGTTTCAGAATAAAAT ACCAACTCTACTACTCTCATCTGTAAGATGCAAATAGTAAGCCTGATCCCTTCTGTCTAACTTCGAATTCTATTTTT TCTTCAACGTACTTTAGGCTTGTAATGTGTTTATATACAGTGAAATGTCAAGTTCTTTCTTTATATTTCTTTCTTTC TTTTTTTTCCTCAGCCTCAGAGTTTTCCACATGCCCTTCCTACCTTCAGGAACTTCTTTCTCCAAACGTCTTCTGCC TGGCCTCCATTCAAATCATAAAGGACCCACTTCAAATGCCATCACTCACTACCATTTCACAATTCGCACTTTCTTTC TTTGTCCTTTTTTTTTTTAGTAAAACAAGTTTATAAAAAATTGAAGGAATAAATGAATGGCTACTTCATAGGCAGAG TAGACACAAGGGCTACTGGTTGCCGATTTTTATTGTTATTTTTCAATAGTATGCTAAACAAGGGGTAGATTATTTAT GCTGCCCATTTTTAGACCATAAAAGATAACTTCCTGATGTTGCCATGGCATTTTTTTTCCTTTTAATTTTATTTCAT TTCATTTTAATTTCGAAGGTACATGTGCAGGATGTGCAGGCTTGTTACATGGGTAAATGTGTGTCTTTCTGGCCTTT TAGCCATCTGTATCAATGAGCAGATATAAGCTTTACACAGGATCATGAAGGATGAAAGAATTTCACCAATATTATAA TAATTTCAATCAACCTGATAGCTTAGGGGATAAACTAATTTGAAGATACAGCTTGCCTCCGATAAGCCAGAATTCCA GAGCTTCTGGCATTATAATCTAGCAAGGTTAGAGATCATGGATCACTTTCAGAGAAAAACAAAAACAAACTAACCAA AAGCAAAACAGAACCAAAAAACCTCCATAAATACTTCCTACCCAGTTAATGGTCCAATATGTCAGAAACAGCACTGT GTTAGAAATAAAGCTGTCTAAAGTACACTAATATTCGAGTTATAATAGTGTGTGGACTATTAGTCAATAAAAACAAC CCTTGCCTCTTTAGAGTTGTTTTCCATGTACACGCACATCTTATGTCTTAGAGTAAGATTCCCTGAGAAGTGAACCT AGCATTTATACAAGATAATTAATTCTAATCCACAGTACCTGCCAAAGAACATTCTACCATCATCTTTACTGAGCATA GAAGAGCTACGCCAAAACCCTGGGTCATCAGCCAGCACACACACTTATCCAGTGGTAAATACACATCATCTGGTGTA TACATACATACCTGAATATGGAATCAAATATTTTTCTAAGATGAAACAGTCATGATTTATTTCAAATAGGTACGGAT AAGTAGATATTGAGGTAAGCATTAGGTCTTATATTATGTAACACTAATCTATTACTGCGCTGAAACTGTGGTCTTTA TGAAAATTGTTTTCACTACACTATTGAGAAATTAAGAGATAATGGCAAAAGTCACAAAGAGTATATTCAAAAAGAAG TATAGCACTTTTTCCTTAGAAACCACTGCTAACTGAAAGAGACTAAGATTTGTCCCGTCAAAAATCCTGGACCTATG CCTAAAACACATTTCACAATCCCTGAACTTTTCAAAAATTGGTACATGCTTTAGCTTTAAACTACAGGCCTCACTGG AGCTACAGACAAGAAGGTAAAAAACGGCTGACAAAAGAAGTCCTGGTATCCTCTATGATGGGAGAAGGAAACTAGCT AAAGGGAAGAATAAATTAGAGAAAAACTGGAATGACTGAATCGGAACAAGGCAAAGGCTATAAAAAAAATTAAGCAG CAGTATCCTCTTGGGGGCCCCTTCCCCACACTATCTCAATGCAAATATCTGTCTGAAACGGTCCCTGGCTAAACTCC ACCCATGGGTTGGCCAGCCTTGCCTTGACCAATAGCCTTGACAAGGCAAACTTGACCAATAGTCTTAGAGTATCCAG TGAGGCCAGGGGCCGGCGGCTGGCTAGGGATGAAGAATAAAAGGAAGCACCCTTCAGCAGTTCCACACACTCGCTTC TGGAACGTCTGAGATTATCAATAAGCTCCTAGTCCAGACGCCATGGGTCATTTCACAGAGGAGGACAAGGCTACTAT CACAAGCCTGTGGGGCAAGGTGAATGTGGAAGATGCTGGAGGAGAAACCCTGGGAAGGTAGGCTCTGGTGACCAGGA CAAGGGAGGGAAGGAAGGACCCTGTGCCTGGCAAAAGTCCAGGTCGCTTCTCAGGATTTGTGGCACCTTCTGACTGT CAAACTGTTCTTGTCAATCTCACAGGCTCCTGGTTGTCTACCCATGGACCCAGAGGTTCTTTGACAGCTTTGGCAAC CTGTCCTCTGCCTCTGCCATCATGGGCAACCCCAAAGTCAAGGCACATGGCAAGAAGGTGCTGACTTCCTTGGGAGA TGCCATAAAGCACCTGGATGATCTCAAGGGCACCTTTGCCCAGCTGAGTGAACTGCACTGTGACAAGCTGCATGTGG ATCCTGAGAACTTCAAGGTGAGTCCAGGAGATGTTTCAGCACTGTTGCCTTTAGTCTCGAGGCAACTTAGACAACTG AGTATTGATCTGAGCACAGCAGGGTGTGAGCTGTTTGAAGATACTGGGGTTGGGAGTGAAGAAACTGCAGAGGACTA ACTGGGCTGAGACCCAGTGGCAATGTTTTAGGGCCTAAGGAGTGCCTCTGAAAATCTAGATGGACAACTTTGACTTT GAGAAAAGAGAGGTGGAAATGAGGAAAATGACTTTTCTTTATTAGATTTCGGTAGAAAGAACTTTCACCTTTCCCCT ATTTTTGTTATTCGTTTTAAAACATCTATCTGGAGGCAGGACAAGTATGGTCGTTAAAAAGATGCAGGCAGAAGGCA TATATTGGCTCAGTCAAAGTGGGGAACTTTGGTGGCCAAACATACATTGCTAAGGCTATTCCTATATCAGCTGGACA CATATAAAATGCTGCTAATGCTTCATTACAAACTTATATCCTTTAATTCCAGATGGGGGCAAAGTATGTCCAGGGGT GAGGAACAATTGAAACATTTGGGCTGGAGTAGATTTTGAAAGTCAGCTCTGTGTGTGTGTGTGTGTGTGTGTGTGTC AGCGTGTGTTTCTTTTAACGTCTTCAGCCTACAACATACAGGGTTCATGGTGGGAAGAAGATAGCAAGATTTAAATT ATGGCCAGTGACTAGTGCTTGAAGGGGAACAACTACCTGCATTTAATGGGAAGGCAAAATCTCAGGCTTTGAGGGAA GTTAACATAGGCTTGATTCTGGGTGGAAGCTGGGTGTGTAGTTATCTGGAGGCCAGGCTGGAGCTCTCAGCTCACTA TGGGTTCATCTTTATTGTCTCCTTTCATCTCAACAGCTCCTGGGAAATGTGCTGGTGACCGTTTTGGCAATCCATTT CGGCAAAGAATTCACCCCTGAGGTGCAGGCTTCCTGGCAGAAGATGGTGACTGCAGTGGCCAGTGCCCTGTCCTCCA GATACCACTGAGCCTCTTGCCCATGATTCAGAGCTTTCAAGGATAGGCTTTATTCTGCAAGCAATACAAATAATAAA TCTATTCTGCTGAGAGATCACACATGATTTTCTTCAGCTCTTTTTTTTACATCTTTTTAAATATATGAGCCACAAAG GGTTTATATTGAGGGAAGTGTGTATGTGTATTTCTGCATGCCTGTTTGTGTTTGTGGTGTGTGCATGCTCCTCATTT ATTTTTATATGAGATGTGCATTTTGATGAGCAAATAAAAGCAGTAAAGACACTTGTACACGGGAGTTCTGCAAGTGG GAGTAAATGGTGTTGGAGAAATCCGGTGGGAAGAAAGACCTCTATAGGACAGGACTTCTCAGAAACAGATGTTTTGG AAGAGATGGGAAAAGGTTCAGTGAAGACCTGGGGGCTGGATTGATTGCAGCTGAGTAGCAAGGATGGTTCTTAATGA AGGGAAAGTGTTCCAAGCTTTAGGAATTCAAGGTTTAGTCAGGTGTAGCAATTCTATTTTATTAGGAGGAATACTAT TTCTAATGGCACTTAGCTTTTCACAGCCCTTGTGGATGCCTAAGAAAGTGAAATTAATCCCATGCCCTCAAGTGTGC AGATTGGTCACAGCATTTCAAGGGAGAGACCTCATTGTAAGACTCTGGGGGAGGTGGGGACTTAGGTGTAAGAAATG AATCAGCAGAGGCTCACAAGTCAGCATGAGCATGTTATGTCTGAGAAACAGACCAGCACTGTGAGATCAAAATGTAG TGGGAAGAATTTGTACAACATTAATTGGAAGGTTTACTTAATGGAATTTTTGTATAGTTGGATGTTAGTGCATCTCT ATAAGTAAGAGTTTAATATGATGGTGTTACGGACCTGGTGTTTGTGTCTCCTCAAAATTCACATGCTGAATCCCCAA CTCCCAACTGACCTTATCTGTGGGGGAGGCTTTTGAAAAGTAATTAGGTTTAGCTGAGCTCATAAGAGCAGATCCCC ATCATAAAATTATTTTCCTTATCAGAAGCAGAGAGACAAGCCATTTCTCTTTCCTCCCGGTGAGGACACAGTGAGAA GTCCGCCATCTGCAATCCAGGAAGAGAACCCTGACCACGAGTCAGCCTTCAGAAATGTGAGAAAAAACTCTGTTGTT GAAGCCACCCAGTCTTTTGTATTTTGTTATAGCACCTTACACTGAGTAAGGCAGATGAAGAAGGAGAAAAAAATAAG CTTGGGTTTTGAGTGAACTACAGACCATGTTATCTCAGGTTTGCAAAGCTCCCCTCGTCCCCTATGTTTCAGCATAA AATACCTACTCTACTACTCTCATCTATAAGACCCAAATAATAAGCCTGCGCCCTTCTCTCTAACTTTGATTTCTCCT ATTTTTACTTCAACATGCTTTACTCTAGCCTTGTAATGTCTTTACATACAGTGAAATGTAAAGTTCTTTATTCTTTT TTTCTTTCTTTCTTTTTTCTCCTCAGCCTCAGAATTTGGCACATGCCCTTCCTTCTTTCAGGAACTTCTCCAACATC TCTGCCTGGCTCCATCATATCATAAAGGTCCCACTTCAAATGCAGTCACTACCGTTTCAGGATATGCACTTTCTTTC TTTTTTGTTTTTTGTTTTTTTTAAGTCAAAGCAAATTTCTTGAGAGAGTAAAGAAATAAACGAATGACTACTGCATA GGCAGAGCAGCCCCGAGGGCCGCTGGTTGTTCCTTTTATGGTTATTTCTTGATGATATGTTAAACAAGTTTTGGATT ATTTATGCCTTCTCTTTTTAGGCCATATAGGGTAACTTTCTGACATTGCCATGGCATGTTTCTTTTAATTTAATTTA CTGTTACCTTAAATTCAGGGGTACACGTACAGGATATGCAGGTTTGTTTTATAGGTAAAAGTGTGCCATGGTTTTAA TGGGTTTTTTTTTTCTTGTAAAGTTGTTTAAGTTTCTTGTTTACTCTGGATATTGGCCTTTGTCAGAAGAATAGATT GGAAAATCTTTTTCCCATTCTGTAGATTGTCTTTCGCTCTGATGGTAGTTTCTTTTGCTGAGCAGGAGCTCTTTAGT TTAATTAGATTCCATTGGTCAATTTTTGCTTTTGCTGCAATTGCTTTTCACGCTTTCATCATGAAATCTGTGCCCGT GTTTATATCATGAATAGTATTGCCTTGATTTTTTTCTAGGCTTTTTATAGTTTGGGGTTTTTCATTTAAGTCTCTAA TCCATCCGGAGTTAATTTTGGATAAGGTATAAGGAAGGAGTCCAGTTTCATTTTTCAGCATATGGCTAGCCAGTTCT CCCCCATCATTTATTAAATTGAAAATCCTTTCCCCATTGCTTGCTTTTGTCAGGTTTCTAAAAGACAGATGGTTGTA GGTACAATATGCAGTTTCTTCAAGTCATATAATACCATCTGAAATCTCTTATTAATTCATTTCTTTTAGTATGTATG CTGGTCTCCTCTGCTCACTATAGTGAGGGCACCATTAGCCAGAGAATCTGTCTGTCTAGTTCATGTAAGATTCTCAG AATTAAGAAAAATGGATGGCATATGAATGAAACTTCATGGATGACATATGGAATCTAATGTGTATTTGTTGAATTAA TGCATAAGATGCAACAAGGGAAAGGTTGACAACTGCAGTGATAACCTGGTATTGATGATATAAGAGTCTATAGATCA CAGTAGAAGCAATAATCATGGAAAACAATTGGAAATGGGGAACAGCCACAAACAAGAAAGAATCAATACTACCAGGA AAGTGACTGCAGGTCACTTTTCCTGGAGCGGGTGAGAGAAAAGTGGAAGTTGCAGTAACTGCCGAATTCCTGGTTGG CTGATGGAAAGATGGGGCAACTGTTCACTGGTACGCAGGGTTTTAGATGTATGTACCTAAGGATATGAGGTATGGCA ATGAACAGAAATTCTTTTGGGAATGAGTTTTAGGGCCATTAAAGGACATGACCTGAAGTTTCCTCTGAGGCCAGTCC CCACAACTCAATATAAATGTGTTTCCTGCATATAGTCAAAGTTGCCACTTCTTTTTCTTCATATCATCGATCTCTGC TCTTAAAGATAATCTTGGTTTTGCCTCAAACTGTTTGTCACTACAAACTTTCCCCATGTTCCTAAGTAAAACAGGTA ACTGCCTCTCAACTATATCAAGTAGACTAAAATATTGTGTCTCTAATATCAGAAATTCAGCTTTAATATATTGGGTT TAACTCTTTGAAATTTAGAGTCTCCTTGAAATACACATGGGGGTGATTTCCTAAACTTTATTTCTTGTAAGGATTTA TCTCAGGGGTAACACACAAACCAGCATCCTGAACCTCTAAGTATGAGGACAGTAAGCCTTAAGAATATAAAATAAAC TGTTCTTCTCTCTGCCGGTGGAAGTGTGCCCTGTCTATTCCTGAAATTGCTTGTTTGAGACGCATGAGACGTGCAGC ACATGAGACACGTGCAGCAGCCTGTGGAATATTGTCAGTGAAGAATGTCTTTGCCTGATTAGATATAAAGACAAGTT AAACACAGCATTAGACTATAGATCAAGCCTGTGCCAGACACAAATGACCTAATGCCCAGCACGGGCCACGGAATCTC CTATCCTCTTGCTTGAACAGAGCAGCACACTTCTCCCCCAACACTATTAGATGTTCTGGCATAATTTTGTAGATATG TAGGATTTGACATGGACTATTGTTCAATGATTCAGAGGAAATCTCCTTTGTTCAGATAAGTACACTGACTACTAAAT GGATTAAAAAACACAGTAATAAAACCCAGTTTTCCCCTTACTTCCCTAGTTTGTTTCTTATTCTGCTTTCTTCCAAG TTGATGCTGGATAGAGGTGTTTATTTCTATTCTAAAAAGTGATGAAATTGGCCGGGCGCGGTGGCTCACACCTGTAA TCCCAGCACTTTGGGAGGCTGAGGTGGGCGGATCACGAGGTCAGGAGATCAAGACCATCCTGGCTAACATGGTGAAA CCCCATCTCTACTAAAAATACAAAAAATTAGCCAGAGACGGTGGCGGGTGCCTGTAGTCCCAGCTACTCGGGAGGCT GAGGCAGGAGAATGGCGTGAACCTGGGAGGCAGAGCTGCAGTGAGCAGAGATCGCGCCACTGCACACTCCAGCCTGG GTGACAAAGCGAGACTCCATCTCAAAAAAAAAAAAAAAAAAAAAAAGAAAGAAAGAAAGAAAAAAAAAGTGATGAAA TTGTGTATTCAATGTAGTCTCAAGAGAATTGAAAACCAAGAAAGGCTGTGGCTTCTTCCACATAAAGCCTGGATGAA TAACAGGATAACACGTTGTTACATTGTCACAACTCCTGATCCAGGAATTGATGGCTAAGATATTCGTAATTCTTATC CTTTTCAGTTGTAACTTATTCCTATTTGTCAGCATTCAGGTTATTAGCGGCTGCTGGCGAAGTCCTTGAGAAATAAA CTGCACACTGGATGGTGGGGGTAGTGTAGGAAAATGGAGGGGAAGGAAGTAAAGTTTCAAATTAAGCCTGAACAGCA AAGTTCCCCTGAGAAGGCCACCTGGATTCTATCAGAAACTCGAATGTCCATCTTGCAAAACTTCCTTGCCCAAACCC CACCCCTGGAGTCACAACCCACCCTTGACCAATAGATTCATTTCACTGAGGGAGGCAAAGGGCTGGTCAATAGATTC ATTTCACTGGGAGAGGCAAAGGGCTGGGGGCCAGAGAGGAGAAGTAAAAAGCCACACATGAAGCAGCAATGCAGGCA TGCTTCTGGCTCATCTGTGATCACCAGGAAACTCCCAGATCTGACACTGTAGTGCATTTCACTGCTGACAAGAAGGC TGCTGCCACCAGCCTGTGAAGCAAGGTTAAGGTGAGAAGGCTGGAGGTGAGATTCTGGGCAGGTAGGTACTGGAAGC CGGGACAAGGTGCAGAAAGGCAGAAAGTGTTTCTGAAAGAGGGATTAGCCCGTTGTCTTACATAGTCTGACTTTGCA CCTGCTCTGTGATTATGACTATCCCACAGTCTCCTGGTTGTCTACCCATGGACCTAGAGGTACTTTGAAAGTTTTGG ATATCTGGGCTCTGACTGTGCAATAATGGGCAACCCCAAAGTCAAGGCACATGGCAAGAAGGTGCTGATCTCCTTCG GAAAAGCTGTTATGCTCACGGATGACCTCAAAGGCACCTTTGCTACACTGAGTGACCTGCACTGTAACAAGCTGCAC GTGGACCCTGAGAACTTCCTGGTGAGTAGTAAGTACACTCACGCTTTCTTCTTTACCCTTAGATATTTGCACTATGG GTACTTTTGAAAGCAGAGGTGGCTTTCTCTTGTGTTATGAGTCAGCTATGGGATATGATATTTCAGCAGTGGGATTT TGAGAGTTATGTTGCTGTAAATAACATAACTAAAATTTGGTAGAGCAAGGACTATGAATAATGGAAGGCCACTTACC ATTTGATAGCTCTGAAAAACACATCTTATAAAAAATTCTGGCCAAAATCAAACTGAGTGTTTTGGATGAGGGAACAG AAGTTGAGATAGAGAAAATAACATCTTTCCTTTGGTCAGCGAAATTTTCTATAAAAATTAATAGTCACTTTTCTGCA TAGTCCTGGAGGTTAGAAAAAGATCAACTGAACAAAGTAGTGGGAAGCTGTTAAAAGAGGATTGTTTCCCTCCGAAT GATGATGGTATACTTTTGTACGCATGGTACAGGATTCTTTGTTATGAGTGTTTGGGAAAATTGTATGTATGTATGTA TGTATGTGATGACTGGGGACTTATCCTATCCATTACTGTTCCTTGAAGTACTATTATCCTACTTTTTAAAAGGACGA AGTCTCTAAAAAAAAAATGAAACAATCACAATATGTTGGGGTAGTGAGTTGGCATAGCAAGTAAGAGAAGGATAGGA CACAATGGGAGGTGCAGGGCTGCCAGTCATATTGAAGCTGATATCTAGCCCATAATGGTGAGAGTTGCTCAAACTCT GGTCAAAAAGGATGTAAGTGTTATATCTATTTACTGCAAGTCCAGCTTGAGGCCTTCTATTCACTATGTACCATTTT CTTTTTTATCTTCACTCCCTCCCCAGCTCTTAGGCAACGTGATATTGATTGTTTTGGCAACCCACTTCAGCGAGGAT TTTACCCTACAGATACAGGCTTCTTGGCAGTAACTAACAAATGCTGTGGTTAATGCTGTAGCCCACAAGACCACTGA GTTCCCTGTCCACTATGTTTGTACCTATGTCCCAAAATCTCATCTCCTTTAGATGGGGGAGGTTGGGGAGAAGAGCA GTATCCTGCCTGCTGATTCAGTTCCTGCATGATAAAAATAGAATAAAGAAATATGCTCTCTAAGAAATATCATTGTA CTCTTTTTCTGTCTTTATATTTTACCCTGATTCAGCCAAAAGGACGCACTATTTCTGATGGAAATGAGAATGTTGGA GAATGGGAGTTTAAGGACAGAGAAGATACTTTCTTGCAATCCTGCAAGAAAAGAGAGAACTCGTGGGTGGATTTAGT GGGGTAGTTACTCCTAGGAAGGGGAAATCGTCTCTAGAATAAGACAATGTTTTTACAGAAAGGGAGGTCAATGGAGG TACTCTTTGGAGGTGTAAGAGGATTGTTGGTAGTGTGTAGAGGTATGTTAGGACTCAAATTAGAAGTTCTGTATAGG CTATTATTTGTATGAAACTCAGGATATAGCTCATTTGGTGACTGCAGTTCACTTCTACTTATTTTAAACAACATATT TTTTATGATTTATAATGAAGTGGGGATGGGGCTTCCTAGAGACCAATCAAGGGCCAAACCTTGAACTTTCTCTTAAC GTCTTCAATGGTATTAATAGAGAATTATCTCTAAGGCATGTGAACTGGCTGTCTTGGTTTTCATCTGTACTTCATCT GCTACCTCTGTGACCTGAAACATATTTATAATTCCATTAAGCTGTGCATATGATAGATTTATCATATGTATTTTCCT TAAAGGATTTTTGTAAGAACTAATTGAATTGATACCTGTAAAGTCTTTATCACACTACCCAATAAATAATAAATCTC TTTGTTCAGCTCTCTGTTTCTATAAATATGTACAAGTTTTATTGTTTTTAGTGGTAGTGATTTTATTCTCTTTCTAT ATATATACACACACATGTGTGCATTCATAAATATATACAATTTTTATGAATAAAAAATTATTAGCAATCAATATTGA AAACCACTGATTTTTGTTTATGTGAGCAAACAGCAGATTAAAAGGCTGAGATTTAGGAAACAGCACGTTAAGTCAAG TTGATAGAGGAGAATATGGACATTTAAAAGAGGCAGGATGATATAAAATTAGGGAAACTGGATGCAGAGACCAGATG AAGTAAGAAAAATAGCTATCGTTTTGAGCAAAAATCACTGAAGTTTCTTGCATATGAGAGTGACATAATAAATAGGG AAACGTAGAAAATTGATTCACATGTATATATATATATAGAACTGATTAGACAAAGTCTAACTTGGGTATAGTCAGAG GAGCTTGCTGTAATTATATTGAGGTGATGGATAAAGAACTGAAGTTGATGGAAACAATGAAGTTAAGAAAAAAAATC GAGTAAGAGACCATTGTGGCAGTGATTGCACAGAACTGGAAAACATTGTGAAACAGAGAGTCAGAGATGACAGCTAA AATCCCTGTCTGTGAATGAAAAGAAGGAAATTTATTGACAGAACAGCAAATGCCTACAAGCCCCCTGTTTGGATCTG GCAATGAACGTAGCCATTCTGTGGCAATCACTTCAAACTCCTGTACCCAAGACCCTTAGGAAGTATGTAGCACCCTC AAACCTAAAACCTCAAAGAAAGAGGTTTTAGAAGATATAATACCCTTTCTTCTCCAGTTTCATTAATCCCAAAACCT CTTTCTCAAAGTATTTCCTCTATGTGTCCACCCCAAAGAGCTCACCTCACCATATCTCTTGAGTGGGAGCACATAGA TAGGCGGTGCTACCATCTAACAGCTTCTGAAATTCCTTTGTCATATTTTTGAGTCCCCACTAATAACCCACAAAGCA GAATAAATACCAGTTGCTCATGTACAATAATCACTCAACTGCTGTCTTGTAGCATACATTAATTAAGCACATTCTTT GAATAATTACTGTGTCCAAACAATCACACTTTAAAATCTCACACTTGTGCTATCCCTTGCCCTTCTGAATGTCACTC TGTATTTTAAATGAAGAGATGAGGGTTGAATTTCCTGTGTTACTTATTGTTCATTTCTCGATGAGGAGTTTTCACAT TCACCTTTACTGGAAAACACATAAGTACACATCTTACAGGAAAAATATACCAAACTGACATGTAGCATGAATGCTTG TGCATGTAGTCATATAAAATCTTGTAGCAATGTAAACATTCTCTGATATACACATACAGATGTGTCTATATGTCTAC ACAATTTCTTATGCTCCATGAACAAACATTCCATGCACACATAAGAACACACACTGTTACAGATGCATACTTGAGTG CATTGACAAAATTACCCCAGTCAATCTAGAGAATTTGGATTTCTGCATTTGACTCTGTTAGCTTTGTACATGCTGTT CATTTACTCTGGGTGATGTCTTTCCCTCATTTTGCCTTGTCTATCTTGTACTCATACTTTAAGTCCTAACTTATATG TTATCTCAACTAAGAAGCTATTTTTTTTTAATTTTAACTGGGCTTAAAGCCCTGTCTATAAACTCTGCTACAATTAT GGGCTCTTTCTTATAATATTTAGTGTTTTTCCTACTAATGTACTTAATCTGCTCATTGTATATTCCTACCACTAAAT TTTAACCTCTTTTATGGTAGAGACATTGTCTTGTAAACTCTTATTTCCCTAGTATTTGGAGATGAAAAAAAAGATTA AATTATCCAAAATTAGATCTCTCTTTTCTACATTATGAGTATTACACTATCCATAGGGAAGTTTGTTTGAGACCTAA ACTGAGGAACCTTTGGTTCTAAAATGACTATGTGATATCTTAGTATTTATAGGTCATGAGGTTCCTTCCTCTGCCTC TGCTATAGTTTGATTAGTCAGCAAGCATGTGTCATGCATTTATTCACATCAGAATTTCATACACTAATAAGACATAG TATCAGAAGTCAGTTTATTAGTTATATCAGTTAGGGTCCATCAAGGAAAGGACAAACCATTATCAGTTACTCAACCT AGAATTAAATACAGCTCTTAATAGTTAATTATCCTTGTATTGGAAGAGCTAAAATATCAAATAAAGGACAGTGCAGA AATCTAGATGTTAGTAACATCAGAAAACCTCTTCCGCCATTAGGCCTAGAAGGGCAGAAGGAGAAAATGTTTATACC ACCAGAGTCCAGAACCAGAGCCCATAACCAGAGGTCCACTGGATTCAGTGAGCTAGTGGGTGCTCCTTGGAGAGAGC CAGAACTGTCTAATGGGGGCATCAAAGTATCAGCCATAAAAAACCATAAAAAAGACTGTCTGCTGTAGGAGATCCGT TCAGAGAGAGAGAGAGACCAGAAATAATCTTGCTTATGCTTTCCCTCAGCCAGTGTTTACCATTGCAGAATGTACAT GCGACTGAAAGGGTGAGGAAACCTGGGAAATGTCAGTTCCTCAAATACAGAGAACACTGAGGGAAGGATGAGAAATA AATGTGAAAGCAGACATGAATGGTAATTGACAGAAGGAAACTAGGATGTGTCCAGTAAATGAATAATTACAGTGTGC AGTGATTATTGCAATGATTAATGTATTGATAAGATAATATGAAAACACAGAATTCAAACAGCAGTGAACTGAGATTA GAATTGTGGAGAGCACTGGCATTTAAGAATGTCACACTTAGAATGTGTCTCTAGGCATTGTTCTGTGCATATATCAT CTCAATATTCATTATCTGAAAATTATGAATTAGGTACAAAGCTCAAATAATTTATTTTTTCAGGTTAGCAAGAACTT TTTTTTTTTTTTTTTCTGAGATGGAGCATTGCTATGGTTGCCCAGGCTGGAGTGCAATGGCATGATCCAGGCTCACT GCAACATCTGCCTCCCAGGTTCAAGCGATTCTCCTGCCTCAGCCTCCCAAGTAGCTGGCATTACAGGCATGTGCCAC CACCATGCCTGGCTAATTTTCTATTTTTAGTAGATAGGGGGTTTCACCATGTTGGTCAGGCTGATCTCGAACTCCTA ACATCAGGTGATCCACCCTCCTCGGCCTCTGAATGTACTGGGATCACAGGCGTGAGCCACCACACCCAGCCAAGAAT GTGAATTTTGTAGAAGGATATAACCCATATTTCTCTGACCCTAGAGTCCTTAGTATACCTCCCATACCATGTGGCTC ATCCTCCTTACATACATTTCCCATCTTTCACCCTACCTTTTCCTTTTTGTTTCAGCTTTTCACTGTGTGTCAAAATC TAGAACCTTATCTCCTACCTGCTCTGAAACCAACAGCAAGTTGACTTCCATTCTAACCCACATTGGCATTACACTAA TTAAAATCGATACTGAGTTCTAAAATCATCTGGGATTTTGGGGACTATGTCTTACTTCATACTTCCTTGAGATTTCA CATTAAATGTTGGTGTTCATTAAAGGTCCTTCATTTAACTTTGTATTCATCACACTCTTGGATTCACAGTTATATCT AAACTCTTATATATAGCCTGTATAATCCCAATTCCCAAGTCTGATTTCTAACCTCTGACCTCCAACCTCAGTGCCAA ACCCATATATCAAACAATGTACTGGGCTTATTTATATAGATGTCCTATAGGCACCTCAGACTCAGCATGGGTATTTC ACTTGTTATACTAAAACTGTTTCTCTTCCAGTGTTTTCCATTTTAGTCATTAGATAGCTACTTGCCCATTCACCAAG GTCACAGATTAAAATCATTTCCCTACCTCTAATCAACAGTTCAATTCTGCTTCAATTTGTCCCTATCTATTAATCAC CACTCTTACTGCCCAGTCAGGTCCTCATTGTTTCCTGAACAAGAGTAGATGCTATTCTTTCCACTTTAAGACCTTAT CCTGGCTGGATGCGGTGGCTCAGGCTTGTAAACCCAGCACTTTGGGAGGCCGAGGCAGGCAGATCACTTGAGGTCAG GAGTTCAAGACCAGCCTGACCAACATGGTGAAACCCCATCTCTACTAAAAATACAAAATCAGCCGGGCGTGTGGTGC ATGCCTGCAGTCCCAGCTATTCAGGTGGCTGAGGCAGGAGAATTGCTTGAACCCAGGAGGCGGAGGTTGCGGTGAGC CTAGATTGCACCATTGCACTCTAGCTTGGGCAATAGGGATGAAACTCCATCTCAGAAGAGAAAAGAAAAAAAGACCT TATTCTGTTACACAAATCCTCTCAATGCAATCCATATAGAATAAACATGTAACCAGATCTCCCAATGTGTAAAATCA TTTCAGGTAGAACAGAATTAAAGTGAAAAGCCAAGTCTTTGGAATTAACAGACAAAGTTCAAATAACAGTCCTCATG GCCTTAAGAATTTACCTAACATTTTTTTTAGAATCAATTTTCTTATATATGAATTGGAAACATAATTCCTCCCTCAC AAACACATTCTAAGATTTTAAGGAGATATTGATGAAGTACATCATCTGTCATTTTTAACAGTTAGTGGTAGTGATTC ACACAGCACATTATGATCTGTTCTTGTATGTTCTGTTCCATTCTGTATTCTTGACCTGGTTGTATTCTTTCTGAGCT CCAGATCCACATATCTAAGTACATCTTTTTGCATTTTACAAGAGTGCATACAATACAATGTATCCAAGACTGTATTT CTGATTTTATCGTACCACTAAACTCACAAATGTGGCCCTATTCTTGTGTTCACGACTGACATCACCGTCATGGTCCA AGTCTGATAATAGAAATGGCATTGTCACTTTCTTCCCTACTGCAACAGAAGCCCAGCTATTTGTCTCCCATTTTCTC TACTTCTAAAATACATTTCTTCACTAAGTGAGAATAATCTTTTAAAGACACAAATCAAACCATGCCACCACCTTTCT TGAATTATTCAATATCTTTCGTTGGCTTCCAGGTTACAGAAAAATAACTTGTAACAAAGTTTAAAGGTCATTCATGG CTCCTCTCTACCCTATTTTATAACATTTCCCCTTGTGATCAGAATCTCAGGCACATCATCCATCTTTCTATATACAA ATAAAGTCATATAGTTTGAACTCACCTCTGGTTACTTTTAATCAACCAAATGCTGTAAAATGCATTTGTATCGCTAC GTGTTAAGCAGTAGTTGATTCTTTTCATTTCTTGTTAATATTCTATTCTTTGACTATACCGTAATTTATCAATTCTA CTGTTGGTAAGCATTTAAGTGGCTACCGGTTTGAGGTTTTTATGATTATTGCTGTCATAAGCATTTCTATACATGTC TTTGGATACACACATGCATGTGTTTCTGAATATCTAAAAATGTAATTGCTAGGTAATAGACTTATCAAGCATCCAGC ATTTGTGGATACTATTAAAGGTTTTCCAAAGGGGTTATACTATTGTACAGTGTCACCAACAGAGTTTGAGTTTCTAT TGATCCATATCACCACCAAAATTTGAACTGTCAGTCTTATCTCTTCTCTTGTCTCTTTTTTCCTCTTTTTTTTCCTT CCCTTCCCCTCTCTTCGTTTCTTTTCTCTCCTCTTCTCTTCTTTCCTCTCTTCCCTTCCCTTTCTCTTTCTCTTCCC TATCCCTTCTCCTCTCCTCTCCCCTCCTTTTTTCTCCTCTCCTCTCCATTATTTATTTTTCCTTCTTCTCCTCCATC CCTTCCATCCTCTCTCTTCCCCTCTTCCTTCCTTCCTTTCTCCATTTCTTCCTCCTCTTTCCCTCAATCCTTCCTTT TGGATATGCTCATGGGTGTGTATTTGTCTGCCATTGTGGCATTATTTGAATTCAGAAAAGAGTGAAAAACTACTGGG ATCTTCATTCTGGGTCTAATTCCACATTTTTTTTTAAGAACACACTCTGTAAAAATGTTCTGTACTAGCATATTCCC AGGAACTTCGTTAAATTTAATCTGGCTGAATATGGTAAATCTACTTTGCACTTTGCATTCTTTCTTTAGTCATACCA TAATTTTAAACATTCAAAATATTTGTATATAATATTTGATTTTATCTGTCATTAAAATGTTAACCTTAAAATTCATG TTTCCAGAACCTATTTCAATAACTGGTAAATAAACACTATTCATTTTTTAAATATTCTTTTAATGGATATTTATTTC AATATAATAAAAAATTAGAGTTTTATTATAGGAAGAATTTACCAAAAGAAGGAGGAAGCAAGCAAGTTTAAACTGCA GCAATAGTTGTCCATTCCAACCTCTCAAAATTCCCTTGGAGACAAAATCTCTAGAGGCAAAGAAGAACTTTATATTG AGTCAACTTGTTAAAACATCTGCTTTTAGATAAGTTTTCTTAGTATAAAGTGACAGAAACAAATAAGTTAAACTCTA AGATACATTCCACTATATTAGCCTAAAACACTTCTGCAAAAATGAAACTAGGAGGATATTTTTAGAAACAACTGCTG AAAGAGATGCGGTGGGGAGATATGCAGAGGAGAACAGGGTTTCTGAGTCAAGACACACATGACAGAACAGCCAATCT CAGGGCAAGTTAAGGGAATAGTGGAATGAAGGTTCATTTTTCATTCTCACAAACTAATGAAACCCTGCTTATCTTAA ACCAACCTGCTCACTGGAGCAGGGAGGACAGGACCAGCATAAAAGGCAGGGCAGAGTCGACTGTTGCTTACACTTTC TTCTGACATAACAGTGTTCACTAGCAACCTCAAACAGACACCATGGTGCATCTGACTCCTGAGGAGAAGACTGCTGT CAATGCCCTGTGGGGCAAAGTGAACGTGGATGCAGTTGGTGGTGAGGCCCTGGGCAGGTTGGTATCAAGGTTATAAG AGAGGCTCAAGGAGGCAAATGGAAACTGGGCATGTGTAGACAGAGAAGACTCTTGGGTTTCTGATAGGCACTGACTC TCTGTCCCTTGGGCTGTTTTCCTACCCTCAGATTACTGGTGGTCTACCCTTGGACCCAGAGGTTCTTTGAGTCCTTT GGGGATCTGTCCTCTCCTGATGCTGTTATGGGCAACCCTAAGGTGAAGGCTCATGGCAAGAAGGTGCTAGGTGCCTT TAGTGATGGCCTGGCTCACCTGGACAACCTCAAGGGCACTTTTTCTCAGCTGAGTGAGCTGCACTGTGACAAGCTGC ACGTGGATCCTGAGAACTTCAGGGTGAGTCCAGGAGATGCTTCACTTTTCTCTTTTTACTTTCTAATCTTACATTTT GGTTCTTTTACCTACCTGCTCTTCTCCCACATTTTTGTCATTTTACTATATTTTATCATTTAATGCTTCTAAAATTT TGTTAATTTTTTATTTAAATATTCTGCATTTTTTCCTTCCTCACAATCTTGCTATTTTAAATTATTTAATATCCTGT CTTTCTCTCCCAACCCCCTCCCTTCATTTTTCCTTCTCTAACAACAACTCAAATTATGCATACCAGCTCTCACCTGC TAATTCTGCACTTAGAATAATCCTTTTGTCTCTCCACATGGGTATGGGAGAGGCTCCAACTCAAAGATGAGAGGCAT AGAATACTGTTTTAGAGGCTATAAATCATTTTACAATAAGGAATAATTGGAATTTTATAAATTCTGTAGTAAATGGA ATGGAAAGGAAAGTGAATATTTGATTATGAAAGACTAGGCAGTTACACTGGAGGTGGGGCAGAAGTCGTTGCTAGGA GACAGCCCATCATCACACTGATTAATCAATTAATTTGTATCTATTAATCTGTTTATAGTAATTAATTTGTATATGCT ATATACACATACAAAATTAAAACTAATTTGGAATTAATTTGTATATAGTATTATACAGCATATATAGCATATATGTA CATATATAGACTACATGCTAGTTAAGTACATAGAGGATGTGTGTGTATAGATATATGTTATATGTATGCATTCATAT ATGTACTTATTTATGCTGATGGGAATAACCTGGGGATCAGTTTTGTCTAAGATTTGGGCAGAAAAAAATGGGTGTTG GCTCAGTTTCTCAGAAGCCAGTCTTTATTTCTCTGTTAACCATATGCATGTATCTGCCTACCTCTTCTCCGCAGCTC TTGGGCAATGTGCTGGTGTGTGTGCTGGCCCGCAACTTTGGCAAGGAATTCACCCCACAAATGCAGGCTGCCTATCA GAAGGTGGTGGCTGGTGTGGCTAATGCCCTGGCTCACAAGTACCATTGAGATCCTGGACTGTTTCCTGATAACCATA AGAAGACCCTATTTCCCTAGATTCTATTTTCTGAACTTGGGAACACAATGCCTACTTCAAGGGTATGGCTTCTGCCT AATAAAGAATGTTCAGCTCAACTTCCTGATTAATTTCACTTATTTCATTTTTTTGTCCAGGTGTGTAAGAAGGTTCC TGAGGCTCTACAGATAGGGAGCACTTGTTTATTTTACAAAGAGTACATGGGAAAAGAGAAAAGCAAGGGAACCGTAC AAGGCATTAATGGGTGACACTTCTACCTCCAAAGAGCAGAAATTATCAAGAACTCTTGATACAAAGATAATACTGGC ACTGCAGAGGTTCTAGGGAAGACCTCAACCCTAAGACATAGCCTCAAGGGTAATAGCTACGATTAAACTCCAACAAT TACTGAGAAAATAATGTGCTCAATTAAAGGCATAATGATTACTCAAGACAATGTTATGTTGTCTTTCTTCCTCCTTC CTTTGCCTGCACATTGTAGCCCATAATACTATACCCCATCAAGTGTTCCTGCTCCAAGAAATAGCTTCCTCCTCTTA CTTGCCCCAGAACATCTCTGTAAAGAATTTCCTCTTATCTTCCCATATTTCAGTCAAGATTCATTGCTCACGTATTA CTTGTGACCTCTCTTGACCCCAGCCACAATAAACTTCTCTATACTACCCAAAAAATCTTTCCAAACCCTCCCCGACA CCATATTTTTATATTTTTCTTATTTATTTCATGCACACACACACACTCCGTGCTTTATAAGCAATTCTGCCTATTCT CTACCTTCTTACAATGCCTACTGTGCCTCATATTAAATTCATCAATGGGCAGAAAGAAAATATTTATTCAAGAAAAC AGTGAATGAATGAACGAATGAGTAAATGAGTAAATGAAGGAATGATTATTCCTTGCTTTAGAACTTCTGGAATTAGA GGACAATATTAATAATACCATCGCACAGTGTTTCTTTGTTGTTAATGCTACAACATACAAAGAGGAAGCATGCAGTA AACAACCGAACAGTTATTTCCTTTCTGATCATAGGAGTAATATTTTTTTCCTTGAGCACATTTTTGCCATAGGTAAA ATTAGAAGGATTTTTAGAACTTTCTCAGTTGTATACATTTTTAAAAATCTGTATTATATGCATGTTGATTAATTTTA AACTTACTTGAATACCTAAACAGAATCTGTTGTTTCCTTGTGTTTGAAAGTGCTTTCACAGTAACTCTGTCTGTACT GCCAGAATATACTGACAATGTGTTATAGTTAACTGTTTTGATCACAACATTTTGAATTGACTGGCAGCAGAAGCTCT TTTTATATCCATGTGTTTTCCTTAAGTCATTATACATAGTAGGCATGAGACTCTTTATACTGAATAAGATATTTAGG AACCACTGGTTTACATATCAGAAGCAGAGCTACTCAGGGCATTTTGGGGAAGATCACTTTCACATTCCTGAGCATAG GGAAGTTCTCATAAGAGTAAGATATTAAAAGGAGATACTTGTGTGGTATTCGAAAGACAGTAAGAGAGATTGTAGAC CTTATGATCTTGATAGGGAAAACAAACTACATTCCTTTCTCCAAAAGTCAAAAAAAAAGAGCAAATATAGCTTACTA TACCTTCTATTCCTACACCATTAGAAGTAGTCAGTGAGTCTAGGCAAGATGTTGGCCCTAAAAATCCAAATACCAGA GAATTCATGAGAACATCACCTGGATGGGACATGTGCCGAGCAACACAATTACTATATGCTAGGCATTGCTATCTTCA TATTGAAGATGAGGAGGTCAAGAGATGAAAAAAGACTTGGCACCTTGTTGTTATATTAAAATTATTTGTTAGAGTAG AGCTTTTGTAAGAGTCTAGGAGTGTGGGAGCTAAATGATGATACACATGGACACAAAGAATAGATCAACAGACACCC AGGCCTACTTGAGGGTTGAGGGTGGGAAGAGGGAGACGATGAAAAAGAACCTATTGGGTATTAAGTTCATCACTGAG TGATGAAATAATCTGTACATCAAGACCCAGTGATATGCAATTTACCTATATAACTTGTACATGTACCCCCAAATTTA AAATAAAGTTAAAACAAAGTATAGGAATGGAATTAATTCCTCAAGATTTGGCTTTAATTTTATTTGATAATTTATCA AATGGTTGTTTTTCTTTTCTCACTATGGCGTTGCTTTATAAACTATGTTCAGTATGTCTGAATGAAAGGGTGTGTGT GTGTGTGAAAGAGAGGGAGAGAGGAAGGGAAGAGAGGACGTAATAATGTGAATTTGAGTTCATGAAAATTTTTCAAT AAAATAATTTAATGTCAGGAGAATTAAGCCTAATAGTCTCCTAAATCATCCATCTCTTGAGCTTCAGAGCAGTCCTC TGAATTAATGCCTACATGTTTGTAAAGGGTGTTCAGACTGAAGCCAAGATTCTACCTCTAAAGAGATGCAATCTCAA ATTTATCTGAAGACTGTACCTCTGCTCTCCATAAATTGACACCATGGCCCACTTAATGAGGTTAAAAAAAAGCTAAT TCTGAATGAAAATCTGAGCCCAGTGGAGGAAATATTAATGAACAAGGTGCAGACTGAAATATAAATTTTCTGTAATA ATTATGCATATACTTTAGCAAAGTTCTGTCTATGTTGACTTTATTGCTTTTGGTAAGAAATACAACTTTTTAAAGTG AACTAAACTATCCTATTTCCAAACTATTTTGTGTGTGTGCGGTTTGTTTCTATGGGTTCTGGTTTTCTTGGAGCATT TTTATTTCATTTTAATTAATTAATTCTGAGAGCTGCTGAGTTGTGTTTACTGAGAGATTGTGTATCTGCGAGAGAAG TCTGTAGCAAGTAGCTAGACTGTGCTTGACCTAGGAACATATACAGTAGATTGCTAAAATGTCTCACTTGGGGAATT TTAGACTAAACAGTAGAGCATGTATAAAAATACTCTAGTCAAGTGCTGCTTTTGAAACAAATGATAAAACCACACTC CCATAGATGAGTGTCATGATTTTCATGGAGGAAGTTAATATTCATCCTCTAAGTATACCCAGACTAGGGCCATTCTG ATATAAAACATTAGGACTTAAGAAAGATTAATAGACTGGAGTAAAGGAAATGGACCTCTGTCTCTCTCGCTGTCTCT TTTTTGAGGACTTGTGTGTGTGTGTGTGTGTGTGTGTGTGTGTGTTGTGGTCAGTGGGGCTGGAATAAAAGTAGAAT AGACCTGCACCTGCTGTGGCATCCATTCACAGAGTAGAAGCAAGCTCACAATAGTGAAGATGTCAGTAAGCTTGAAT AGTTTTTCAGGAACTTTGAATGCTGATTTAGATTTGAAACTGAGGCTCTGACCATAACCAAATTTGCACTATTTATT GCTTCTTGAAACTTATTTGCCTGGTATGCCTGGGCTTTTGATGGTCTTAGTATAGCTTGCAGCCTTGTCCCTGCAGG GTATTATGGGTAATAGAAAGAAAAGTCTGCGTTACACTCTAGTCACACTAAGTAACTACCATTGGAAAAGCAACCCC TGCCTTGAAGCCAGGATGATGGTATCTGCAGCAGTTGCCAACACAAGAGAAGGATCCATAGTTCATCATTTAAAAAA GAAAACAAAATAGAAAAAGGAAAACTATTTCTGAGCATAAGAAGTTGTAGGGTAAGTCTTTAAGAAGGTGACAATTT CTGCCAATCAGGATTTCAAAGCTCTTGCTTTGACAATTTTGGTCTTTCAGAATACTATAAATATAACCTATATTATA ATTTCATAAAGTCTGTGCATTTTCTTTGACCCAGGATATTTGCAAAAGACATATTCAAACTTCCGCAGAACACTTTA TTTCACATATACATGCCTCTTATATCAGGGATGTGAAACAGGGTCTTGAAAACTGTCTAAATCTAAAACAATGCTAA TGCAGGTTTAAATTTAATAAAATAAAATCCAAAATCTAACAGCCAAGTCAAATCTGTATGTTTTAACATTTAAAATA TTTTAAAGACGTCTTTTCCCAGGATTCAACATGTGAAATCTTTTCTCAGGGATACACGTGTGCCTAGATCCTCATTG CTTTAGTTTTTTACAGAGGAATGAATATAAAAAGAAAATACTTAAATTTTATCCCTCTTACCTCTATAATCATACAT AGGCATAATTTTTTAACCTAGGCTCCAGATAGCCATAGAAGAACCAAACACTTTCTGCGTGTGTGAGAATAATCAGA GTGAGATTTTTTCACAAGTACCTGATGAGGGTTGAGACAGGTAGAAAAAGTGAGAGATCTCTATTTATTTAGCAATA ATAGAGAAAGCATTTAAGAGAATAAAGCAATGGAAATAAGAAATTTGTAAATTTCCTTCTGATAACTAGAAATAGAG GATCCAGTTTCTTTTGGTTAACCTAAATTTTATTTCATTTTATTGTTTTATTTTATTTTATTTTATTTTATTTTGTG TAATCGTAGTTTCAGAGTGTTAGAGCTGAAAGGAAGAAGTAGGAGAAACATGCAAAGTAAAAGTATAACACTTTCCT TACTAAACCGACTGGGTTTCCAGGTAGGGGCAGGATTCAGGATGACTGACAGGGCCCTTAGGGAACACTGAGACCCT ACGCTGACCTCATAAATGCTTGCTACCTTTGCTGTTTTAATTACATCTTTTAATAGCAGGAAGCAGAACTCTGCACT TCAAAAGTTTTTCCTCACCTGAGGAGTTAATTTAGTACAAGGGGAAAAAGTACAGGGGGATGGGAGAAAGGCGATCA CGTTGGGAAGCTATAGAGAAAGAAGAGTAAATTTTAGTAAAGGAGGTTTAAACAAACAAAATATAAAGAGAAATAGG AACTTGAATCAAGGAAATGATTTTAAAACGCAGTATTCTTAGTGGACTAGAGGAAAAAAATAATCTGAGCCAAGTAG AAGACCTTTTCCCCTCCTACCCCTACTTTCTAAGTCACAGAGGCTTTTTGTTCCCCCAGACACTCTTGCAGATTAGT CCAGGCAGAAACAGTTAGATGTCCCCAGTTAACCTCCTATTTGACACCACTGATTACCCCATTGATAGTCACACTTT GGGTTGTAAGTGACTTTTTATTTATTTGTATTTTTGACTGCATTAAGAGGTCTCTAGTTTTTTATCTCTTGTTTCCC AAAACCTAATAAGTAACTAATGCACAGAGCACATTGATTTGTATTTATTCTATTTTTAGACATAATTTATTAGCATG CATGAGCAAATTAAGAAAAACAACAACAAATGAATGCATATATATGTATATGTATGTGTGTATATATACACATATAT ATATATATTTTTTTTCTTTTCTTACCAGAAGGTTTTAATCCAAATAAGGAGAAGATATGCTTAGAACTGAGGTAGAG TTTTCATCCATTCTGTCCTGTAAGTATTTTGCATATTCTGGAGACGCAGGAAGAGATCCATCTACATATCCCAAAGC TGAATTATGGTAGACAAAGCTCTTCCACTTTTAGTGCATCAATTTCTTATTTGTGTAATAAGAAAATTGGGAAAACG ATCTTCAATATGCTTACCAAGCTGTGATTCCAAATATTACGTAAATACACTTGCAAAGGAGGATGTTTTTAGTAGCA ATTTGTACTGATGGTATGGGGCCAAGAGATATATCTTAGAGGGAGGGCTGAGGGTTTGAAGTCCAACTCCTAAGCCA GTGCCAGAAGAGCCAAGGACAGGTACGGCTGTCATCACTTAGACCTCACCCTGTGGAGCCACACCCTAGGGTTGGCC AATCTACTCCCAGGAGCAGGGAGGGCAGGAGCCAGGGCTGGGCATAAAAGTCAGGGCAGAGCCATCTATTGCTTACA TTTGCTTCTGACACAACTGTGTTCACTAGCAACCTCAAACAGACACCATGGTGCACCTGACTCCTGAGGAGAAGTCT GCCGTTACTGCCCTGTGGGGCAAGGTGAACGTGGATGAAGTTGGTGGTGAGGCCCTGGGCAGGTTGGTATCAAGGTT ACAAGACAGGTTTAAGGAGACCAATAGAAACTGGGCATGTGGAGACAGAGAAGACTCTTGGGTTTCTGATAGGCACT GACTCTCTCTGCCTATTGGTCTATTTTCCCACCCTTAGGCTGCTGGTGGTCTACCCTTGGACCCAGAGGTTCTTTGA GTCCTTTGGGGATCTGTCCACTCCTGATGCTGTTATGGGCAACCCTAAGGTGAAGGCTCATGGCAAGAAAGTGCTCG GTGCCTTTAGTGATGGCCTGGCTCACCTGGACAACCTCAAGGGCACCTTTGCCACACTGAGTGAGCTGCACTGTGAC AAGCTGCACGTGGATCCTGAGAACTTCAGGGTGAGTCTATGGGACCCTTGATGTTTTCTTTCCCCTTCTTTTCTATG GTTAAGTTCATGTCATAGGAAGGGGAGAAGTAACAGGGTACAGTTTAGAATGGGAAACAGACGAATGATTGCATCAG TGTGGAAGTCTCAGGATCGTTTTAGTTTCTTTTATTTGCTGTTCATAACAATTGTTTTCTTTTGTTTAATTCTTGCT TTCTTTTTTTTTCTTCTCCGCAATTTTTACTATTATACTTAATGCCTTAACATTGTGTATAACAAAAGGAAATATCT CTGAGATACATTAAGTAACTTAAAAAAAAACTTTACACAGTCTGCCTAGTACATTACTATTTGGAATATATGTGTGC TTATTTGCATATTCATAATCTCCCTACTTTATTTTCTTTTATTTTTAATTGATACATAATCATTATACATATTTATG GGTTAAAGTGTAATGTTTTAATATGTGTACACATATTGACCAAATCAGGGTAATTTTGCATTTGTAATTTTAAAAAA TGCTTTCTTCTTTTAATATACTTTTTTGTTTATCTTATTTCTAATACTTTCCCTAATCTCTTTCTTTCAGGGCAATA ATGATACAATGTATCATGCCTCTTTGCACCATTCTAAAGAATAACAGTGATAATTTCTGGGTTAAGGCAATAGCAAT ATTTCTGCATATAAATATTTCTGCATATAAATTGTAACTGATGTAAGAGGTTTCATATTGCTAATAGCAGCTACAAT CCAGCTACCATTCTGCTTTTATTTTATGGTTGGGATAAGGCTGGATTATTCTGAGTCCAAGCTAGGCCCTTTTGCTA ATCATGTTCATACCTCTTATCTTCCTCCCACAGCTCCTGGGCAACGTGCTGGTCTGTGTGCTGGCCCATCACTTTGG CAAAGAATTCACCCCACCAGTGCAGGCTGCCTATCAGAAAGTGGTGGCTGGTGTGGCTAATGCCCTGGCCCACAAGT ATCACTAAGCTCGCTTTCTTGCTGTCCAATTTCTATTAAAGGTTCCTTTGTTCCCTAAGTCCAACTACTAAACTGGG GGATATTATGAAGGGCCTTGAGCATCTGGATTCTGCCTAATAAAAAACATTTATTTTCATTGCAATGATGTATTTAA ATTATTTCTGAATATTTTACTAAAAAGGGAATGTGGGAGGTCAGTGCATTTAAAACATAAAGAAATGAAGAGCTAGT TCAAACCTTGGGAAAATACACTATATCTTAAACTCCATGAAAGAAGGTGAGGCTGCAAACAGCTAATGCACATTGGC AACAGCCCTGATGCCTATGCCTTATTCATCCCTCAGAAAAGGATTCAAGTAGAGGCTTGATTTGGAGGTTAAAGTTT TGCTATGCTGTATTTTACATTACTTATTGTTTTAGCTGTCCTCATGAATGTCTTTTCACTACCCATTTGCTTATCCT GCATCTCTCAGCCTTGACTCCACTCAGTTCTCTTGCTTAGAGATACCACCTTTCCCCTGAAGTGTTCCTTCCATGTT TTACGGCGAGATGGTTTCTCCTCGCCTGGCCACTCAGCCTTAGTTGTCTCTGTTGTCTTATAGAGGTCTACTTGAAG AAGGAAAAACAGGGGGCATGGTTTGACTGTCCTGTGAGCCCTTCTTCCCTGCCTCCCCCACTCACAGTGACCCGGAA TCTGCAGTGCTAGTCTCCCGGAACTATCACTCTTTCACAGTCTGCTTTGGAAGGACTGGGCTTAGTATGAAAAGTTA GGACTGAGAAGAATTTGAAAGGGGGCTTTTTGTAGCTTGATATTCACTACTGTCTTATTACCCTATCATAGGCCCAC CCCAAATGGAAGTCCCATTCTTCCTCAGGATGTTTAAGATTAGCATTCAGGAAGAGATCAGAGGTCTGCTGGCTCCC TTATCATGTCCCTTATGGTGCTTCTGGCTCTGCAGTTATTAGCATAGTGTTACCATCAACCACCTTAACTTCATTTT TCTTATTCAATACCTAGGTAGGTAGATGCTAGATTCTGGAAATAAAATATGAGTCTCAAGTGGTCCTTGTCCTCTCT CCCAGTCAAATTCTGAATCTAGTTGGCAAGATTCTGAAATCAAGGCATATAATCAGTAATAAGTGATGATAGAAGGG TATATAGAAGAATTTTATTATATGAGAGGGTGAAACCTAAAATGAAATGAAATCAGACCCTTGTCTTACACCATAAA CAAAAATAAATTTGAATGGGTTAAAGAATTAAACTAAGACCTAAAACCATAAAAATTTTTAAAGAAATCAAAAGAAG AAAATTCTAATATTCATGTTGCAGCCGTTTTTTGAATTTGATATGAGAAGCAAAGGCAACAAAAGGAAAAATAAAGA AGTGAGGCTACATCAAACTAAAAAATTTCCACACAAAAAAGAAAACAATGAACAAATGAAAGGTGAACCATGAAATG GCATATTTGCAAACCAAATATTTCTTAAATATTTTGGTTAATATCCAAAATATATAAGAAACACAGATGATTCAATA ACAAACAAAAAATTAAAAATAGGAAAATAAAAAAATTAAAAAGAAGAAAATCCTGCCATTTATGCGAGAATTGATGA ACCTGGAGGATGTAAAACTAAGAAAAATAAGCCTGACACAAAAAGACAAATACTACACAACCTTGCTCATATGTGAA ACATAAAAAAGTCACTCTCATGGAAACAGACAGTAGAGGTATGGTTTCCAGGGGTTGGGGGTGGGAGAATCAGGAAA CTATTACTCAAAGGGTATAAAATTTCAGTTATGTGGGATGAATAAATTCTAGATATCTAATGTACAGCATCGTGACT GTAGTTAATTGTACTGTAAGTATATTTAAAATTTGCAAAGAGAGTAGATTTTTTTGTTTTTTTAGATGGAGTTTTGC TCTTGTTGTCCAGGCTGGAGTGCAATGGCAAGATCTTGGCTCACTGCAACCTCCGCCTCCTGGGTTCAAGCAAATCT CCTGCCTCAGCCTCCCGAGTAGCTGGGATTACAGGCATGCGACACCATGCCCAGCTAATTTTGTATTTTTAGTAGAG ACGGGGTTTCTCCATGTTGGTCAGGCTGATCCGCCTCCTCGGCCACCAAAGGGCTGGGATTACAGGCGTGACCACCG GGCCTGGCCGAGAGTAGATCTTAAAAGCATTTACCACAAGAAAAAGGTAACTATGTGAGATAATGGGTATGTTAATT AGCTTGATTGTGGTAATCATTTCACAAGGTATACATATATTAAAACATCATGTTGTACACCTTAAATATATACAATT TTTATTTGTGAATGATACCTCAATAAAGTTGAAGAATAATAAAAAAGAATAGACATCACATGAATTAAAAAACTAAA AAATAAAAAAATGCATCTTGATGATTAGAATTGCATTCTTGATTTTTCAGATACAAATATCCATTTGACTGTTTACT CTTTTCCAAAACAATACAATAAATTTTAGCACTTTATCTTCATTTTCCCCTTCCCAATCTATAATTTTATATATATA TATTTTAGATATTTTGTATAGTTTTACTCCCTAGATTTTCTAGTGTTATTATTAAATAGTGAAGAAATGTTTACACT TATGTACAAAATGTTTTGCATGCTTTTCTTCATTTCTAACATTCTCTCTAAGTTTATTCTATTTTTTCCTGATTATC CTTAATATTATCTCTTTCTGCTGGAAATATATTGTTACTTTTGGTTTATCTAAAAATGGCTTCATTTTCTTCATTCT AAAATCATGTTAAATTAATACCACTCATGTGTAAGTAAGATAGTGGAATAAATAGAAATCCAAAAACTAAATCTCAC AAAATATAATAATGTGATATATAAAAATATAGCTTTTAAATTTAGCTTGGAAATAAAAAACAAACAGTAATTGAACA ACTATACTTTTTGAAAAGAGTAAAGTGAAATGCTTAACTGCATATACCACAATCGATTACACAATTAGGTGTGAAGG TAAAATTCAGTCACGAAAAAACTAGAATAAAAATATGGGAAGACATGTATATAATCTTAGAGATAACAGTGTTATTT AATTATCAACCCAAAGTAGAAACTATCAAGGGAGAAATAAATTCAGTCAACAATAAAAGCATTTAAGAAGTTATTCT AGGCTGGGAGCGGTGGCTCACACCTGCAATTGCAGCACTTTGGGAGGCCTAGACAGGCGGATCACGACGTCAGGAGT TCAAGATCAGCCTGGCCAACATAGTGAAACCTCATCGCTACTAAAAATATAAAAACTTAGCCTGGCGTGGTGGCAGG CATGTGTAATCCCAGCAATTTGGGAGGCTGAGGCAGGAGAATCGCTTGATCCTGGGAGGCAGAGGTTGCAGTGAGCC AAGATTGTGCCACTGCATTCCAGCCCAGGTGACAGCATGAGACTCCGTCACAAAAAAAAAAGAAAAAAAAGGGGGGG GGGGGCGGTGGAGCCAAGATGACCGAATAGGAACAGCTCCAGTCTATAGCTCCCATCGTGAGTGACGCAGAAGACGG GTGATTTCTGCATTTCCAACTGAGGTACCAGGTTCATCTCACAGGGAAGTGCCAGGCAGTGGGTGCAGGACAGTAGT GCAGTGCACTGTGCATGAGCCGAAGCAGGGCGAGGCATCACCTCACCCGGGAAGCACAAGGGGTCAGGGAATTCCCT TTCCTAGTCAAAGAAAAGGGTGACAGATGGCACCTGGAAAATCGGGTCACTCCCGCCCTAATACTGCGCTCTTCCAA CAAGCTTAACAAATGGCACACCAGGAGATTATATCCCATGCCTGGCTCAGAGGGTCCTACGCCCATGGAGCCTCGCT CATTGCTAGCACAGCAGTCTGAGGTCAAACTGCAAGGTGGCAGTGAGGCTGGGGGAGGGGTGCCCACCATTGTCCAG GCTTGAGCAGGTAAACAAAGCCGCCTGGAAGCTCGAACTGGGTGGAGCCCACCACAGCTCAAGGAGGCCTGCCTGCC TCTGTAGGCTCCACCTCTAGGGGCAGGGCACAGACAAACAAAAGACAACAAGAACCTCTGCAGACTTAAATGTCCCT GTCTGACAGCTTTGAAGAGAGTAGTGGTTCTCCCAGCACATAGCTTCAGATCTGAGAACAGGCAGACTGCCTCCTCA AGTGGGTCCCTGACCCCCGAGTAGCCTAACTGGGAGGCATCCCCCAGTAGGGCGGACTGACACCTCACATGGCTGGT ACTCCTCTAAGACAAAACTTCCAGAGGAATGATCAGGCAGCAGCATTTGCGGTTCACCAATATCCACTGTTCTGCAG CCACCGCTGCTGATACCCAGGAAAACAGCATCTGGAGTGGACCTCCAGTAAACTCCAACAGACCTGCAGCTGAGGGT CCTGACTGTTAGAAGGAAAACTAACAAACAGAAAGGACATCCACACCAAAAACCCATCTGTACATCACCATCATCAA AGACCAAAGGTAGATAAAACCATAAAGATGGGGAAAAAGCAGAGCAGAAAAACTGGACACTCTAAAAATGAGAGTGC CTCTCCTTCTCCAAAGTAACGCAGCTCCTCACCAGCAATGGAACAAAGCTGGGCAGAGAATGACTTTGACGAGTTGA GAGAGGAAGGCTTCAGAAGATCAAACTACTCCAAGCTAAAGGAGGAAGTTCGAACAAACGGCAAAGAAGTAAAAAAC TTTGAAAAAAAATTAGATGAATGGATAACTAGAATAACCAATGCACAGAAGTCCTTAAAGGACCTGATGGAGCTGAA AACCAAGGCAGGAGAACTACGTGACAAATACACAAGCCTCAGTAACCGATGAGATCAACTGGAAGAAAGGGTATCAA TGACGGAAGATGAAATGAATGAAATGAAGCATGAAGAGAAGTTTAGAGAAAAAAGAATAAAAAGAAACGAACAAAGC CTCCAAGAAATATGGGACTATGTGAAAAGACCAAATCTACATCTAATTGGTGTAGCTGAAAGTGATGGGGAGAATGG AACCAAGTTGGAAAACACTCTGCAGGATATTATCCAGGAGAACTTCCCCAATCTAGCAAGGCAGCCCAAATTCACAT TCAGGAAATACAGAGAACGCCACAAAGATACTCCTAGAGAAAAGCAACTCCAAGACACATAACTGACAGATTCACCA AAGTTGAAATGAAGGAAAAAATGTTAAGGGCAGCCAGAGAGAAAGGTCGGGTTACCCACAAAGGGAAGCCCATCAGA CTAACAGCTGATCTATCGGCAGAAACTCTACAAGCCAGAAGAAAGTGGGGGCCAATATTCAACATTGTTAAAGAAAA GAATTTTCGGCCCAGAATTTCATATCCAGCCAAACTAAGCTTCATAAGCATTGGAGAAATAAAATCCTTTACAGACA AGCAAATGCTGAGAGATTTTGTCACCACCAGGCCTGCCCTACAAGAGCTCCTGAAGGAAGCACTAAACATGGAAAGG AACAACTAGTATCAGCCACTGCAAAAACATGCCAAATTGTAAACGACCATCAAGGCTAGGAAGAAACTGCATCAAGG AGCAAAATAACCAGCTAACATCATAATGACAGGATCAAATTCATACATAACAATACTCACCTTAAATGTAAATAGGC TAAATGCTCCAATTAAAAGACACAGACTGGCAAATTGGATAAGGAGTCAAGACCCATCTGTCGTTATGTATTCAGGA AACCCATCTCACGTGCAGAGACACACATAGGCTCGAAATAAAAGGATGGAGGAATATCTACCAAGCAAATGGAAAAC AAAAAAAGGCAGGGGTTGCAATCCTAGTCTCTGATAAAACAGATTTTAAACCAACAAAGATCAAAAGAGACAAAGAA GGCCATTACATAATGGCAAAGGGATCTATTCAAGAAGAAGAACTAACTATACTAAATATATATGCACCCAATACAGG AGCACCCAGATTCATAAAACAAGTCCTGAGTGACCTACAAAGAGACTTAGATGCCCACACAATAATAATGGGAGACT TTAACACCCCACTGTCAACATTAGACAGATCAACGAGACAGAAAGTTAACAAGGATATCCAGGAATTGGACTCAGCT CTGCACCAAGCAGACCTAATAGACATCTACAGAACTCTCCACCCCAAATCAACAGAATATACATTCTTTTCAGCACC ACACCACACCTATTCCAAAACTGACCACATAGTTGGAAGTAAAGCTCTCCTCAGCAAATGTAAAAGAACAGAAACTA TAACAAACTGTCTCTCAGACCACAGTGCAATCAAACTAGAACTCAGGATTAAGAAACTCACTCAAAACCACTCAGCT ACATGGAAACTGAACAGCCTGCTCCTGAATGACTACTGGGTACATAACAAAATGAAGGCAGAAATAAAGATGTTCTT TGAAACAACGAGAACAAAGACACAACACACCAGAATCTCTGAGACACATTCAAAGCAGTGTGTAGAGGGAAATTTAT AGCACTAAATGCCCACAAGGGAAAGCAGGAAAGATCTAAAATTGACACCCTAACATCACAATTAAAAAACTAGAGAA GCAGGAGCAAACACATTCAAAAGCTAACAGAAGACAAGAAATAACTAAGATCAGAGCAGAAGTGAAGAAGATAGAGA CACAAAAAACCCTTCAAAAAAATCAATGAATCCAGAAGCTGTTTTTTTGAAAAGATCAACAAAATTGATAGACTGCT AGCAAGACTAATAAAGAAGAAAGGGGAGAAGAATCAAATAGACGCAATAAAAAATGACACGGGGTATCACCACTGAT CCCACAGAAATACAAACTACCGTCAGAGAATACTATAAACACCTCTACGCAAATAAACTAGAAAATCTAGAAGAAAT GGATAAATTCCTCGACACATACACTCTGCCAAGACTAAACCAGGAAGAAGTTGTATCTCTGAATAGACCAATAACAG GCTCTGAAATTGAGGCAATAATTAATAGCTTATCAACCAAAAAAAGTCCGGGACCAGTAGGATTCATAGCCGAATTC TACCAGAGGTACAAGGAGGAGCTGGTACCATTCCTTCTGAAACTATTCCAATCAATAGAAAAAGAGGGAATCCTCCC TAACTCATTTTATGAGGCCAGCATCATCCTGATACCAAAGCCTGACAGAGACACAACAAAAAAAGAGAATGTTACAC CAATATCCTTGATGAACATCGATGCAAAAATCCTCAATAAAATACTGGCAAACTGAATCCAGCAGCACATCAAAAAG CTTATCCTCCATGATCAAGTGGGCTTCATCCCTGCCATGCAAGGCTGGTTCAACATACGAAATCAATAAACATAATC CAGCATATAAACAGAACCAAAGACACAAACCATATGATTATCTCAATAGATGCAGAAAAGGCCTTTGACAAAATTCA ACAATGCTTCATGCTAAAAACTCTCAATAAATTAGGTATTGATGGGACATATCTCAAAATAATAAGAGCTATCTATG ACAAACCCACAGCCAATATCATACTGAGTGGACAAAAACTGGAAGCATTCCCTTTGAAAACTGGCACAAGGCAGGGA TGCCCTCTCTCACCACTCCTATTCAACATAGTGTTGGAAGTTCTGGCCAGGGCAATCAGGCAGGAGAAGGAAATAAA GGGCATTCAATTAGGAAAAGAGGAAGGTGAAATTGTCCCTGTTTGCAGATGACATGATTGTATATCTAGAAAACCCC ATTGTCTCAGCCCAAAATCTCCTTAAGCTGATAAGCAACTTCAGCAAAGTCTCAGGATATAAAATCAGTGTGCAAAA ATCACAAGTATTCCTATGCACCAATAACAGACAAACAGAGAGCCAAATCATGAGTGAACTCCCATTCACAATTGCTT CAAAGAGAATAAAATACCTAGGAATCCAACTTACAAGGGATGTGAAGGACCTCTTCAAGGAGAACTACAAACCACTG CTCAATGAAATAAAAGAGGATACAAACAAATGGAAGAACATTCCATGCTTATGGGTAGGAAGAATCATATCGTGAAA ATGGTCATACTGCCCAAGGTAATTTATAGATTCAATGCCATCCCCATCAAGCTACCAATGACTTTCTTCACAGAACT GGAAAAAACTACTTTAAAGTTCATATGGAATCAAAAAAGAGCCCACATCACCAAGGCAATCCTAAGCCAAAAGAACA AAGCTGGAGGCATCACGCTACCTGACTTCAAACTATACTACAATGCTACGGTAACCAAAACAGCATGGTACTGGTAC CAAAACAGAGATCTAGACCAATGGAACAGAACAGAGCCCTCAGAAATAATGCCGCATATCTACAACTATCCGATCTT TGACAAACCTGAGAGAAACAAGCAATGGGGAAAGGATTCCCTATTTAATAAATGGTGCTGGGAAAACTGGCTAGCCA TATGTAGAAAGCTGAAACTGGATCCTTCCTTACACCTTATACAAAAATTAATTCAAGATGGATTAAAGACTTAAACA TTAGACCTAAAACCATAAAAACCCTAGAAAAAAACCTAGGCAATACCATTCAGGACATAGGCATGGGCAAGGACTTC ATGTCTAAAACACCAAAACGAATGGCAACAAAAGACAAAATGGACAAACGGGATCTAATTAAACTAAAGAGCTTCTG CACAGCTAAAGAAACTACCATCAGAGTGAACAGGCAACCTACAAAATGGGAGAAAATTTTTGCAATCTACTCATCTG ACAAAGGGCTAATATCCAGAATCTACAATGAACTCAAACAAATTTACAAGAAAAAACAAACAACCCCATCAAAAAGT GGGCAAAGGATATGAACAGACACTTCTCAAAAGAAGACATTTATGTAATCAAAAAACACATGAAAAAATGCTCATCA TCACTAGCCATCAGAGAAATGCAAATCAAAACCACAATGAGATACCATCTCACACCAGTTAGAATGGCGATCATTAA AAAGTCAGGAAACAACAGGTGCTGGAGAGGATGTGGAGAAACAGGAACAACTTTTACACTGTTGGTGGGACTGTAAA CTAGTTCAACCATTGCGGAAGTCAGTGTGGCAATTCCTCAGGAATCTAGAACTAGAAATACCATTTGACCCAGCCAT CCCATTACTGGGTAGATACCCAAAGGATTATAAATCATGCTGCTATAAAGACACATGCACACGTATGTTTATTGCAG CACTATTCACAATAGCAAAGACTTGGAACCAACCCAAATGTCCAACAACGATAGATTGGATTAAGAAAATGTGGCAC ATATACACCATGGAATACTATGCAGCCATAAAAAATGATGAGTTCATGTCCTTTGTAGGGACATGGATGAAGCTGGA AACTATCATTCTCAGCAAACTATCACAAGGACAATAAACCAAACACCGCATGTTCTCACTCATAGGTGGGAATTGAA CAATGAGAACACATGGACACATGAAGAGGAACATCACACTCTGGGGACTGTTATGGGGTGGGGGGCAGGGGCAGGGA TAGCACTAGGAGATATACCTAATGCTAAATGACGAGTTAATGGGTGCAGCACACCAACATGGCACATGTATACATAT ATAACAAACCTGCCGTTGTGCACATGTACCCTAAAACTTGAAGTATAATAATAAAAAAAAGTTATCCTATTAAAACT GATCTCACACATCCGTAGAGCCATTATCAAGTCTTTCTCTTTGAAACAGACAGAAATTTAGTGTTTTCTCAGTCAGT TAAC

[0596] NCBI Accession No. P68871 MVHLTPEEKSAVTALWGKVNVDEVGGEALGRLLVVYPWTORFFESFGDLSTPDAVMGNPKVKAHGKKVLGAFSDGLA HLDNLKGTFATLSELHCDKLHVDPENFRLLGNVLVCVLAHHFGKEFT PPVQAAYQKVVAGVANALAHKYH

[0597] NCBI Accession No. NP_000509 MVHLTPEEKSAVTALWGKVNVDEVGGEALGRLLVVYPWTORFFESFGDLSTPDAVMGNPKVKAHGKKVLGAFSDGLA HLDNLKGTFATLSELHCDKLHVDPENFRLLGNVLVCVLAHHFGKEFTPPVQAAYOKVVAGVANALAHKYH

[0598] GenBank Accession No. ABD57356.1 MNEQAKQLVAVTROPALNAGVGLVLAQLAEVEARQIPGSLAEARAHCLAQGAPDILLVEVENPQTLAADLAALAECC PPQMRLVLLGERGDVTLFRWLISVGVDDYYPAPLDPDALRTGLLRLLGVPLVTSLRKGRVICVVGAAGGVGTSTVAA NLAMALADQHHRQVALLDLNLHHSRHPILLGSDYAPPGEQWWQATDRLDGTLLAHTAHOLGPRLFLFYDEGQELVLG AEQLVAAVNVMAEHYSTLIIDVPDLRTHGLRALLQEADVVLWLHDFSLGALRLLGQCPQGGQAQRRLLVGNHCRGKE GRVPAQELERVCGQPHAAVLPYDHGVFVRAERAGQPLIQQKSKLARALTLLAGELVGAQVTGRGRR

[0599] GenBank Accession No. ANW61888.1 MAPKKKRKVMSQFDILCKTPPKVLVRQFVERFERPSGEKIASCAAELTYLCWMITHNGTAIKRATEMSYNTIISNSL SFDIVNKSLOFKYKTOKATILEASLKKLIPAWEFTII PYNGQKHOSDITDIVSSLQLQFESSEEADKGNSHSKKMLK ALLSEGESIWEITEKILNS FEYTSRFTKTKTLYQFLFLATFINCGRESDI KNVDPKS FKLVONKYLGVI IQCLVTET KTSVSRHIYFFSARGRIDPLVYLDEFLRNSEPVLKRVNRTGNSSSNKQEYQLLKDNLVRSYNKALKKNAPYPIFAIK NGPKSHIGRHLMTSFLSMKGLTELTNVVGNWSDKRASAVARTTYTHQITAIPDHYFALVSRYYAYDPISKEMIALKD ETNPIEEWQHIEQLKGSAEGSIRYPAWNGIISQEVLDYLSSYINRRI

[0600] GenBank Accession No. AP_000601 MTKRVRLSDSFNPVYPYEDESTSQHPFINPGFISPNGFTQSPDGVLTLKCLTPLTTTGGSLQLKVGGGLTVDDTDGT LQENIRATAPITKNNHSVELSIGNGLETQNNKLCAKLGNGLKFNNGDICIKDSINTLWTGINPPPNCQIVENTNTND GKLTLVLVKNGGLVNGYVSLVGVSDTVNQMFTQKTANIQLRLYFDSSGNLLTEESDLKI PLKNKSSTATSETVASSK AFMPSTTAYPFNTTTRDSENYIHGICYYMTSYDRSLFPLNISIMLNSRMISSNVAYAIQFEWNLNASESPESNIATL TTSPFFFSYITEDDN

[0601] GenBank Accession No. NC_011203 (SEQ ID NO: 208) CTATCTATATAATATACCTTATAGATGGAATGGTGCCAACATGTAAATGAGGTAATTTAAAAAAGTGCGCGCTGTGT GGTGATTGGCTGCGGGGTTAACGGCTAAAAGGGGGGCGCGACCGTGGGAAAATGACGTGACTTATGTGGGAGGAGT TATGTTGCAAGTTATTACGGTAAATGTGACGTAAAACGAGGTGTGGTTTGAACACGGAAGTAGACAGTTTTCCCACG CTTACTGACAGGATATGAGGTAGTTTTGGGCGGATGCAAGTGAAAATTCTCCATTTTCGCGCGAAAACTAAATGAGG AAGTGAATTTCTGAGTCATTTCGCGGTTATGCCAGGGTGGAGTATTTGCCGAGGGCCGAGTAGACTTTGACCGTTTA CGTGGAGGTTTCGATTACCGTGTTTTTCACCTAAATTTCCGCGTACGGTGTCAAAGTTCTGTGTTTTTACGTAGGTG TCAGCTGATCGCTAGGGTATTTAAACCTGACGAGTTCCGTCAAGAGGCCACTCTTGAGTGCCAGCGAGAAGAGTTTT CTCCTCCGCGCCGCAAGTCAGTTCTGCGCTTTGAAAATGAGACACCTGCGCTTCCTGCCACAGGAGGTTATCTCCAG TGAGACCGGGATCGAAATACTGGAGTTTGTGGTAAATACCCTAATGGGAGACGACCCGGAACCGCCAGTGCAGCCTT TCGATCCACCTACGCTGCACGATCTGTATGATTTAGAGATAGACGGGCCGGAGGATCCCAATGAGGAAGCTGTGAAT GGGTTTTTTACTGATTCTATGCTGCTAGCTGCTGATGAAGGATTGGACATAAACCCTCCTCCTGAGACACTTGTTAC CCCAGGGGTGGTTGTGGAAAGCGGCATAGGTGGGAAAAAATTGCCTGATCTGGGAGCAGCTGAAATGGACTTGCGTT GTTATGAAGAGGGTTTTCCTCCCAGTGATGATGAAGATGGGGAAACTGAGCAGTCCATCCATACCGCAGTAAATGAG GGAGTAAAAGCTGCCAGCGATGTTTTTAAGTTGGACTGTCCGGAGCTGCCTGGACATGGCTGTAAGTCTTGTGAATT TCACAGGAATAACACTGGAATGAAAGAACTATTGTGCTCGCTTTGCTATATGAGAATGCACTGCCACTTTATTTACA GTAAGTGTATTTAAGTGAAATTTAAAGGAATAGTGTAGCTATTTAATAACTGTTGAATGGTAGATTTATGTTTTTTT CTTGCGATTTTTTGTAGGTCCTGTGTCTGATGATGAGTCACCTTCTCCTGATTCAACTACCTCACCTCCTGAAATTC AGGCGCCCGCACCTGCAAACGTATGCAAGCCCATTCCTGTGAAGCCTAAGCCTGGGAAACGCCCTGCTGTGGATAAG CTTGAGGACTTGTTGGAGGGTGGGGATGGACCTTTGGACCTTAGTACCCGGAAACTGCCAAGGCAATGAGTGCCCTG CAGCTGTGTTTATTTAATGTGACGTCATGTAATAAAATTATGTCAGCTGCTGAGTGTTTTATTACTTCTTGGGTGGG GACTTGGATATATAAGTAGGAGCAGATCTGTGTGGTTAGCTCACAGCAACCTGCTGCCATCCATGGAGGTTTGGGCT ATCTTGGAAGACCTCAGACAGACTAAGCTACTGCTAGAAAACGCCTCGGACGGAGTCTCTGGCCTTTGGAGATTCTG GTTCGGTGGTGATCTAGCTAGGCTAGTGTTTAGGATAAAACAGGACTACAGGGAAGAATTTGAAAAGTTATTGGACG ATAGTCCGGGACTTTTTGAAGCTCTTAACTTGGGTCATCAGGCTCATTTTAAGGAGAAGGTTTTATCAGTTTTAGAT TTTTCTACTCCTGGTAGAACTGCTGCTGCTGTAGCTTTTCTTACTTTTATATTGGATAAATGGATCCGCCAAACTCA CTTCAGCAAGGGATACGTTTTGGATTTCATAGCAGCAGCTTTGTGGAGAACATGGAAGGCTCGCAGGATGAGGACAA TCTTAGATTACTGGCCAGTGCAGCCTCTGGGAGTAGCAGGGATACTGAGACACCCACCGACCATGCCAGCGGTTCTG CAGGAGGAGCAGCAGGAGGACAATCCGAGAGCCGGCCTGGACCCTCCGGTGGAGGAGTAGCTGACCTGTTTCCTGAA CTGCGACGGGTGCTTACTAGGTCTACGACCAGTGGACAGAACAGGGGAATTAAGAGGGAGAGGAATCCTAGTGGGAA TAATTCAAGAACCGAGTTGGCTTTAAGTTTAATGAGCCGCAGGCGTCCTGAAACTGTTTGGTGGCATGAGGTTCAGA GCGAAGGCAGGGATGAAGTTTCAATATTGCAGGAGAAATATTCACTAGAACAACTTAAGACCTGTTGGTTGGAACCT GAGGATGATTGGGAGGTGGCCATTAGGAATTATGCTAAGATATCTCTGAGGCCTGATAAACAATATAGAATTACTAA GAAGATTAATATTAGAAATGCATGCTACATATCAGGGAATGGGGCAGAGGTTATAATAGATACACAAGATAAAGCAG TTTTTAGATGTTGTATGATGGGTATGTGGCCAGGGGTTGTCGGCATGGAAGCAGTAACACTTATGAATATTAGGTTT AAAGGGGATGGGTATAATGGCATTGTATTTATGGCTAACACTAAGCTGATTCTACATGGTTGTAGCTTTTTTGGGTT TAATAATACGTGTGTAGAAGCTTGGGGGCAAGTTAGTGTGAGGGGTTGTAGTTTTTATGCATGCTGGATTGCAACAT CAGGTAGGGTCAAGAGTCAGTTGTCTGTGAAGAAATGCATGTTTGAGAGATGTAATCTTGGCATACTGAATGAAGGT GAAGCAAGGGTCCGCCACTGCGCAGCTACAGAAACTGGCTGCTTCATTCTAATAAAGGGAAATGCCAGTGTGAAGCA TAATATGATCTGTGGACATTCGGATGAGAGGCCTTATCAGATGCTGACCTGCGCTGGTGGACATTGCAATATTCTTG CTACCGTGCATATCGTTTCACATGCACGCAAAAAATGGCCTGTATTTGAACATAATGTGATTACCAAGTGCACCATG CACATAGGTGGTCGCAGGGGAATGTTTATGCCTTACCAGTGTAACATGAATCATGTGAAGGTAATGTTGGAACCAGA TGCCTTTTCCAGAGTGAGCTTAACAGGAATCTTTGATATGAATATTCAACTATGGAAGATCCTGAGATATGATGACA CTAAACCAAGGGTGCGCGCATGCGAATGCGGAGGCAAGCATGCTAGATTCCAGCCGGTGTGCGTGGATGTGACTGAA GACTTGAGACCCGATCATTTGGTGCTTGCCTGCACTGGAGCGGAGTTCGGTTCTAGTGGTGAAGAAACTGACTAAAG TGAGTAGTGGGGCAAGATGTGGATGGGGACTTTCAGGTTGGTAAGGTGGGCAGATTGGGTAAATTTTGTTAATTTCT GTCTTGCAGCTGCCATGAGTGGAAGCGCTTCTTTTGAGGGGGGAGTATTTAGCCCTTATCTGACGGGCAGGCTCCCA CCATGGGCAGGAGTTCGTCAGAATGTCATGGGATCCACTGTGGATGGGAGACCCGTCCAGCCCGCCAATTCCTCAAC GCTGACCTATGCCACTTTGAGTTCGTCACCATTGGATGCAGCTGCAGCCGCCGCCGCTACTGCTGCCGCCAACACCA TCCTTGGAATGGGCTATTATGGAAGCATCGTTGCCAATTCCAGTTCCTCTAATAACCCTTCAACCCTGGCTGAGGAC AAGCTACTTGTTCTCTTGGCGCAGCTCGAGGCCTTAACCCAACGCTTAGGCGAACTGTCTAAGCAGGTGGCCCAGTT GCGTGAGCAAACTGAGTCTGCTGTTGCCACAGCAAAGTCTAAATAAAGATCTCAAATCAATAAATAAAGAAATACTT GATATAAAACAAATGAATGTTTATTTGATTTTTCGCGCGCGGTATGCCCTGGACCATCGGTCTCGATCATTGAGAAC GCGGTGGATCTTTTCCAGTACCCTGTAAAGGTGGGATTGAATGTTTAGATACATGGGCATTAGTCCGTCTCGGGGGT GGAGATAGCTCCATTGAAGAGCCTCTTGCTCCGGGGTAGTGTTATAAATCACCCAGTCATAGCAAGGTCGGAGTGCA TGGTGTTGCACAATATCTTTTAGGAGCAGACTAATTGCAACGGGGAGGCCCTTAGTGTAGGTGTTTACAAATCTGTT GAGCTGGGACGGGTGCATCCGGGGTGAAATTATATGCATTTTGGACTGGATCTTGAGGTTGGCAATGTTGCCGCCTA GATCCCGTCTCGGGTTCATATTGTGCAGGACCACCAAGACAGTGTATCCGGTGCACTTGGGAAATTTATCATGCAGC TTAGAGGGAAAAGCATGAAAAAATTTGGAGACGCCTTTGTGACCCCCCAGATTCTCCATGCACTCATCCATAATGAT AGCGATGGGGCCGTGGGCAGCGGCACGGGCGAACACGTTCCGGGGGTCTGAAACATCATAGTTATGCTCCTGAGTCA GGTCATCATAAGCCATTTTAATAAACTTTGGGCGGAGGGTGCCAGATTGGGGGATGAAAGTTCCCTCTGGCCCGGGA GCATAGTTTCCCTCACATATTTGCATTTCCCAGGCTTTCAGTTCAGAGGGGGGGATCATGTCCACCTGCGGGGCTAT AAAAAATACCGTTTCTGGAGCCGGGGTGATTAACTGGGACGAGAGCAAATTCCTAAGCAGCTGAGACTTGCCGCACC CAGTGGGACCGTAAATGACCCCAATTACGGGTTGCAGATGGTAGTTTAGGGAACGACAGCTGCCGTCCTCCCGGAGC AGGGGGGCCACTTCGTTCATCATTTCCCTTACATGGATATTTTCCCGCACCAAGTCCGTTAGGAGGCGCTCTCCCCC AAGGGATAGAAGCTCCTGGAGCGAGGAGAAGTTTTTCAGCGGCTTCAGCCCGTCAGCCATGGGCATTTTGGAAAGAG TCTGTTGCAAGAGCTCGAGCCGGTCCCAGAGCTCGGTGATGTGCTCTATGGCATCTCGATCCAGCAGACCTCCTCGT TTCGCGGGTTGGGACGGCTCCTGGAGTAGGGAATCAGACGATGGGCGTCCAGCGCTGCCAGGGTCCGATCCTTCCAT GGTCGCAGCGTCCGAGTCAGGGTTGTTTCCGTCACGGTGAAGGGGTGCGCGCCTGGTTGGGCGCTTGCGAGGGTGCG CTTCAGACTCATCCTGCTGGTCGAGAACCGCTGCCGATTGGCGCCCTGCATGTCGGCCAGGTAGCAGTTTACCATGA GTTCGTAGTTGAGCGCCTCGGCCGCGTGGCCTTTGGCACGGAGCTTACCTTTGGAAGTTTTATGGCAGGCGGGGCAG TAGATACATTTGAGGGCATACAACTTGGGCGCGAGGAAAATGGATTCGGGGGAGTATGCATCCGCACCGCAGGAGGC GCAGACGGTTTCGCACTCCACGAGCCAGGTCAGATCCGGCTCATCGGGGTCAAAAACAAGTTTTCCGCCATGTTTTT TGATGCGTTTCTTACCTTTGGTTTCCATGAGTTCGTGTCCCCGCTGGGTGACAAAGAGGCTGTCCGTGTCCCCGTAG ACCGACTTTATGGGCCTGTCCTCGAGCGGAGTGCCTCGGTCCTCTTCGTAGAGGAACCCAGCCCACTCTGATACAAA AGCGCGTGTCCAGGCCAGCACAAAGGAGGCCACGTGGGAGGGGTAGCGGTCGTTGTCAACCAGGGGGTCCACCTTCT CTACGGTATGTAAACACATGTCCCCCTCCTCCACATCCAAGAATGTGATTGGCTTGTAAGTGTAGGCCACGTGACCA GGGGTCCCCGCCGGGGGGGTATAAAAGGGGGGGGCCTCTGTTCGTCCTCACTGTCTTCCGGATCGCTGTCCAGGAG CGCCAGCTGTTGGGGTAGGTATTCCCTCTCGAAGGCGGGCATGACCTCTGCACTCAGGTTGTCAGTTTCTAGGAACG AGGAGGATTTGATATTGACAGTACCAGCAGAGATGCCTTTCATAAGACTCTCGTCCATCTGGTCAGAAAACACAATC TTCTTGTTGTCCAGCTTGGTGGCAAATGATCCATAGAGGGCATTGGATAGAAGCTTGGCGATGGAGCGCATGGTTTG GTTCTTTTCCTTGTCCGCGCGCTCCTTGGCGGTGATGTTAAGCTGGACGTACTCGCGCGCCACACATTTCCATTCAG GAAAGATGGTTGTCAGTTCATCCGGAACTATTCTGATTCGCCATCCCCTATTGTGCAGGGTTATCAGATCCACACTG GTGGCCACCTCGCCTCGGAGGGGCTCATTGGTCCAGCAGAGTCGACCTCCTTTTCTTGAACAGAAAGGGGGGAGGGG GTCTAGCATGAACTCATCAGGGGGGTCCGCATCTATGGTAAATATTCCCGGTAGCAAATCTTTGTCAAAATAGCTGA TGGTGGCGGGATCATCCAAGGTCATCTGCCATTCTCGAACTGCCAGCGCGCGCTCATAGGGGTTAAGAGGGGTGCCC CAGGGCATGGGGTGGGTGAGCGCGGAGGCATACATGCCACAGATATCGTAGACATAGAGGGGCTCTTCGAGGATGCC GATGTAAGTGGGATAACATCGCCCCCCTCTGATGCTTGCTCGCACATAGTCATAGAGTTCATGTGAGGGGGCAAGAA GACCCGGGCCCAGATTGGTGCGGTTGGGTTTTTCCGCCCTGTAAACGATCTGGCGAAAGATGGCATGGGAATTGGAA GAGATAGTAGGTCTCTGGAATATGTTAAAATGGGCATGAGGTAAGCCTACAGAGTCCCTTATGAAGTGGGCATATGA CTCTTGCAGCTTGGCTACCAGCTCGGCGGTGATGAGTACATCCAGGGCACAGTAGTCGAGAGTTTCCTGGATGATGT CATAACGCGGTTGGCTTTTCTTTTCCCACAGCTCGCGGTTGAGAAGGTATTCTTCGTGATCCTTCCAGTACTCTTCG AGGGGAAACCCGTCTTTTTCTGCACGGTAAGAGCCCAACATGTAGAACTGATTGACTGCCTTGTAGGGACAGCATCC CTTCTCCACTGGGAGAGAGTATGCTTGGGCTGCATTGCGCAGCGAGGTATGAGTGAGGGCAAAAGTGTCCCTGACCA TGACTTTGAGGAATTGATACTTGAAGTCGATGTCATCACAGGCCCCCTGTTCCCAGAGTTGGAAGTCCACCCGCTTC TTGTAGGCGGGGTTGGGCAAAGCGAAAGTAACATCATTGAAGAGGATCTTGCCGGCCCTGGGCATGAAATTTCGGGT GATTTTGAAAGGCTGAGGAACCTCTGCTCGGTTATTGATAACCTGAGCGGCCAAGACGATCTCATCAAAGCCATTGA TGTTGTGCCCCACTATGTACAGTTCTAAGAATCGAGGGGTGCCCCTGACATGAGGCAGCTTCTTGAGTTCTTCAAAA GTGAGATCTGTAGGGTCAGTGAGAGCATAGTGTTCGAGGGCCCATTCGTGCACGTGAGGGTTCGCTTTAAGGAAGGA GGACCAGAGGTCCACTGCCAGTGCTGTTTGTAACTGGTCCCGGTACTGACGAAAATGCTGTCCGACTGCCATCTTTT CTGGGGTGACGCAATAGAAGGTTTGGGGGTCCTGCCGCCAGCGATCCCACTTGAGTTTTATGGCGAGGTCATAGGCG ATGTTGACGAGCCGCTGGTCTCCAGAGAGTTTCATGACCAGCATGAAGGGGATTAGCTGCTTGCCAAAGGACCCCAT CCAGGTGTAGGTTTCCACATCGTAGGTGAGAAAGAGCCTTTCTGTGCGAGGATGAGAGCCAATCGGGAAGAACTGGA TCTCCTGCCACCAGTTGGAGGAATGGCTGTTGATGTGATGGAAGTAGAACTCCCTGCGACGCGCCGAGCATTCATGC TTGTGCTTGTACAGACGGCCGCAGTACTCGCAGCGATTCACGGGATGCACCTTATGAATGAGTTGTACCTGACTTCC TTTGACGAGAAATTTCAGTGGAAAATTGAGGCCTGGCGCTTGTACCTCGCGCTTTACTATGTTGTCTGCATCGGCAT GACCATCTTCTGTCTCGATGGTGGTCATGCTGACGAGCCCTCGCGGGAGGCAAGTCCAGACCTCGGCGCGGCAGGGG CGGAGCTCGAGGACGAGAGCGCGCAGGCCGGAGCTGTCCAGGGTCCTGAGACGCTGCGGAGTCAGGTTAGTAGGCAG TGTCAGGAGATTAACTTGCATGATCTTTTGGAGGGCGTGAGGGAGGTTCAGATAGTACTTGATCTCAACGGGTCCGT TGGTGGAGATGTCGATGGCTTGCAGGGTTCCGTGTCCCTTGGGCGCTACCACCGTGCCCTTGTTTTTCATTTTGGAC GGCGGTGGCTCTGTTGCTTCTTGCATGTTTAGAAGCGGTGTCGAGGGCGCGCACCGGGCGGCAGGGGCGGCTCGGGA CCCGGCGGCATGGCTGGCAGTGGTACGTCGGCGCCGCGCGCGGGTAGGTTCTGGTACTGCGCCCTGAGAAGACTCGC ATGCGCGACGACGCGGCGGTTGACATCCTGGATCTGACGCCTCTGGGTGAAAGCTACCGGCCCCGTGAGCTTGAACC TGAAAGAGAGTTCAACAGAATCAATCTCGGTATCGTTGACGGCGGCTTGCCTAAGGATTTCTTGCACGTCGCCAGAG TTGTCCTGGTAGGCGATCTCGGCCATGAACTGCTCGATCTCTTCCTCTTGAAGATCTCCGCGGCCCGCTCTCTCGAC GGTGGCCGCGAGGTCGTTGGAGATGCGCCCAATGAGTTGAGAGAATGCATTCATGCCCGCCTCGTTCCAGACGCGGC TGTAGACCACAGCCCCCACGGGATCTCTCGCGCGCATGACCACCTGGGCGAGGTTGAGCTCCACGTGGCGGGTGAAG ACCGCATAGTTGCATAGGCGCTGGAAAAGGTAGTTGAGTGTGGTGGCGATGTGCTCGGTGACGAAGAAATACATGAT CCATCGTCTCAGCGGCATCTCGCTGACATCGCCCAGCGCTTCCAAGCGCTCCATGGCCTCGTAGAAGTCCACGGCAA AGTTAAAAAACTGGGAGTTACGCGCGGACACGGTCAACTCCTCTTCCAGAAGACGGATAAGTTCGGCGATGGTGGTG CGCACCTCGCGCTCGAAAGCCCCTGGGATTTCTTCCTCAATCTCTTCTTCTTCCACTAACATCTCTTCCTCTTCAGG TGGGGCTGCAGGAGGAGGGGGAACGCGGCGACGCCGGCGGCGCACGGGCAGACGGTCGATGAATCTTTCAATGACCT CTCCGCGGCGGCGGCGCATGGTCTCGGTGACGGCACGACCGTTCTCCCTGGGTCTCAGAGTGAAGACGCCTCCGCGC ATCTCCCTGAAGTGGTGACTGGGAGGCTCTCCGTTGGGCAGGGACACCGCGCTGATTATGCATTTTATCAATTGCCC CGTAGGTACTCCGCGCAAGGACCTGATCGTCTCAAGATCCACGGGATCTGAAAACCTTTCGACGAAAGCGTCTAACC AGTCGCAATCGCAAGGTAGGCTGAGCACTGTTTCTTGCGGGGGGGGCGGCTAGACGCTCGGTCGGGGTTCTCTCTT TCTTCTCCTTCCTCCTCTTGGGAGGGTGAGACGATGCTGCTGGTGATGAAATTAAAATAGGCAGTTTTGAGACGGCG GATGGTGGCGAGGAGCACCAGGTCTTTGGGTCCGGCTTGTTGGATACGCAGGCGATGAGCCATTCCCCAAGCATTAT CCTGACATCTGGCCAGATCTTTATAGTAGTCTTGCATGAGTCGTTCCACGGGCACTTCTTCTTCGCCCGCTCTGCCA TGCATGCGAGTGATCCCGAACCCGCGCATGGGCTGGACAAGTGCCAGGTCCGCTACAACCCTTTCGGCGAGGATGGC TTGCTGCACCTGGGTGAGGGTGGCTTGGAAGTCGTCAAAGTCCACGAAGCGGTGGTAGGCCCCGGTGTTGATTGTGT AGGAGCAGTTGGCCATGACTGACCAGTTGACTGTCTGGTGCCCAGGGCGCACGAGCTCGGTGTACTTGAGGCGCGAG TATGCGCGGGTGTCAAAGATGTAATCGTTGCAGGTGCGCACCAGGTACTGGTAGCCAATGAGAAAGTGTGGCGGTGG CTGGCGGTACAGGGGCCATCGCTCTGTAGCCGGGGCTCCGGGGGCGAGGTCTTCCAGCATGAGGCGGTGGTAGCCGT AGATGTACCTGGACATCCAGGTGATACCGGAGGCGGTGGTGGATGCACGTGGGAACTCGCGCACGCGGTTCCAGATG TTGCGCAGCGGCATGAAGTAGTTCATGGTAGGCACGGTCTGGCCAGTGAGGCGCGCGCAGTCATTGACGCTCTGTAG ACACGGAGAAAACGAAAGCGATGAGCGGCTCGACTCCGTGGTCTGGGGGAACGTGAACGGGTTGGGTCGCGGTGTAC CCCGGTTCGAGTCCAAAGCTAAGCGATCACGCTCGGATCGGCCGGAGCCGCGGCTAACGTGGTATTGGCTATCCCGT CTCGACCCAGCCGACGAATATCCAGGGTACGGAGTAGAGTCGTTTTTGCTGCTTTTTCCTGGACGTGTGCCATTGCC ACGTCAAGCTTTAGAACGCTCAGTTCTCGGGCCGTGAGTGGCTCGCGCCCGTAGTCTGGAGAATCAGTCGCCAGGGT TGCGTTGCGGTATGCCCCGGTTGGAGCCTAAGCGCGGCTCGTATCGGCCGGTTTCCGCGACAAGCGAGGGTTTGGCA GCCCCGTTATTTCCAAGACCCCGCCAGCCGACTTCTCCAGTTTACGGGAGCGAGCCCTTTTTTTTTTTTTTTTGTTT TTGTCGCCCAGATGCATCCAGTGCTGCGACAGATGCGCCCCCAGCAACAGGCCCCTTCTCAGCAACAGCCACAAAAG GCTCTTCTTGCTCCTGCAACTACTGCAGCTGCAGCCGTGAGCGGCGCGGGACAGCCCGCCTATGATCTGGACTTGGA AGAGGGCGAGGGATTGGCGCGCCTGGGGGCTCCATCGCCCGAGCGGCACCCGCGGGTGCAACTAAAAAAGGACTCTC GCGAGGCGTACGTGCCCCAGCAGAACCTGTTCAGGGACAGGAGCGGCGAGGAGCCAGAGGAGATGCGAGCATCTCGA TTTAACGCGGGTCGCGAGCTGCGCCACGGTCTGGATCGAAGACGGGTGCTGCAAGACGAGGATTTTGAGGTCGATGA AGTCACAGGGATCAGCCCAGCTAGGGCACATGTGGCCGCGGCCAACCTAGTCTCGGCCTACGAGCAGACCGTGAAGG AGGAGCGCAACTTCCAAAAATCTTTTAACAACCATGTGCGCACCCTGATCGCCCGCGAGGAAGTGACCCTGGGTCTG ATGCATCTGTGGGACCTGATGGAGGCTATCGCCCAAAACCCCACTAGCAAACCACTGACAGCTCAGCTGTTTCTGGT GGTTCAACATAGCAGGGACAACGAGGCATTCAGGGAGGCGTTGTTGAACATCACCGAGCCTGATGGGAGATGGCTGT ATGATCTGATCAACATCCTGCAAAGTATTATAGTGCAGGAACGTAGCCTGGGTTTGGCTGAGAAAGTGGCAGCTATC AACTACTCGGTCTTGAGCCTGGGCAAATACTACGCTCGCAAGATCTACAAGACCCCCTACGTACCCATAGACAAGGA GGTGAAGATAGATGGGTTTTACATGCGCATGACTCTGAAGGTGCTGACTCTGAGCGACGATCTGGGGGTGTATCGCA ATGACAGGATGCACCGCGCGGTGAGCGCCAGCAGGAGGCGCGAGCTGAGCGACAGAGAACTTATGCACAGCTTGCAA AGAGCTCTAACGGGGGCCGGGACTGATGGGGAGAACTACTTTGACATGGGAGCGGATTTGCAATGGCAACCCAGTCG CAGGGCCATGGAGGCTGCAGGGTGTGAGCTTCCTTACATAGAAGAGGTGGATGAAGTCGAGGACGAGGAGGGCGAGT ACTTGGAAGACTGATGGCGCGACCCGTATTTTTGCTAGATGGAACAGCAGCAGGCACCGGACCCCGCAATGCGGGCG GCGCTGCAGAGCCAGCCGTCCGGCATTAACTCCTCGGACGATTGGACCCAGGCCATGCAACGCATAATGGCGCTGAC GACCCGCAACCCCGAAGCCTTTAGACAGCAACCCCAGGCCAACCGCCTTTCTGCCATACTGGAGGCCGTAGTGCCCT CCCGCTCCAACCCCACCCACGAGAAGGTCCTGGCTATCGTGAACGCGCTGGTGGAGAACAAGGCCATCCGTCCCGAT GAGGCCGGGCTGGTATACAATGCTCTCTTGGAGCGCGTGGCCCGTTACAACAGCAGCAACGTGCAAACCAACCTGGA CCGGATGGTGACCGATGTGCGCGAGGCCGTGTCTCAGCGCGAGCGATTCCAGCGCGACGCCAACTTGGGGTCGTTGG TAGCGCTAAACGCTTTCCTCAGCACCCAGCCCGCCAACGTGCCCCGTGGTCAGCAAGACTATACAAACTTTTTGAGT GCATTGAGACTCATGGTAGCTGAGGTGCCCCAGAGCGAGGTGTACCAGTCCGGGCCAGATTACTTCTTCCAGACCAG CAGACAGGGCTTGCAGACAGTGAACCTGACTCAGGCTTTCAAGAACCTGAAGGGTCTGTGGGGAGTGCACGCCCCAG TAGGGGATCGCGCGACCGTGTCTAGCTTGCTGACTCCCAACTCCCGCCTGCTGCTGCTGCTGGTATCCCCCTTTACT GACAGCGGTAGCATTGACCGCAACTCGTACTTGGGCTACCTGCTTAACCTGTATCGCGAGGCCATAGGACAGAGCCA GGTGGACGAGCAGACCTATCAAGAAATCACCCAAGTGAGCCGCGCCCTGGGTCAGGAAGACACGGGCAGTTTGGAAG CCACCCTGAACTTCTTGCTAACCAACCGGTCACAGAAGATCCCTCCTCAGTATGCGCTTACCGCTGAGGAGGAGCGG ATCCTCAGATACGTGCAACAGAGCGTTGGACTGTTCCTGATGCAGGAGGGGGCGACACCTACCGCCGCGCTGGACAT GACAGCTCGAAACATGGAGCCCAGCATGTATGCTAGTAACAGGCCTTTCATTAACAAACTGCTGGACTACCTGCACA GGGCGGCCGCCATGAACTCTGATTATTTCACCAATGCTATCCTGAACCCACACTGGCTGCCCCCACCTGGTTTCTAC ACTGGCGAGTACGACATGCCCGACCCCAATGACGGGTTCCTGTGGGACGATGTGGACAGCAGCATATTTTCCCCGCC TCCCGGTTATACAGTTTGGAAGAAGGAAGGGGGCGATAGAAGACACTCTTCCGTGTCGCTATCCGGAACGGCTGGTG CTGCCGCGACCGTGCCCGAAGCTGCAAGTCCTTTCCCTAGCTTGCCCTTTTCACTAAACAGCGTTCGCAGCAGTGAA CTGGGGAGAATAACCCGCCCGCGCTTGATGGGCGAGGATGAGTACTTGAATGACTCTTTGCTGAGGCCAGAGAGGGA AAAGAACTTCCCCAACAATGGAATAGAGAGTCTGGTGGATAAGATGAGTAGATGGAAGACCTATGCGCAGGATCACA GAGACGAGCCCAGGATCTTGGGGGCTACAAGCAGACCGATCCGTAGACGCCAGCGCCACGACAGGCAGATGGGTCTT GTGTGGGACGATGAGGACTCTGCCGATGATAGCAGCGTGTTGGACTTGGGTGGAAGAGGAGGGGGCAACCCGTTCGC TCATCTGCGTCCCAGATTCGGGCGCATGTTGTAAAAGTGAAAGTAAAATAAAAAGGCAACTCACCAAGGCCATGGCG ACCGAGCGTGCGTTCGTTCTTTTTTGTTATCTGTGTCTAGTACGATGAGGAGACGAGCCGTGCTAGGCGGAGCGGTG GTGTATCCGGAGGGTCCTCCTCCTTCTTACGAGAGCGTGATGCAGCAACAGGCGGCGATGATACAGCCCCCACTGGA GGCTCCCTTCGTACCCCCACGGTACCTGGCGCCTACGGAAGGGAGAAACAGCATTCGTTACTCGGAGCTGTCGCCCC TGTACGATACCACCAAGTTGTATCTGGTGGACAACAAGTCGGCGGACATCGCCTCCCTGAACTATCAGAACGACCAC AGCAACTTCCTGACCACGGTGGTGCAGAACAATGACTTTACCCCCACGGAGGCTAGCACCCAGACCATCAACTTTGA CGAGCGGTCGCGATGGGGCGGTCAGCTGAAGACCATCATGCACACCAACATGCCCAACGTGAACGAGTACATGTTCA GCAACAAGTTCAAGGCGAGGGTGATGGTGTCCAGAAAAGCTCCTGAAGGTGTTACAGTAAATGACACCTATGATCAT AAAGAGGATATCTTGAAGTATGAGTGGTTTGAGTTCATTTTACCAGAAGGCAACTTTTCAGCCACCATGACGATCGA CCTGATGAACAATGCCATCATTGACAACTACCTGGAAATTGGCAGACAGAATGGAGTGCTGGAAAGTGACATTGGTG TTAAGTTTGACACTAGAAATTTCAGGCTCGGGTGGGACCCCGAAACTAAGTTGATTATGCCAGGTGTCTACACTTAT GAGGCATTCCATCCTGACATTGTATTGCTGCCTGGTTGCGGGGTAGACTTTACTGAAAGCCGACTTAGCAACTTGCT TGGCATCAGGAAGAGACATCCATTCCAGGAGGGTTTCAAAATCATGTATGAAGATCTTGAAGGGGGTAATATTCCTG CCCTTTTGGATGTCACTGCCTATGAGGAAAGCAAAAAGGATACCACTACTGAAACAACCACACTGGCTGTTGCAGAG GAAACTAGTGAAGATGATGATATAACTAGAGGAGATACCTATATAACTGAAAAACAAAAACGTGAAGCTGCAGCTGC TGAAGTTAAAAAAGAGTTAAAGATCCAACCTCTAGAAAAAGACAGCAAGAGTAGAAGCTACAATGTCTTGGAAGACA AAATCAACACAGCCTACCGCAGTTGGTACCTGTCCTACAATTACGGTAACCCTGAGAAAGGAATAAGGTCTTGGACA CTGCTCACCACTTCAGATGTCACCTGTGGGGCAGAGCAGGTCTACTGGTCGCTCCCTGACATGATGCAAGACCCAGT CACCTTCCGCTCCACAAGACAAGTCAACAACTACCCAGTGGTGGGTGCAGAGCTTATGCCCGTCTTCTCAAAGAGTT TCTACAATGAGCAAGCCGTGTACTCTCAGCAGCTCCGACAGGCCACTTCGCTCACGCACGTCTTCAACCGCTTCCCT GAGAACCAGATCCTCATCCGCCCGCCGGCGCCCACAATTACCACCGTCAGTGAAAACGTTCCTGCTCTCACAGATCA CGGGACCCTGCCGTTACGCAGCAGTATCCGGGGAGTCCAGCGCGTGACCGTTACTGACGCCAGACGCCGCACCTGTC CCTACGTTTACAAGGCCCTGGGCATAGTCGCGCCGCGCGTTCTTTCAAGCCGCACTTTCTAAAAAAAAAAAAAATGT CCATTCTCATCTCGCCCAGTAATAATACCGGTTGGGGACTGTATGCGCCCACCAAGATGTATGGAGGCGCCCGCAAG CGCTCTACCCAGCATCCTGTGCGCGTTCGCGGTCATTTCCGCGCTCCCTGGGGCGCACTCAAGGGTCGTACCCGCAC TCGGACCACGGTCGATGATGTGATCGACCAGGTGGTCGCCGATGCTCGTAATTATACTCCTACTGCGCCTACATCTA CTGTGGATGCAGTTATTGACAGTGTGGTGGCAGACGCCCGCGCCTATGCTCGCCGGAAGAGCCGAAGGAGGCGCATC GCCAGGCGCCACAGGGCTACTCCCGCCATGCGAGCCGCAAAAGCTATTCTGCGGAGGGCCAAACGTGTGGGGCGAAG AGCCATGCTTAGAGCGGCCAGACGCGCGGCTTCAGGTGCCAGCAGCGGCAGGTCCCGCAGGCGCGCGGCCACGGCGG CAGCAGCGGCCATTGCCAACATGGCCCAACCGCGAAGAGGCAATGTGTACTGGGTGCGTGATGCCACTACCGGCCAG CGCGTGCCCGTGCGCACCCGCCCCCCTCGCACTTAGAAGATACTGAGCAGTCTCCGATGTTGTGTCCCAGCGGCAAG TATGTCCAAGCGCAAATACAAGGAAGAGATGCTCCAGGTCATCGCGCCTGAAATCTACGGTCCGCCGGTGAAGGATG AAAAAAAGCCCCGCAAAATCAAGCGGGTCAAAAATAACAAAAAGGAAGAAGATGACGATGATGGGCTGGTGGAGTTT GTGCGCGAGTTCGCCCCAAGACGGCGCGTGCAGTGGCGCGGGCGCAAAGTGCGTCAAGTGCTCAGACCCGGGACCAC TGTGGTTTTTACACCTGGCGAGCGTTCCAGCACTACTTTTAAACGGTCCTATGATGAGGTGTACGGGGATGACGATA TTCTTGAGCAGGCGGCAGACCGCCTTGACGAGTTTGCTTATGGCAAGCGCACTAGATCCAGTCCCAAAGAGGAGGCT GTGTCCATTCCTTTGGATCATGGAAATCCCACCCCCAGCCTCAAACCAGTCACCCTGCAGCAAGTGCTGCCCGTGCC TGCGCGGAGAGGCGTAAAGCGCGAGGGTGAGGACCTATATCCCACCATGCAGCTAATGGTGCCCAAGCGCCAGAGGC TAGAAGACGTACTGGAGAAAATGAAAGTGGATGCCGATATCCAGCCTGAGGTCAAAGTAAGACCTATCAAGGAAGTG GCGCCAGGTTTGGGAGTACAAACCTTCGACATCAAGATTCCCACCGAGTCCATGGAAGTGCAGACCGAACCTGCAAA ACCCACCACCTCAATTGAGGTGCAAACGGAACCCTGGATGCCCGCGCCCGTTGCCGCCCCCAGCACCACTCGAAGAT CACGACGAAAGTACGGCCCAGCAAGTCTGCTAATGCCCAACTATGCTCTGCACCCATCCATCATTCCCACTCCGGGT TACAGAGGCACTCGCTACTATCGAAACCGGAGCAACACCTCTCGCCGCCGCAAACCACCTGCAAGTCGCACTCGCCG TCGCCGCCGCCGCAACACTGCCAGCAAATTGACTCCCGCCGCCCTGGTGCGGAGAGTGTACCGCGATGGTCGCGCTG AACCTCTGACGCTGCCGCGCGCGCGCTACCATCCAAGCATCACCACTTAATGACTGTTGACGCTGCCTCCTTGCAGA TATGGCCCTCACTTGCCGCCTTCGCGTCCCCATTACTGGCTACCGAGGAAGAAACTCGCGCCGTAGAAGGATGTTGG GGCGAGGGATGCGCCGCCACAGACGAAGGCGCGCTATCAGCAGACGATTAGGGGGTGGCTTTTTGCCAGCTCTTATA CCCATCATCGCCGCAGCGATCGGGGCGATACCAGGCATAGCTTCAGTGGCGGTTCAGGCCTCGCAGCGCCACTAACA TTGGAAAAAACTTATAAATAAAAAATAGAATGGACTCTGACGCTCCTGGTCCTGTGACTATGTTTTTGTAGAGATGG AAGACATCAATTTTTCATCCCTGGCTCCGCGACACGGCACGAGGCCGTACATGGGCACCTGGAGCGACATCGGCACG AGCCAACTGAACGGGGGCGCCTTCAATTGGAGCAGTATCTGGAGCGGGCTTAAAAATTTTGGCTCGACCGTAAAAAC CTATGGGAACAAAGCTTGGAACAGCAGCACAGGGCAGGCTCTGAGAAATAAGCTTAAGGAACAAAACTTCCAACAGA AGGTGGTCGATGGGATCGCCTCTGGTATTAACGGCGTAGTGGATCTGGCCAACCAGGCTGTACAAAAACAGATAAAC AGCCGCCTGGACCCGCCGCCCGCAACCCCTGGTGAAATGGAAGTGGAGGAAGAACTTCCTCCGCTGGAAAAGCGGGG CGACAAGCGTCCGCGACCCGAGCTAGAGCAGACGCTGGTGACGCGCGCAGACGAGCCCCCTTCATATGAGGAGGCAG TAAAGCTCGGAATGCCCACTACCAGGCCTGTAGCTCACATGGCTACCGGGGTGATGAAACCTTCTCAGTCACATCGA CCCGCCACCTTGGACTTGCCTCCTCCCCCTGCTTCTGCGGCGCCTGTTCCCAAACCTGTCGCTACCAGAAAGCCCAC CGCCGTACAGCCCGTCGCCGTAGCCAGACCGCGTCCTGGGGGCACACCGCGCCCGAAAGCAAACTGGCAAAGTACTC TGAACAGCATCGTGGGTCTGGGCGTGCAGAGTGTAAAGCGCCGTCGCTGCTATTAATTAAATATGGAGTAGCGCTTA ACTTGCTTGTCTGTGTGTATGTATCATCACCACGCCGCCGCAGCAGAGGAGAAAGGAAGAGGTCGCGCGCCGAGGCT GAGTTGCTTTCAAGATGGCCACCCCATCGATGATGCCCCAATGGGCATACATGCACATCGCCGGACAGGATGCTTCG GAGTACCTCAGTCCGGGTCTGGTGCAGTTCGCCCGTGCAACAGACACCTACTTCAGTATGGGGAACAAATTTAGAAA CCCCACAGTGGCGCCCACCCACGATGTGACCACCGACCGTAGCCAGCGCCTGATGCTGCGCTTCGTGCCCGTTGACC GGGAAGACAATACCTACTCTTACAAAGTTCGCTACACGCTGGCTGTAGGCGACAACAGAGTGCTTGACATGGCCAGC ACATTCTTTGACATTCGGGGGGTGCTTGATAGAGGTCCTAGCTTCAAGCCATATTCCGGCACAGCTTACAATTCACT CGCTCCTAAGGGCGCGCCCAATACATCTCAGTGGATAGTTACAACAAATGGGGACAATGCAGTAACTACCACCACAA ACACATTTGGCATTGCTTCCATGAAGGGAGACAATATTACTAAAGAAGGTTTGCAAATTGGGAAAGACATTACCACT ACTGAAGGAGAAGAAAAGCCCATTTATGCCGATAAAACATATCAGCCAGAGCCTCAAGTTGGAGAAGAATCATGGAC TGATACTGATGGAACAAATGAAAAGTTTGGTGGAAGAGCCCTTAAACCAGCTACCAACATGAAGCCATGCTACGGGT CTTTTGCAAGACCTACAAACATAAAAGGGGGCCAAGCTAAAAACAGAAAAGTAAAACCAACAACCGAAGGAGGGGTT GAAACTGAGGAACCAGATATTGATATGGAATTTTTCGATGGTAGAGATGCTGTTGCAGGAGCTTTAGCGCCTGAAAT TGTGCTTTATACGGAAAATGTAAATTTGGAAACTCCAGACAGTCATGTGGTATATAAACCAGAAACGTCTAATAACT CTCATGCAAATTTGGGTCAACAAGCCATGCCTAACAGACCCAATTACATTGGCTTCAGGGATAACTTCGTAGGCCTA ATGTACTACAACAGTACTGGAAATATGGGAGTTTTGGCTGGCCAAGCATCACAACTGAATGCAGTGGTTGACTTGCA GGACAGAAATACTGAACTGTCATATCAGCTTTTGCTTGATTCTCTGGGAGACAGAACCAGATACTTCAGCATGTGGA ATCAGGCTGTGGACAGTTACGATCCCGATGTTCGCATTATTGAAAATCATGGCATCGAGGATGAACTGCCTAATTAC TGTTTTCCTCTGAATGGCATAGGACCAGGGCACACATATCAAGGCATTAAAGTTAAAACCGATGACACTAATGGATG GGAAAAAGATGCTAATGTTGCTCCAGCTAATGAAATAACCATAGGCAACAACCTGGCTATGGAAATTAATATCCAAG CTAACCTTTGGAGAAGTTTTCTGTACTCTAATGTGGCTTTGTACCTTCCAGATGTTTACAAGTACACGCCACCTAAC ATTACTTTGCCCACTAACACCAACACCTATGAGTACATGAACGGGCGAGTGGTATCCCCATCCCTGGTTGATTCATA CATCAACATTGGCGCCAGGTGGTCTCTTGACCCAATGGACAATGTGAATCCATTCAACCACCACCGCAATGCTGGTC TGCGCTACAGGTCCATGCTTCTGGGAAATGGTCGTTATGTGCCTTTCCACATACAAGTGCCTCAGAAATTCTTTGCT GTCAAGAACCTACTTCTTCTACCTGGCTCCTACACCTACGAGTGGAACTTCCGAAAGGATGTGAACATGGTCCTGCA AAGTTCCCTTGGAAATGACCTCAGAACGGATGGTGCTACCATAAGTTTCACCAGCATCAATCTCTATGCCACCTTCT TCCCCATGGCTCACAACACAGCTTCCACCCTTGAAGCCATGCTGCGCAACGATACCAATGATCAGTCATTTAACGAC TACCTCTCTGCAGCTAACATGCTTTACCCCATTCCTGCCAATGCAACCAACATTCCAATTTCCATCCCATCTCGCAA CTGGGCAGCCTTCAGGGGCTGGTCCTTCACCAGACTCAAAACCAAGGAGACTCCATCTCTTGGATCAGGGTTCGATC CCTACTTCGTATATTCTGGATCTATTCCCTACCTGGATGGCACCTTTTACCTTAACCACACTTTCAAGAAGGTCTCC ATCATGTTTGACTCCTCAGTCAGCTGGCCTGGCAATGACAGGCTGTTGAGTCCAAATGAGTTTGAAATCAAGCGCAC TGTGGACGGGGAAGGATACAACGTGGCACAATGCAACATGACCAAAGACTGGTTCCTGGTTCAGATGCTTGCCAATT ACAACATTGGCTACCAGGGCTTTTACATCCCTGAGGGATACAAGGATCGCATGTACTCCTTTTTCAGAAACTTCCAG CCTATGAGCAGGCAGGTGGTTGATGAGGTTAATTACACTGACTACAAAGCCGTCACCTTACCATACCAACACAACAA CTCTGGCTTTGTAGGGTACCTTGCACCTACTATGAGACAAGGGGAACCTTACCCAGCCAATTATCCATACCCGCTCA TCGGAACTACTGCCGTTAAGAGTGTCACCCAGAAAAAGTTCCTGTGCGACAGGACCATGTGGCGCATTCCCTTCTCC AGCAACTTCATGTCCATGGGGGCCCTTACCGACCTGGGACAGAACATGCTCTATGCCAACTCAGCCCATGCGCTGGA CATGACTTTTGAGGTGGATCCCATGGATGAGCCCACCCTGCTTTATCTTCTTTTCGAAGTCTTCGACGTGGTCAGAG TGCACCAGCCACACCGCGGCGTCATCGAGGCCGTCTACCTGCGCACACCGTTCTCGGCCGGCAACGCCACCACATAA GAAGCCTCTTGCTTCTTGCAAGCAGCAGCTGCAGCCATGACATGCGGGTCCGGAAACGGCTCCAGCGAGCAAGAGCT CAAAGCCATCGTCCGAGACCTGGGCTGCGGACCCTATTTCCTGGGAACCTTTGACAAGCGTTTCCCGGGGTTCATGG CCCCCGACAAGCTCGCCTGCGCCATAGTCAACACTGCCGGACGCGAGACGGGGGGAGAGCACTGGCTGGCTTTTGGT TGGAACCCGCGCTACAACACCTGCTACCTTTTTGATCCTTTTGGGTTCTCGGATGAGCGGCTCAAACAGATTTACCA GTTTGAGTACGAGGGGCTCCTGCGTCGCAGTGCCCTTGCTACCAAAGACCGCTGCATCACCCTGGAGAAGTCTACCC AAAGCGTGCAGGGTCCGCGCTCAGCCGCCTGTGGACTTTTTTGCTGTATGTTCCTTCATGCCTTTGTGCACTGGCCC GACCGCCCCATGGACGGAAACCCCACCATGAAGTTGCTGACTGGGGTGTCCAACAGCATGCTCCAATCACCCCAAGT CCAGCCCACCCTGCGCCGCAACCAGGAGGTGCTATACCGCTTCCTAAACACCCACTCATCTTACTTTCGTTCTCACC GCGCGCGCATTGAAAGGGCCACCGCGTTTGACCGTATGGATATGCAATAAGTCATGTAAAACCGTGTTCAATAAACA GCACTTTATTTTTACATGCACTGAGGCTCTGGTTTTGCTCATTTGTTTCATCATTTACTCAGAAGTCGAATGGGTTC TGGCGGGAGTCAGAGTGACCCGCGGGCAGGGATACGTTGCGGAACTGTAACCTGTTCTGCCACTTGAACTCGGGGAT TACCAGCTTGGGAACTGGAATCTCGGGAAAGGTGTCTTGCCACAACTTTCTGGTCAGTTGCATAGCGCCAAGCAGGT CAGGAGCAGAGATCTTGAAATCACAGTTGGGGCCGGCATTCTGGACACGGGAGTTGCGATACACTGGGTTGCAACAC TGGAACACTATCAACGCTGGGTGTCTTACGCTTGCCAACACGGTTGGGTCACTGATGGTAGTCACATCCAAGTCTTC AGCATTGGCCATCCCAAAGGGGGTCATCTTACATGTCTGCCTGCCCATCACGGGAGCGCAGCCTGGCTTGTGGTTGC AATCACAATGAATGGGGATCAGCATCATCCTGGCTTGGTCGGGAGTTATCCCTGGGTACACAGCCTTCATGAAGGCT TCGTACTGCTTAAAAGCTTCCTGGGCCTTACTTCCCTCGGTGTAGAACATCCCACAGGACTTGCTGGAAAATTGATT AGTAGTACAGTTGGCATCATTCACACAACAGCGGGCATCGTTGTTGGCCAACTGAACCACATTTCTGCCCCAGCGGT TTTGGGTGATCTTGGCTCTGTCTGGATTCTCCTTCATAGCGCGCTGCCCGTTCTCGCTCGCCACATCCATCTCGATA ATGTGGTCCTTCTGGATCATGATAGTGCCATGCAGGCATTTCACCTTGCCTTCATAATCGGTGCATCCATGAGCCCA CAGAGCGCACCCGGTGCACTCCCAATTATTGTGGGCGATCTCAGAATAATAATGTACCAATCCCTGCATGAATCTTC CCATCATTGTTGTCAAGGTCTTCATGCTGGTAAATGTCAGCGGGATGCCACGGTGCTCCTCGTTCACATACTGGTGG CAGATACGCTTGTATTGCTCGTGCTGCTCTGGCATCAGCTTGAAAGAGGTTCTCAGATCATTATCCAGCCTGTACCT TTCCATTAGCACAGCCATCACTTCCATGCCCTTCTCCCAGGCAGATACCAGGGGCAGACTCAAAGGATTCCTAACAG CAATAAAAGTAGCTCCTTTAGCTATAGGGTCATTCTTGTCGATCTTCTCAACACTTCTCTTGCCATCCTTCTCAATG ATGCGCACCGGGGGGTAGCTGAAGCCCACGGCCACCAACTGAGCCTGTTCTCTTTCTTCTTCACTATCCTGGCTGAT GTCTTGCAGAGGGACATGCTTGGTCTTCCTGGGCTTCTTCTTGGGAGGGATCGGGGGAGGACTGTTGCTCCGCTCCG GAGACAGGGATGACTGCGAAGTTTCGCTTACCAATACCACCTGGCTCTCGGTAGAAGAACCGGACCCCACACGACGG TAGGTGTTCCTCTTCGGGGGCAGAGGTGGAGGCGACTGAGATGGGCTGCGGTCTGGCCTTGGAGGCGGATGGCTGGC AGAGCTCATTCCGCGTTCGGGGGTGTGCTCCCGGTGGCGGTCGCTTGACTGATTTCCTCCGCGGCTGGCCATTGTGT TCTCCTAGGCAGAGAAACAACAGACATGGAAACTCAGCCATCACTGCCAACATCGCTGCAAGCACCATCACACCTCG CCCCCAGCAGCGACGAGGAGGAGAGCTTAACCACCCCACCACCCAGTCCCGCTACCACCACCTCTACCCTCGATGAT GAGGAGGAGGTCGACGCAGCCCAGGAGATGCAGGCGCAGGATAATGTGAAAACGGAAGAGATTGAGGCAGATGTCGA GCAGGACCCGGGCTATGTGACGCCGGCGGAGCACCAGGAGGAGCTGAAACGCTTTCTAGACAGAGAGGATGACGACC GCCCAGAGCATCAAGCAGATGGCGTTTACCAGGAGGCTGGGATCAGGGATCATGTCGCCGACTACCTCACCGGCCTT GGTGGGGAGGACGTGCTCCTCAAACATCTAGCAAGGCAGTCGATCATAGTTAAAGACGCATTGCTCGATCTCACTGA AGTGCCCATCAGTGTGGAAGAGCTTAGCCGCGCCTACGAGCTGAACCTCTTTTCGCCTCAGGTACCCCCCAAGCGGC AGCCAAACGGCACCTGCGAGGCCAACCCTCGACTCAACTTCTATCCAGCTTTTACTATCCCCGAAGTGTTGGCCACC TACCACATCTTTTTCAAGAACCAAAAGATTCCAGTCTCCTGCCGCGCCAACCGCACCCGCGCCGATGCCCTGCTCAA CTTGGGTCCGGGAGCTCGCTTACCTGATATAGCTTCCTTGGAAGAGGTTCCAAAGATCTTTGAGGGTCTGGGAAGTG ATGAGACACGGGCCGCAAATGCTCTGCAACAGGGAGAGAATGACATGGATGAACACCACAGCGCTCTGGTGGAACTG GAGGGTGACAATGCCCGGATTGCAGTGCTCAAGCGCAGTATCGTGGTCACCCATTTTGCCTACCCCGCTGTTAACCT GCCCCCCAAAGTTATGAGCGCTGTCATGGACCATCTGCTCATCAAACGAGCAAGACCTCTTTCAGAAAACCAGAACA TGCAGGATCCAGACGCCTCGGACGAGGGCAAGCCGGTAGTCAGTGACGAGCAGCTATCTCGCTGGCTGGGTACCAAC TCCCCCCGAGATTTGGAAGAGAGGCGCAAGCTTATGATGGCTGTAGTGCTAGTAACTGTGGAGCTGGAGTGTCTGCG CCGCTTTTTCACCGACCCTGAGACCCTGCGCAAGCTAGAGGAGAACCTGCACTACACCTTTAGACATGGCTTCGTGC GGCAGGCATGCAAGATCTCCAACGTGGAGCTTACCAACCTGGTTTCTTACATGGGCATTTTGCATGAGAACCGACTA GGGCAGAGCGTCCTGCACACCACCCTTAAAGGGGAGGCCCGCCGTGACTACATCCGAGACTGTGTCTACCTCTACCT CTGCCATACCTGGCAAACTGGTATGGGTGTGTGGCAACAGTGTTTGGAAGAGCAGAACCTAAAAGAGCTGGACAAGC TCTTGCAGAGATCCCTCAAAGCCCTGTGGACAGGTTTTGATGAGCGCACCGTCGCCTCGGACCTGGCAGACATCATC TTCCCCGAGCGTCTCAGGGTTACTCTGCGAAACGGCCTGCCAGACTTTATGAGCCAGAGCATGCTTAACAACTTTCG CTCTTTCATCCTGGAACGCTCCGGTATCCTGCCTGCCACCTGCTGTGCGCTGCCCTCCGACTTTGTGCCTCTCACCT ACCGCGAGTGCCCACCGCCGCTATGGAGCCACTGCTACCTGTTCCGCCTGGCCAACTACCTCTCCTACCACTCGGAT GTTATAGAGGATGTGAGCGGAGACGGCCTGCTGGAATGCCACTGCCGCTGCAATCTTTGCACACCCCACCGCTCCCT TGCCTGCAACCCCCAGTTGCTGAGCGAGACCCAGATTATCGGCACCTTCGAGCTGCAGGGTCCCAGAAGTAAAGGCG AGGGGTCTTCTCCGGGGCAGAGTTTGAAACTGACACCGGGGCTGTGGACCTCCGCCTACCTGCGCAAGTTTCACCCC GAGGACTACCATCCCTATGAGATCAGGTTCTATGAGGACCAATCACATCCTCCCAAAGTCGAGCTCTCAGCCTGCGT CATCACCCAGGGAGCAATTCTGGCCCAATTGCAAGCCATCCAAAAATCTCGCCAAGAATTTCTGCTAAAAAAGGGAA ACGGGGTCTACCTTGACCCTCAGACCGGTGAGGAGCTCAACACAAGGTTCCCCCAGGATGTCCCATCGCCGAGGAAG CAAGAAGTTGAAGGTGCAGCTGTCGCCCCCAGAGGATATGAAGGAAGACTGGGACAGTCAGGCAGAGGAGGAGATGG AAGATTGGGACAGCCAGGCAGAGGAGGTGGACAGCCTGGAGGAAGACAGTTTGGAGGAGGAAGACGAGGAGGCAGAG GAGGTGGAAGAAGCAACCGCCGCCAAACAGTTGTCATCGGCGGCGGAGACAAGCAAGTCCCCAGACAGCAGCACGGC TACCATCTCCGCTCCGGGTCGGGGGGCCCAGCGGCGGCCCAACAGTAGATGGGACGAGACCGGGCGATTCCCAAACC CGACCACCGCTTCCAAGACCGGTAAGAAGGAGCGACAGGGATACAAGTCCTGGCGTGGACATAAAAACGCTATCATC TCCTGCTTGCATGAATGCGGGGGCAACATATCCTTCACCCGGCGATACCTGCTCTTCCACCACGGTGTAAACTTCCC CCGCAATATCTTGCATTACTACCGTCACCTCCACAGCCCCTACTGCAGTCAGCAAGTCCCGGCAACCCCGACAGAAA AATACAGCAGCGACAACGGTGACCAGAAAACCAGCAGTTAGAAAATCCACAACAAGTGCACCAGGAGGAGGACTGAG GATCACAGCGAACGAGCCAGCGCAGACCAGAGAGCTGAGGAACCGGATCTTTCCAACCCTCTATGCCATTTTCCAGC AGAGTCGGGGGCAAGAGCAGGAACTGAAAGTAAAAAACCGATCTCTGCGCTCGCTCACCAGAAGTTGTTTGTATCAC AAGAGCGAAGACCAACTTCAGCGCACTCTCGAGGACGCCGAGGCTCTCTTCAACAAGTACTGCGCGCTGACTCTTAA AGAGTAGCCCTTGCCCGCGCTCATTTTGAAAACGGCGGGAATCACGTCACCCTTGGCACCTGTCCTTTGCCCTTGTC ATGAGTAAAGAGATTCCCACGCCTTACATGTGGAGCTATCAGCCCCAAATGGGGTTGGCAGCAGGCGCTTCCCAGGA CTACTCCACCCGCATGAATTGGCTTAGCGCCGGGCCCTCAATGATATCACGGGTTAATGATATACGAGCTTATCGAA ACCAGTTACTCCTAGAACAGTCAGCTCTCACCACCACACCCCGTCAACACCTTAATCCCCGAAATTGGCCCGCCACC CTGGTGTACCAGGAAAATCCCGCTCCCACCACCGTACTACTTCCTCGAGACGCCCAGGCCGAAGTTCAGATGACTAA CGCAGGTGTACAGCTGGCGGGCGGTTCCGCCCTATGTCGTCACCGACCTCAACAGAGTATAAAACGCCTGGTGATTA GAGGCCGAGGTATCCAGCTCAACGACGAGTCGGTTAGCTCTTCGCTTGGTCTGCGACCAGACGGAGTCTTCCAAATC GCCGGCTGTGGGAGATCTTCCTTCACTCCTCGTCAGGCTGTGCTGACTTTGGAGAGTTCGTCCTCGCAGCCCCGCTC GGGCGGCATTGGAACTCTCCAGTTTGTGGAGGAGTTTACTCCCTCTGTCTACTTCAACCCCTTCTCCGGCTCTCCTG GCCAGTACCCGGACGAGTTCATACCAAACTTCGACGCAATCAGCGAGTCAGTGGATGGCTATGATTGATGTCTAATG GTGGTGCGGCTGAGCTAGCTCGACTGCGACACCTAGACCACTGCCGCCGCTTTCGCTGCTTCGCCCGGGAACTCACC GAGTTCATCTACTTCGAACTCTCCGAGGAGCACCCTCAGGGTCCGGCCCACGGAGTGCGGATTACCATCGAAGGGGG AATAGACTCTCGCCTGCATCGCATCTTCTCCCAGCGGCCCGTGCTAATTGAACGCGACCAGGGAAATACAACCATCT CCATCTACTGCATCTGTAACCACCCCGGATTGCATGAAAGCCTTTGCTGTCTTGTTTGTGCTGAGTTTAATAAAAAC TGAGTTAAGACCCTCCTACGGACTACCGCTTCTTCAATCAGGACTTTACAACACCAACCAGATCTTCCAGAAGACCC AGACCCTTCCTCCTTTCATCCAGGACTCTAACTCTACCTTACCAGCACCCTCCACTACTAACCTTCCCGAAACAAAC AAGCTTGCATCTCATCTGCAACACCGCCTTTCACGAAGCCTTCTTTCTGCCAATACTACCACTCCCAAAACCGGAGG TGAGCTCCGCGGTCTTCCTACTGACGACCCCTGGGTGGTAGCGGGTTTTGTAACGTTAGGAGTAGTTGCGGGTGGGC TTGTGCTGATCCTTTGCTACCTATACACACCTTGCTGTGCATATTTAGTCATATTGTGCTGTTGGTTTAAGAAATGG GGGCCATACTAGTCGTGCTTGCTTTACTTTCGCTTTTGGGTCTGGGCTCTGCTAATCTCAATCCTCTCGATCACGAT CCATGTTTAGACTTCGACCCAGAAAACTGCACACTTACTTTTGCACCCGACACAAGCCGTCTCTGTGGAGTTCTTAT TAAGTGCGGATGGGACTGCAGGTCCGTTGAAATTACACATAATAACAAAACATGGAACAATACCTTATCCACCACAT GGGAGCCAGGAGTTCCCCAGTGGTATACTGTCTCTGTCCGAGGTCCTGACGGTTCCATCCGCATTAGTAACAACACT TTCATTTTTTCTGAAATGTGCGATCTGGCCATGTTCATGAGCAGACAGTATGACCTATGGCCTCCCAGCAAAGAGAA CATTGTGGCATTTTCCATTGCTTATTGCTTGGTAACATGCATCATCACTGCTATCATTTGTGTGTGCATACACTTGC TTATAGTTATTCGCCCTAGACAAAGCAATGAGGAAAAAGAGAAAATGCCTTAACCTTTTTCCTCATACCTTTTCTTT ACAGCATGGCTTCTGTTACAGCTCTAATTATTGCCAGCATTGTCACTGTCGCTCACGGGCAAACAATTGTCCATATT ACCTTAGGACATAATCACACTCTTGTAGGGCCCCCAATTACTTCAGAGGTTATTTGGACCAAACTTGGAAGTGTTGA TTATTTTGATATAATTTGCAACAAAACTAAACCAATATTTGTAATCTGTAACAGACAAAATCTCACGTTAATTAATG TTAGCAAAATTTATAACGGTTACTATTATGGTTATGACAGATCCAGTAGTCAATATAAAAATTACTTAGTTCGCATA ACTCAGCCCAAATTAACAGTGCCAACTATGACAATAATTAAAATGGCTAATAAAGCATTAGAAAATTTTACATCACC AACAACACCCAATGAAAAAAACATTCCAAATTCAATGATTGCAATTATTGCGGCGGTGGCATTGGGAATGGCACTAA TAATAATATGCATGCTCCTATATGCTTGTTACTATAAAAAGTTTCAACATAAACAGGATCCACTACTAAATTTTAAC ATTTAATTTTTTATACAGATGATTTCCACTACAATTTTTATCATTACTAGCCTTGCAGCTGTAACTTATGGCCGTTC ACACCTAACTGTACCTGTTGGCTCAACATGTACACTACAAGGACCCCAAGAAGGCTATGTCACTTGGTGGAGAATAT ATGATAATGGAGGGTTCGCTAGACCATGTGATCAGCCTGGTACAAAATTTTCATGCAACGGAAGAGACTTGACCATT ATTAACATAACATCAAATGAGCAAGGCTTCTATTATGGAACCAACTATAAAAATAGTTTAGATTACAACATTATTGT AGTGCCAGCCACCACTTCTGCTCCCCGCAAATCCACTTTCTCTAGCAGCAGTGCCAAAGCAAGCACAATTCCTAAAA CAGCTTCTGCTATGTTAAAGCTTCCAAAAATCGCTTTAAGTAATTCCACAGCCGCTCCCAATACAATTCCTAAATCA ACAATTGGCATCATTACTGCCGTGGTAGTGGGATTAATGATTATATTTTTGTGTATAATGTACTACGCCTGCTGCTA TAGAAAACATGAACAAAAAGGTGATGCATTACTAAATTTTGATATTTAATTTTTTATAGAATTATGATATTGTTTCA ATCAAATACCACTACCTCCTATGCATACACAAACATTCAGCCTAAATACGCTATGCAACTAGAAATCACAATACTAA TTGTAATTGGAATTCTTATACTATCTGTTATTCTTTATTTTATATTCTGCCGTCAAATACCCAATGTTCATAGAAAT TCTAAAAGACGTCCCATCTATTCTCCTATGATTAGTCGTCCCCATATGGCTCTGAATGAAATCTAAGATCTTTTTTT TTTTCTCTTACAGTATGGTGAACATCAATCATGATCCCTAGAAATTTCTTCTTCACCATACTCATCTGTGCTTTTAA TGTCTGTGCTACTTTCACAGCAGTAGCCACTGCAAGCCCAGACTGTATAGGACCATTTGCTTCCTATGCACTTTTTG CCTTCGTTACTTGCATCTGCGTGTGTAGCATAGTCTGCCTGGTTATTAATTTTTTCCAACTGGTAGACTGGATCTTT GTGCGAATTGCCTACCTACGTCACCATCCCGAATACCGCAATCAAAATGTTGCGGCACTTCTTAGGCTTATTTAAAA CCATGCAGGCTATGCTACCAGTCATTTTAATTTTGCTACTACCCTGCATTCCCCTAGCTTCCACCGCCACTCGCGCT ACACCTGAACAACTTAGAAAATGCAAATTTCAACAACCATGGTCATTTCTTGATTGCTACCATGAAAAATCTGATTT TCCCACATACTGGATAGTGATTGTTGGAATAATTAACATACTTTCATGTACCTTTTTCTCAATCACAATATACCCCA CATTTAATTTTGGGTGGAATTCTCCCAATGCACTGGGTTACCCACAAGAACCAGATGAACATATTCCACTACAACAC ATACAACAACCACTAGCACTGGTACAGTATGAAAATGAGCCACAACCTTCACTGCCCCCTGCCATTAGTTACTTCAA CCTAACCGGCGGAGATGACTGACCCAATCGCCACATCATCCACCGCTGCCAAGGAGCTGCTGGACATGGACGGACGT GCCTCAGAACAGCGACTCATCCAACTACGCATTCGTCAGCAGCAGGAACGAGCAGTAAAAGAGCTAAGGGATGCCAT TGGGATTCACCAGTGCAAAAAAGGCATATTCTGCTTAGTAAAACAATCCAAAATCTCCTACGAGATCACCGCTACTG ACCATCGTCTCTCATACGAGCTCGGTCCGCAGCGACAAAAATTCACCTGCATGGTGGGAATCAACCCCATAGTTATC ACCCAGCAGTCTGGAGATACTAAGGGTTGTATCCAGTGTTCCTGTGATTCCACCGAGTGCATCTACACACTGCTGAA GACCCTCTGCGGCCTTCGAGACCTCCTACCCATGAACTAATCATTGCCCCTACCTTACCCAATCAAAATATTAATAA AGACACTTACTTGAAATCAGCAATACAGTCTTTGTCAAAACTTTCTACCAGCAGCACCTCACCCTCTTCCCAACTCT GGTACTCTAAACGTCGGAGGGTGGCATACTTTCTCCACACTTTGAAAGGGATGTCAAATTTTATTTCCTCTTCTTTG CCCACAATCTTCATTTCTTTATCCCCAGATGGCCAAGCGAGCTCGGCTAAGCACTTCCTTCAACCCGGTGTACCCTT ATGAAGATGAAAGCAGCTCACAACACCCATTTATAAATCCTGGTTTCATTTCCCCTGACGGGTTCACACAAAGTCCA AACGGGGTTTTAAGTCTTAAATGTGTTAATCCACTTACCACTGCAAGCGGCTCCCTCCAACTTAAAGTGGGAAGTGG TCTTACAGTAGACACTACTGATGGATCCTTAGAAGAAAACATCAAAGTTAACACCCCCCTAACAAAGTCAAACCATT CTATAAATTTACCAATAGGAAACGGTTTGCAAATAGAACAAAACAAACTTTGCAGTAAACTCGGAAATGGTCTTACA TTTGACTCTTCCAATTCTATTGCACTGAAAAATAACACTTTATGGACAGGTCCAAAACCAGAAGCCAACTGCATAAT TGAATACGGGAAACAAAACCCAGATAGCAAACTAACTTTAATCCTTGTAAAAAATGGAGGAATTGTTAATGGATATG TAACGCTAATGGGAGCCTCAGACTACGTTAACACCTTATTTAAAAACAAAAATGTCTCCATTAATGTAGAACTATAC TTTGATGCCACTGGTCATATATTACCAGACTCATCTTCTCTTAAAACAGATCTAGAACTAAAATACAAGCAAACCGC TGACTTTAGTGCAAGAGGTTTTATGCCAAGTACTACAGCGTATCCATTTGTCCTTCCTAATGCGGGAACACATAATG AAAATTATATTTTTGGTCAATGCTACTACAAAGCAAGCGATGGTGCCCTTTTTCCGTTGGAAGTTACTGTTATGCTT AATAAACGCCTGCCAGATAGTCGCACATCCTATGTTATGACTTTTTTATGGTCCTTGAATGCTGGTCTAGCTCCAGA AACTACTCAGGCAACCCTCATAACCTCCCCATTTACCTTTTCCTATATTAGAGAAGATGACTGACAACAAAAATAAA GTTCAACATTTTTTATTGAAATTCCTTTTACAGTATTCGAGTAGTTATTTTGCCTCCCCCTTCCCATTTAACAGAAT ACACCAATCTCTCCCCACGCACAGCTTTAAACATTTGGATACCATTAGAGATAGACATAGTTTTAGATTCCACATTC CAAACAGTTTCAGAGCGAGCCAATCTGGGGTCAGTAATACATAAAAATGCATCGGGATAGTCTTTTAAAGCGCTTTC ACAGTCCAACTGTTGCGGATGCGACTCCGGAGTCTGAATCACGGTCATCTGGAAGAAGAACGATGGGAATCATAATC CGAAAACGGAATCGGGCGATTGTGTCTCATCAAACCCACAAGCAACCGCTGTCTGCGTCGCTCCGTGCGACTGCTGT TTATGGGATCGGGGTCCGCAGTGTCCTGAAGCATGATTTTAATAGCCCTTAACATTAACTTTCTGGTGCGATGCGCG CAGCAACGCATTCTGATTTCACTTAGATTACTACAGTAGGTACAGCACATTATCACAATATTGTTTAATAAACCATA ATTAAAAGCGCTCCAGCCAAAACTCATATCTGATATAATCGCCCCTGCATGACCATCATACCAAAGTTTAATATAAA TTAAATGTCGTTCCCTCAAAAACACACTACCCACATACATGATCTCTTTTGGCATGTGCATATTAACAATTTGTCTG TACCATGGACAACGTTGGTTAATCATGCAACCCAATATAACCTTCCGGAACCACACTGCCAACACCGCTCCCCCAGC CATGCATTGAAGTGAACCCTGCTGATTACAATGACAATGAAGAACCCAATTCTCTCGACCATGAATCACTTGAGACT GAAAAATATCTATAGTAGCACAACAAAGACATAAATGCATGCATCTTCTCATAATTTTTAACTCCTCTGGATTTAAA AACATATCCCAAGGAATGGGAAACTCTTGCAGAACAGTAAAGCTGGCAGAACAAGGAAGACCACGAACACAACTTAC ACTATGCATAGTCATAGTATCACAATCTGGCAACAGCGGGTGGTCTTCAGTCATAGAAGCTCGGGTTTCATTTTCCT CACATCGTGGTAATTGGGCTCTGGTGTAAGGGTGATGTCTGGCGCATGATGTGGAGCGTGCGCGCAACCTTGTCATA ATGGAGTTGCTTCCTGACATTCTCGTATTTTGTATAGCAAAACGCTGCCCTGGCACAACACACTCTTCTTCGTCTTC TATCCTGCCGCTTAGTGTGTTCCGTCTGATAATTCAAGTACAGCCACACTCTTAAGTTGGTCAAAAGAATGCTGGCT TCAGTTGTAATCAAAACTCCATCATATTTAATTGTTCTAAGGAAATCATCCACGGTAGCATATGCAAATCCCAACCA AGCAATGCAACTGGATTGCGTTTCAAGCAGCAGAGGAGAGGGAAGAGACGGAAGAATCATGTTAATTTTTATTCCAA ACGATCTCGCAGTACTTCAAATTGTAGATCGCGCAGATGGCATCTATCGCCCCCACTGTGTTGGTGAAAAAGCACAG CTAAATCAAAAGAAATGCGATTTTCAAGGTGCTCAACGGTGGCTTCCAACAAAGCCTCCACGCGCACATCCAAAAAC AAAAGAATACCAAAAGAAGGAGCATTTTCTAACTCCTCAAACATCATATTACATTCCTGCACCATTCCCAGATAATT TTCAGCTTTCCAGCCTTGAATTATTCGTGTCAGTTCTTGTGGTAAATCCAAACCACACATTACAAACAGGTCCCGGA GGGCGCCCTCCACCACCATTCTTAAACACACCCTCATAATGACAAAATATCTTGCTCCTGTGTCACCTGTAGCAAAT TAAGAATGGCATCATCAATTGACATGCCCTTGGCTCTAAGTTCTTCTCTAAGTTCTAGTTGTAGATACTCTCTCATA TTATCACCAAACTGCTTAGCCAGAAGCCCCCCGGGAACAATAGCAGGGGACGCTACAGTGCAGTACAAGCGCAGACC TCCCCAATTGGCTCCAGCAAAAACAAGATTAGAATAAGCATACTGGGAACCACCAGTAATATCATCAAAGTTGCTGG AAATATAATCAGGCAGAGTTTCTTGTAAAAATTGAATAAAAGAAAAATTTTCCAAAGAAACATTCAAAACCGTTGGG ATGCAAATACAATAGGTTACCGCGCTGCGCTCCAACATTGTTAGTTTTGAATTAGTCTGCAAAATAAAAGAAACAAG CGTCATATCATAGTAGCCTGTCGAACAGGTGGAAAAATCAGTCTTTCCATCACAAGACAAGCCACAGGGTCTCCAGC TCGACCCTCGTAAAACCTGTCATTGTGATTAAACAACAGCACCGAAAGTTCCTCGCGGTGGCCAGCATGAATAATTC TTGATGAAGCATACAATCCAGACATGTTAGCATCAGTTAAAGAGAAAAAACAGCCAACATAGCCTCTGGGTATAATT ATGCTTAATTTTAAGTATAGCAAAGCCACCCCTCGCGGATACAAAGTAAAAGGCACAGGAGAATAAAAAATATAATT ATTTCTCTGCTGCTGTTCAGGCAACGTTGCTCCCGGTCCCTCTAAATAGACATACAAAGCCTCATCAGCCATGGCTT ACCAGGCAAAGTACAGCGGGCGCACAAAGCACAAGCTCTAAAGAAGCTCTAAAAACACTCTCCAACCTCTCCACAAT ATATACACAAGCCCTAAACTGACGTAATGGGAGTAAAGTGAAAAAAAAATACCGCCAAGCCCAACACACACCCCGAA ACTGCGTCAGCAGGAAAAAGTACAGTTTCACTTCCGCATTCCCAACAAGCGTAACTTCCTCTTTCTCATGGTACGTC ACATCCGATTAACTTGCAACGTCATTTTCCCACGGTCGCGCCGCCCCTTTTAGCCGTTAACCCCGCAGCCAATCACC ACACAGCGCGCACTTTTTTAAATTACCTCATTTACATGTTGGCACCATTCCATCTATAAGGTATATTATATAGATAG

[0602] GenBank Accession No. YP_002213796 MAKRARLSTSFNPVYPYEDESSSQHPFINPGFISPDGFTQSPNGVLSLKCVNPLTTASGSLQLKVGSGLTVDTTDGS LEENIKVNTPLTKSNHSINLPIGNGLQIEQNKLCSKLGNGLTFDSSNSIALKNNTLWTGPKPEANCIIEYGKONPDS KLTLILVKNGGIVNGYVTLMGASDYVNTLFKNKNVSINVELYFDATGHILPDSSSLKTDLELKYKQTADFSARGEMP STTAYPFVLPNAGTHNENYIFGQCYYKASDGALFPLEVTVMLNKRLPDSRTSYVMTFLWSLNAGLAPETTOATLITS PFTFSYIREDD

[0603] GenBank Accession No. YP_002213774 MRRRAVLGGAVVYPEGPPPSYESVMQQQAAMIOPPLEAPFVPPRYLAPTEGRNSIRYSELSPLYDTTKLYLVDNKSA DIASLNYQNDHSNFLTTVVONNDFTPTEASTQTINFDERSRWGGOLKTIMHTNMPNVNEYMFSNKFKARVMVSRKAP EGVTVNDTYDHKEDILKYEWFEFILPEGNFSATMTIDLMNNAIIDNYLEIGRONGVLESDIGVKEDTRNFRLGWDPE TKLIMPGVYTYEAFHPDIVLLPGCGVDFTESRLSNLLGIRKRHPFQEGFKIMYEDLEGGNIPALLDVTAYEESKKDT TTETTTLAVAEETSEDDDITRGDTYITEKQKREAAAAEVKKELKIQPLEKDSKSRSYNVLEDKINTAYRSWYLSYNY GNPEKGIRSWTLLTTSDVTCGAEQVYWSLPDMMQDPVTFRSTRQVNNYPVVGAELMPVFSKSFYNEQAVYSQQLRQA TSLTHVENRFPENQILIRPPAPTITTVSENVPALTDHGTLPLRSSIRGVQRVTVTDARRRTCPYVYKALGIVAPRVL SSRTF

[0604] GenBank Accession No. YP_002213779 MATPSMMPQWAYMHIAGQDASEYLSPGLVQFARATDTYFSMGNKERNPTVAPTHDVTTDRSQRLMLRFVPVDREDNT YSYKVRYTLAVGDNRVLDMASTFFDIRGVLDRGPSFKPYSGTAYNSLAPKGAPNTSQWIVTTNGDNAVTTTTNTFGI ASMKGDNITKEGLQIGKDITTTEGEEKPIYADKTYQPEPQVGEESWTDTDGTNEKFGGRALKPATNMKPCYGSFARP TNIKGGQAKNRKVKPTTEGGVETEEPDIDMEFFDGRDAVAGALAPEIVLYTENVNLETPDSHVVYKPETSNNSHANL GQQAMPNRPNYIGERDNFVGLMYYNSTGNMGVLAGQASQLNAVVDLODRNTELSYQLLLDSLGDRTRYFSMWNQAVD SYDPDVRIIENHGIEDELPNYCFPLNGIGPGHTYQGIKVKTDDINGWEKDANVAPANEITIGNNLAMEINIQANLWR SFLYSNVALYLPDVYKYTPPNITLPTNTNTYEYMNGRVVSPSLVDSYINIGARWSLDPMDNVN PFNHHRNAGLRYRS MLLGNGRYVPFHIQVPQKFFAVKNLLLLPGSYTYEWNFRKDVNMVLQSSLGNDLRTDGATISFTSINLYATFFPMAH NTASTLEAMLRNDTNDQSFNDYLSAANMLYPI PANATNIPISIPSRNWAAFRGWSFTRLKTKETPSLGSGFDPYFVY SGSIPYLDGTFYLNHTFKKVSIMFDSSVSWPGNDRLLSPNEFEIKRTVDGEGYNVAQCNMTKDWFLVOMLANYNIGY QGFYIPEGYKDRMYSFFRNFQPMSROVVDEVNYTDYKAVTLPYQHNNSGFVGYLAPTMRQGEPYPANYPYPLIGTTA VKSVTQKKFLCDRTMWRIPFSSNFMSMGALTDLGQNMLYANSAHALDMTFEVDPMDEPTLLYLLFEVFDVVRVHQPH RGVIEAVYLRTPFSAGNATT

[0605] GenBank Accession No. AC_000018 (SEQ ID NO: 210) CTCTCTATTTAATATACCTTATAGATGGAATGGTGCCAATATGTAAATGAGGTAATTTAAAAAAGTGCGCGCTGTGT GGTGATTGGCTGTGGGGTTAACGGCTAAAATGGGCGGGGCGGCCGTGGGAAAATGACGTGACTTATGTGGGAGGAGC TATGTTGCAAGTTATTGCGGTAAATGTGACGTAAAACGAGGTGTGGTTTGAACACGGAAGTAGACAGTTTTCCCACG CTTACTGACAGGATATGAGGTAGTTTTGGGCGGATGCAAGTAAAAATTCTCCATTTTCGCGCGAAAACTGAATGAGG AAGTGAATTTCTGAGTCATTTCGCGGTTATGACAGGGTGGAGTATTTGCCGAGGGCCGAGTAGACTTTGACCGTTTA CGTGGAGGTTTCGATTACCGTGTTTTTCACCTAAATTTCCGCGTACGGTGTCAAAGTCCTGTGTTTTTACGTAGGTG TCAGCTGATCGCTAGGGTATTTAAACCTGACGAGTTCCGTCAAGAGGCCACTCTTGAGTGCCAGCGAGAAGAGTTTT CTCCTTCGCGCCGCAAGTCAGTTCTGCGCTTTGAAAATGAGACACCTGCGTTTCCTGCCACAGGAGATTATCTTCAG TGAGACCGGGATCGAAATACTGGAGTTTGTGGTAAATACCCTAATGGGAGACGACCCGGAACCGCCAGTGCAGCCTT TCGATCCACCTACGCTGCACGATCTGTATGATTTAGAGGTAGACGGGCCTCAGGATCCCAATGAGGAAGCTGTGAAT GGGTTTTTTACTGATTCTATGCTGCTAGCTGCCGATGAAGGATTGGACATAAACCCTCCTCCTGAGACCCTTGTTAC CCCAGGGGTGGTTGTGGAAAGCGGCAGAGGTGGGAAAAAATTGCCTGATCTGGGAGCAGCTGAAATGGACTTGCGTT GTTATGAAGAGGGTTTTCCTCCGAGTGATGATGAAGATGGGGAAACTGAGCAGTCCATCCATACCGCAGTGAATGAG GGAGTAAAAGCTGCCAGCGATGTTTTTAAGTTGGACTGTCCGGAGCTGCCTGGACATGGCTGTAAGTCTTGTGAATT TCACAGGAATAACACTGGAATGAAAGAACTATTGTGCTCGCTTTGCTATATGAGAATGCACTGCCACTTTATTTACA GTAAGTGTATTTAAGTGAAATTTAAAGGAATAGTGTAGCTGTTTAATAACTGTTGAATGGTAGATTTATGTTTTTTA CTTGTGATTTTTTGTAGGTCCTGTGTCTGATGATGAGTCACCTTCTCCTGATTCAACTACCTCACCTCCTGAAATTC AGGCGCCCGCACCTGCAAACGTATGCAAGCCCATTCCTGTAAAGCCTAAGCCTGGGAAACGCCCTGCTGTGGATAAG CTTGAGGACTTGTTGGAGGGTGGGGATGGACCTTTGGACCTTAGTACCCGGAAACTGCCAAGGCAATAAGTGCCCTG CAGCTGTGTTTATTTAATGTGACGTCATGTAATAAAATTATGTCAGCTGCTGAGTGTTTTATTACTTCTTGGGTGGG GACTTGGATATATAAGTAGGAGCAGATCTGTGTGGTTAGCTCACAGCAACCTGCTGCCATCCATGGAGGTTTGGGCT ATCTTGGAAGACCTCAGACAGACTAGGCTACTGCTAGAAAACGCCTCGGACGGAGTCTCTGGCCTTTGGAGATTCTG GTTCGGTGGTGATCTAGCTAGGCTAGTGTTTAGGATAAAACAGGACTACAGCGTAGAATTTGAAAAGTTATTGGACG ACAGTCCAGGACTTTTTGAAGCTCTTAACTTGGGTCATCAGGCTCATTTTAAGGAGAAGGTTTTATCAGTTTTAGAT TTTTCTACTCCTGGTAGAACTGCTGCTGCTGTAGCTTTTCTTACTTTTATATTGGATAAATGGATCCGCCAAACTCA CTTCAGCAAGGGATACGTTTTGGATTTCATAGCAGCAGCTTTGTGGAGAACATGGAAGGCTCGCAGGATGAGGACAA TCTTAGATTACTGGCCAGTGCAGCCTCTAGGAGTAGCAGGGATACTGAGACACCCACCGACCATGCCAGCGGTTCTG CAGGAGGAGCAGCAGGAGGACAATCCGAGAGCCGGCCTGGACCCTCCGGTGGAGGAGTAGCTGACCTGTTTCCTGAA CTGCGACGGGTGCTTACTAGGTCTACGACCAGTGGACAGAACAGAGGCATTAAGAGGGAGAGGAATCCTAGTGGGAA TAATTCAAGAACCGAGTTGGCTTTAAGTTTAATGAGCCGCAGGCGTCCTGAAACTGTTTGGTGGCATGAGGTTCAGA GCGAAGGCAGGGATGAAGTTTCAATATTGCAGGAGAAATATTCACTAGAACAACTTAAGACCTGTTGGTTGGAACCT GAGGATGATTGGGAGGTGGCCATTAGGAATTATGCTAAGATATCTCTGAGGCCTGATAAACAATATAGAATTACTAA GAAGATTAATATTAGAAATGCATGCTACATATCAGGGAATGGGGCAGAGGTTATAATAGATACACAAGATAAAGCAG CTTTTAGATGTTGTATGATGGGTATGTGGCCAGGGGTTGTCGGCATGGAAGCAGTAACACTTATGAATATTAGGTTT AGAGGGGATGGGTATAATGGCATTGTATTTATGGCTAACACTAAGCTGATTCTACATGGTTGTAGCTTTTTTGGGTT TAATAATACGTGTGTAGAAGCTTGGGGGCAAGTTAGTGTGAGGGGTTGTAGTTTTTATGCATGCTGGATTGCAACAT CAGGTAGGGTCAAGAGTCAGTTGTCTGTGAAGAAATGCATGTTTGAGAGATGTAATCTTGGCATACTGAATGAAGGT GAAGCAAGGATCCGCCACTGCGCAGCTACAGAAACTGGCTGCTTCATTCTAATAAAGGGAAATGCCAGTGTGAAGCA TAATATGATCTGTGGACATTCGGATGAGAGGCCTTATCAGATGCTGACCTGCGCTGGTGGACATTGCAATATTCTTG CTACTGTGCATATCGTTTCACATGCACGCAAGAAATGGCCTGTATTTGAACATAATGTGATTACCAAGTGCACCATG CACATAGGTGGTCGCAGGGGAATGTTTATGCCTTACCAGTGTAACATGAATCATGTGAAGGTAATGTTGGAACCAGA TGCCTTTTCCAGAGTGAGCTTAACAGGAATCTTTGATATGAATATTCAACTATGGAAGATCCTGAGATATGATGACA CTAAACCGAGGGTGCGCGCATGCGAATGCGGAGGCAAGCATGCTAGATTCCAGCCGGTGTGCGTGGATGTGACTGAA GACCTGAGACCCGATCATTTGGTGCTTGCCTGCACTGGAGCGGAGTTCGGTTCCAGTGGTGAAGAAACTGACTAAAG TGAGTAGTGGGGGCAAGATGTGGATGGGGACTTTCAGGTTGGTAAGGTGGACAGATTGGGTAAATTTTGTTAATTTC TGTCTTGCAGCTGCCATGAGTGGAAGCGCTTCTTTTGAGGGGGGAGTATTTAGCCCTTATCTGACGGGCAGGCTCCC ACCATGGGCAGGAGTTCGTCAGAATGTCATGGGATCCACTGTGGATGGGAGACCCGTCCAGCCCGCCAATTCCTCAA CGCTGACCTATGCCACTTTGAGTTCGTCACCATTGGATGCAGCTGCAGCCGCCGCCGCTACTGCTGCCGCCAACACT ATCCTTGGAATGGGCTATTACGGAAGCATCGTTGCCAATTCCAGTTCCTCTAATAACCCTTCAACCCTGGCTGAGGA CAAGCTACTTGTTCTGTTGGCTCAGCTCGAGGCCTTAACCCAACGCTTAGGCGAACTGTCTAAGCAGGTGGCCCAGT TGCGTGAGCAAACTGAGTCTGCTGTTGCTACAGCAAAGTCTAAATAAAGATCTCAAATCAATAAATAAAGAAATACT TGTTATAAAAACAAATGAATGTTTATTTGATTTTTCGCGCGCGGTATGCCCTGGACCATCGGTCTCGATCATTGAGA ACTCGGTGGATCTTTTCCAGTACCCTGTAAAGGTGGGATTGAATGTTTAGATACATAGGCATTAGTCCGTCTCGGGG GTGGAGATAGCTCCATTGAAGAGCCTCTTGCTCCGGGGTAGTGTTATAAATCACCCAGTCATAGCAAGGTCGGAGTG CATGGTGTTGCACAATATCTTTTAGGAGCAGACTAATTGCAACGGGGAGGCCCTTAGTGTAGGTGTTTACAAATCTA TTGAGCTGGGACGGGTACATCCGGGGTGAAATTATATGCATTTTGGACTGGATCTTGAGGTTGGCAATGTTGCCGCC TAGATCCCGTCTCGGGTTCATATTGTGCAGGACCACTAAGACAGTGTATCCGGTGCACTTGGGAAATTTATCATGCA GCTTAGAGGGAAAAGCATGAAAAAATTTGGAGACGCCTTTGTGACCCCCCAGATTCTCCATGCACTCATCCATAATG ATAGCGATGGGGCCGTGGGCAGCGGCACGGGCGAACACGTTCCGGGGGTCTGAAACATCATAGTTATGCTCCTGAGT CAGGTCATCATAAGCCATTTTAATAAACTTTGGGCGGAGGGTGCCAGATTGGGGGATGAAAGTTCCCTCTGGCCCGG GAGCATAGTTCCCCTCACATATTTGCATTTCCCAGGCTTTCAGTTCAGAGGGGGGGATCATGTCCACCTGCGGGGCT ATAAAAAATACCGTTTCTGGAGCCGGGGTGATTAACTGGGATGAGAGCAAATTCCTAAGCAGCTGAGACTTGCCGCA CCCAGTGGGACCGTAAATGACCCCAATTACGGGTTGCAGATGGTAGTTTAGGGAGCGACAGCTGCCGTCCTCCCGGA GTAGGGGGGCCACTTCGTTCATCATTTCCCTTACATGGATATTTTCCCGCACCAAGTCCGTTAGGAGGCGCTCTCCC CCAAGGGATAGAAGCTCCTGGAGCGAGGAGAAGTTTTTCAGCGGCTTCAGCCCGTCAGCCATGGGCATTTTGGAAAG AGTCTGTTGCAAGAGCTCGAGCCGGTCCCAGAGCTCGGTGATGTGCTCTATGGCATCTCGATCCAGCAGACCTCCTC GTTTCGCGGGTTGGGACGGCTCCTGGAGTAGGGAATCAGACGATGGGCGTCCAGCGCTGCCAGGGTCCGATCCTTCC ATGGTCGCAGCGTCCGAGTCAGGGTTGTTTCCGTCACGGTGAATGGGTGCGCGCCTGGTTGGGCGCTTGCGAGGGTG CGCTTCAGACTCATCCTGCTGGTCGAGAACCGCTGCCGATCGGCGCCCTGCATGTCGGCCAGGTAGCAGTTTACCAT GAGTTCGTAGTTGAGCGCCTCGGCCGCGTGGCCTTTGGCACGGAGCTTACCTTTGGAAGTTTTATGGCAGGCGGGGC AGTAGATACATTTGAGGGCATACAGCTTGGGCGCGAGGAAAATGGATTCGGGGGAGTATGCATCCGCACCGCAGGAG GCGCAGACGGTTTCGCACTCCACGAGCCAGGTCAGATCCGGCTCATCGGGGTCAAAAACAAGTTTTCCGCCATGTTT TTTGATGCGTTTCTTACCTTTGGTTTCCATGAGGTCGTGTCCCCGCTGGGTGACAAAGAGGCTGTCCGTGTCCCCGT AGACCGACTTTATGGGCCTGTCCTCGAGCGGAGTGCCTCGGTCCTCTTCGTAGAGGAACCCAGCCCACTCTGATACA AAAGCGCGTGTCCAGGCCAGCACAAAGGAGGCCACGTGGGAGGGGTAGCGGTCGTTGTCAACCAGGGGGTCCACCTT CTCTACGGTATGTAAACACATGTCCCCCTCCTCCACATCCAAGAATGTGATTGGCTTGTAAGTGTAGGCCACGTGAC CAGGGGTCCCCGCCGGGGGGGTATAAAAGGGGGCGGGCCTCTGTTCGTCCTCACTGTCTTCCGGATCGCTGTCCAGG AGCGCCAGCTGTTGGGGTAGGTATTCCCTCTCGAAGGCGGGCATGACCTCTGCACTCAGGTTGTCAGTTTCTAGGAA CGAGGAGGATTTGATATTGACAGTACCAGCAGAGATGCCTTTCATAAGACTCTCGTCCATCTGGTCAGAAAACACAA TCTTCTTGTTGTCCAGCTTGGTAGCAAATGATCCATAGAGGGCATTGGATAGAAGCTTGGCGATGGAGCGCATGGTT TGGTTCTTTTCCTTGTCCGCGCGCTCCTTGGCGGCGATGTTAAGCTGGACGTACTCGCGCGCCACACATTTCCATTC AGGGAAGATGGTTGTCAGTTCATCCGGAACTATTCTGACTCGCCATCCCCTATTGTGCAGGGTTATCAGATCCACAC TGGTGGCCACCTCGCCTCGGAGGGGCTCATTGGTCCAGCAGAGTCGACCTCCTTTTCTTGAACAGAAAGGGGGGAGG GGGTCTAGCATGAGCTCATCAGGGGGGTCCGCATCTATGGTAAATATTCCCGGTAGCAAATCTTTGTCAAAATAGCT GATGGTGGTGGGATCATCCAAGGTCATCTGCCATTCTCGAACTGCCAGCGCGCGCTCATAGGGGTTAAGAGGGGTGC CCCAGGGCATGGGGTGGGTGAGCGCGGAGGCATACATGCCACAGATATCGTATACATAGAGGGGCTCTTCGAGGATG CCGATGTAAGTGGGATAACAGCGCCCCCCTCTGATGCTTGCTCGCACATAGTCATAGAGTTCATGTGAGGGGGCGAG AAGACCCGGGCCCAGATTGGTGCGGTTGGGTTTTTCCGCCCTGTAAACGATCTGGCGAAAGATGGCATGGGAATTTG AAGAGATAGTAGGTCTCTGGAATATGTTAAAATGGGCATGAGGTAGGCCTACAGAGTCCCTTATGAAGTGGGCATAT GACTCTTGCAGCTTGGCTACCAGCTCGGCGGTGACGAGTACATCCAGGGCACAGTAGTCGAGAGTTTCCTGGATGAT GTCATAACGCGGTTGGCTTTTCTTTTCCCACAGCTCGCGGTTGAGAAGGTATTCTTCGCGATCCTTCCAGTACTCTT CGAGGGGAAACCCGTCTTTTTCTGCACGGTAAGAGCCCAACATGTAGAACTGATTGACTGCCTTGTAGGGACAGCAT CCCTTCTCCACTGGGAGAGAGTATGCTTGGGCTGCATTGCGCAGCGAGGTATGAGTGAGGGCAAAAGTGTCCCTGAC CATGACTTTGAGGAATTGATACTTGAAGTCCATGTCATCACAGGCCCCCTGTTCCCAGAGTTGGAAGTCCACCCGCT TCTTGTAGGCGGGGTTGGGCAAAGCGAAAGTAACATCATTGAAGAGGATCTTGCCGGCCCTGGGCATGAAATTTCGG GTGATTCTGAAAGGCTGAGGGACCTCTGCTCGGTTATTGATAACCTGAGCGGCCAAGACGATCTCATCAAAGCCATT GATGTTGTGCCCCACTATGTACAGTTCTAAGAATCGAGGGGTGCCCCTGACATGAGGCAGCTTCTTGAGTTCTTCAA AAGTGAGATCTGTAGGGTCAGTGAGAGCATAGTGTTCGAGGGCCCATTCGTGCACGTGAGGGTTCGCTTTGAGGAAG GAGGACCAGAGGTCCACTGCGAGTGCTGTTTGTAACTGGTCCCGGTATTGACGAAAATGCTGCCCGACTGCCATTTT TTCTGGGGTGACGCAATAGAAGGTTTGGGGGTCCTGCCGCCAGCGATCCCACTTAAGTTTCATGGCGAGGTCATAGG CGATGTTGACGAGCCGCTGGTCTCCAGAGAGTTTCATGACCAGCATGAAGGGGATTAGCTGCTTGCCAAAGGACCCC ATCCAGGTGTAGGTTTCCACATCGTAGGTGAGGAAGAGCCTTTCTGTGCGAGGATGAGAGCCAATCGGGAAGAACTG GATCTCCTGCCACCAGTTGGAGGAATGGCTGTTGATGTGATGGAAGTAGAACTCCCTGCGACGCGCCGAGCATTCAT GCTTGTGCTTGTACAGACGGCCGCAGTACTCGCAGCGATTCACGGGATGCACCTCATGAATGAGTTGTACCTGACTT CCTTTGACGAGAAATTTCAGTGGAAAATTGAGGCCTGGCGTTTGTACCTGGCGCTCTACTATGTTGTCTGCATCGGC ATGACCATCTTCTGTCTCGATGGTGGTCATGCTGACGAGCCCTCGCGGGAGGCAAGTCCAGACCTCGGCGCGGCAGG GGCGGAGCTCGAGGACGAGAGCGCGCAGGCCGGAGCTGTCCAGGGTCCTGAGACGCTGCGGAGTCAGGTTAGTAGGC AGTGTCAGGAGATTGACTTGCATGATCTTTTCGAGGGCGTGAGGGAGGTTCAGATGGTACTTGATCTCCACGGGTCC GTTGGTGGAGATGTCAATGGCTTGCAGGGTTCCGTGCCCCTTGGGCGCTACCACCGTGCCCTTGTTTTTCCTTTTGG GCGGCGGTGGCTCTGTTGCTTCTTGCATGTTTAGGAGCGGTGTCGAGGGCGCGCACCGGGCGGCAGGGGCGGCTCGG GACCCGGCGGCATGGCTGGCAGTGGTACGTCGGCGCCGCGCGCGGGTAGGTTCTGGTACTGCGCCCTGAGAAGACTC GCATGTGCGACGACGCGGCGGTTGACATCCTGGATCTGACGCCTCTGGGTGAAAGCTACCGGCCCCGTGAGCTTGAA CCTGAAAGAGAGTTCAACAGAATCAATCTCGGTATCGTTGACGGCGGCTTGCCTAAGGATTTCTTGCACGTCGCCAG AGTTATCCTGGTAGGCGATCTCGGCCATGAACTGCTGGATCTCTTCCTCTTGAAGATCTCCGCGGCCCGCTCTCTCG ACGGTGGCCGCTAGGTCGTTGGAGATGCGCCCAATGAGTTGAGAGAATGCATTCATGCCCGCCTCGTTCCAGACGCG GCTGTAGACCACAGCCCCCACGGGATCTCTCGCGCGCATAACCACCTGGGCGAGGTTAAGCTCTACGTGGCGGGTGA AGACCGCATAGTTGCATAGGCGCTGGAAAAGGTAGTTGAGTGTGGTGGCGATGTGCTCGGTGACGAAGAAATACATG ATCCATCGTCTCAGCGGCATCTCGCTGACATCGCCCAGCGCTTCCAAGCGCTCCATGGCCTCGTAGAAGTCCACGGC AAAGTTGAAAAACTGGGAGTTACGCGCGGACACGGTCAACTCCTCTTCCAGAAGACGGATGAGTTCGGCAATGGTGG TGCGCACCTCGCGCTCGAAATCCCCCGGGATTTCTTCCTCAATCTCTTCTTCTTCCACTAACATCTCTTCCTCTTCA GGTGGGGCTGCAGGAGGAGGGGGAACGCGGCGACGCCGGCGGCGCACGGGCAGACGGTCGATGAATCTTTCAATGAC CTCTCCGCGGCGGCGGCGCATGGTCTCGGTGACGGCACGACCGTTCTCCCTGGGTCTCAGAGTGAAGACGCCTCCGC GCATCTCCCTGAAGTGGTGACTGGGAGGCTCTCCGTTGGGCAGGGACACCGCGCTGATTATGCATTTTATCAATTGC CCCGTAGGTACTCCGCGCAAGGACCTGATCGTCTCAAGATCCACGGGATCTGAAAACCTTTCGACGAAAGCGTCTAA CCAGTCGCAATCGCAAGGTAGGCTGAGCACTGTTTCTTGCGGGCGGGGGGGGCTAGACGCTCGGTCGGGGTTCTCTC TTTCTTTTCCTTCCTCCTCTTGGGAGGATGAGACGATGCTGCTGGTGATGAAATTAAAATAGGCAGTTTTGAGACGG CGGATGGTGGCGAGGAGCACCAGGTCTTTGGGTCCGGCTTGTTGGATGCGCAGGCGATGGGCCATTCCCCAAGCATT ATCCTGACATCTGGCCAGATCTTTATAGTAGTCTTGCATGAGTCGTTCCACGGGCACTTCTTCTTCGCCCGCTCTGC CATGCATGCGAGTGATCCCGAACCCGCGCATGGGCTGGACAAGTGCCAGGTCCGCTACAACCCTTTCGGCGAGGATG GCTTGCTGCACCTGGGTGAGGGTGGCTTGGAAGTCGTCAAAGTCCACAAAGCGGTGGTAGGCCCCGGTGTTGATTGT GTAGGAGCAGTTGGCCATGACTGACCAGTTGACTGTCTGGTGCCCAGGGCGCACGAGCTCGGTGTACTTGAGGCGCG AGTATGCGCGGGTGTCAAAGATGTAATCGTTGCAGGTGCGCACCAGGTACTGGTAGCCGATGAGAAAGTGTGGCGGT GGCTGGCGGTACAGGGGCCATCGCTCTGTAGCCGGGGCTCCGGGGGCAAGGTCTTCCAGCATGAGGCGGTGGTAACC GTAGATGTACCTGGACATCCAGGTGATACCGGAGGCGGTGGTGGATGCCCGCGGGAACTCGCGTACGCGGTTCCAGA TGTTGCGCAGCGGCATGAAGTAGTTCATGGTAGGCACGGTTTGGCCCGTGAGACGTGCACAGTCGTTGATGCTCTAG ACATACGGGCAAAAACGAAAGCGGTCAGCGGCTCGTCTCCGTGGCCTGGAGGCTAAGCGAACGGGTTGGGCTGCGCG TGTACCCCGGTTCGAATCTCGGATCAGGCTGGAGCCGCAGCTAACGTGGTACTGGCACTCCCGTCTCGACCCAGGCC TGCACAAAACCTCCAGGATACGGAGGCGGGTCGTTTTTTTGCTTTTTCCTGGATGGGAGCCAGTGCTGCGTCAAGCT TTAGAACACTCAGTTCTCGGGGCTGGGAGTGGCTCGCGCCCGTAGTCTGGAGAATTAATCGCCAGGGTTGCGTTGCG GTGTGCCCCGGTTCGAGTCTTAGCGCGCCGGATCGGCCGGTTTCCGCGACGTTTCTAAGACCCCGCCAGCCGACTTC TCCAGTTTACGGGAGCGAGCCCTCTTTTTTTTTTTTGTTTTTTGTTGCCCAGATGCATCCCGTGCTGCGACAGATGC GCCCCCAGCAACAGCCCCCTTCTCAGCAGCAGCTACAACAACAGCCACAAAAGGCTCTTCCTGCTCCTGTAACTACT GCGGCTGCAGCCGTCAGCGGCGCGGGACAGCCCGCCTATGATCTGGAATTGGAAGAGGGCGAGGGACTGGCGCGCCT GGGCGCACCATCGCCCGAGCGGCACCCGCCCAGCCGACTTCTCCAGTTTACGGGAGCGAGCCCTCTTTTTTTTTTTT GTTTTTTGTTGCCCAGATGCATCCCGTGCTGCGACAGATGCGCCCCCAGCAACAGCCCCCTTCTCAGCAGCAGCTAC AACAACAGCCACAAAAGGCTCTTCCTGCTCCTGTAACTACTGCGGCTGCAGCCGTCAGCGGCGCGGGACAGCCCGCC TATGATCTGGAATTGGAAGAGGGCGAGGGACTGGCGCGCCTGGGCGCACCATCGCCCGAGCGGCACCCGCGGGTGCA ACTGAAAAAGGACTCTCGCGAGGCGTACGTGCCCCAGCAGAACCTGTTCAGGGACAGGAGCGGTGAGGAGCCAGAGG AGATGCGAGCATCTCGATTTAACGCGGGTCGCGAGCTGCGCCACGGTCTGGATCGAAGACGGGTGCTGCAAGACGAG GATTTTGAGGTCGATGAAGTGACAGGGATCAGCCCAGCTAGGGCACATGTGGCCGCGGCCAACCTAGTCTCAGCCTA CGAGCAGACCGTGAAGGAGGAGCGCAACTTCCAAAAATCTTTTAACAACCATGTGCGCACCCTGATCGCCCGCGAGG AAGTGACCCTGGGTCTGATGCATCTGTGGGACCTGATGGAGGCTATCACCCAGAACCCCACTAGCAAACCACTGACA GCTCAGCTGTTTCTGGTGGTTCAACATAGCAGGGACAACGAGGCATTCAGGGAGGCGTTGTTGAACATCACCGAGCC TGATGGGAGATGGCTGTATGATCTGATCAACATCCTGCAAAGTATTATAGTGCAGGAACGTAGCCTGGGTTTGGCTG AGAAAGTGGCAGCTATCAACTACTCGGTCTTGAGCCTGGGCAAATACTACGCTCGCAAGATCTACAAGACCCCCTAC GTACCCATAGATAAGGAGGTAAAGATAGATGGGTTTTACATGCGCATGACTCTGAAGGTGCTGACTCTGAGCGACGA TCTGGGGGTGTATCGCAATGACAGGATGCACCGCGCGGTGAGCGCCAGCAGGAGGCGCGAGCTGAGCGACAGAGAAC TTATGCACAGCTTGCAAAGAGCTCTAACGGGGGCCGGGACTGATGGGGAGAACTACTTTGACATGGGAGCGGACTTG CAATGGCAACCCAGTCGCAGGGCCATGGAGGCTGCAGGGTGTGAGCTTCCTTACATAGAAGAGGTGGATGAAGTCGA GGACGAGGAGGGCGAGTACTTGGAAGACTGATGGCGCGACCCGTATTTTTGCTAGATGGAACAGCAGCAGGCACCGG ACCCCGCAATGCGGGCGGCGCTGCAGAGCCAGCCGTCCGGCATTAACTCTTCGGACGATTGGACCCAGGCCATGCAA CGCATAATGGCGCTGACGACCCGCAACCCCGAAGCCTTTAGACAGCAACCCCAGGCCAACCGCCTTTCGGCCATACT GGAGGCCGTAGTGCCCTCCCGCTCCAACCCCACCCACGAGAAGGTCCTGGCTATCGTGAACGCGCTGGTGGAGAACA AGGCCATCCGTCCCGATGAGGCCGGGCTGGTATACAATGCTCTCTTGGAGCGCGTGGCCCGTTACAACAGCAGCAAC GTGCAAACCAACCTGGACAGGATGGTGACCGATGTGCGCGAGGCCGTGTCTCAGCGCGAGCGGTTCCAGCGCGGCGC CAACTTGGGGTCGTTGGTAGCGCTAAACGCTTTCCTCAGCACCCAGCCCGCCAACGTGCCCCGTGGTCAGCAAGACT ATACAAACTTTTTGAGTGCATTGAGACTCATGGTAGCTGAGGTGCCCCAGAGCGAGGTGTACCAGTCCGGGCCAGAT TACTTCTTCCAGACCAGCAGACAGGGCTTGCAGACAGTGAACCTGACTCAGGCTTTCAAGAACCTGAAGGGTCTGTG GGGAGTGCACGCCCCAGTAGGAGATCGCGCGACCGTGTCTAGCTTGCTGACTCCCAACTCCCGCCTGCTGCTGCTGC TGGTATCCCCCTTTACTGACAGCGGTAGCATCGACCGCAACTCGTACTTGGGCTACCTGCTTAACCTGTATCGCGAG GCCATAGGGCAGAGCCAGGTGGACGAGCAGACCTATCAAGAAATCACCCAAGTGAGCCGCGCCCTGGGTCAGGAAGA CACGGGCAGTTTGGAAGCCACCCTGAACTTCTTGCTAACCAACCGGTCGCAGAAGATCCCTCCTCAGTATGCGCTTA CCGCTGAGGAGGAGCGGATCCTCAGATACGTGCAACAGAGCGTTGGACTGTTTCTGATGCAGGAGGGGGCGACACCT ACCGCCGCGCTGGACATGACAGCTCGAAACATGGAGCCCAGCATGTATGCTAGTAACAGGCCTTTCATTAACAAACT GCTGGACTACCTGCACAGGGCGGCCGCCATGAACTCTGATTATTTCACCAATGCTATCCTGAACCCACACTGGCTGC CCCCACCTGGTTTCTACACTGGCGAGTACGACATGCCCGACCCCAATGACGGGTTCCTGTGGGACGATGTGGACAGC AGCATATTCTCCCCGCCTCCCGGTTATACAGTTTGGAAGAAGGAAGGGGGCGATAGAAGACACTCTTCCGTGTCGCT GTCCGGAACGGCTGGTGCTGCCGCGACCGTGCCCGAAGCTGCAAGTCCTTTCCCTAGCTTGCCCTTTTCACTAAACA GCGTTCGCAGCAGTGAACTGGGGAGAATAACCCGCCCGCGCTTGATGGGCGAGGATGAGTACTTGAATGACTCTTTG CTGAGGCCAGAGAGGGAAAAGAACTTCCCCAACAATGGAATAGAGAGTCTGGTGGATAAGATGAGTAGATGGAAGAC CTATGCGCAGGATCACAGAGACGAGCCCAGGATATTGGGGGCTACAAGCAGACCGACCCGTAGACGCCAGCGCCACG ACAGACAGATGGGTCTTGTGTGGGACGATGAGGACTCTGCCGATGATAGCAGCGTGTTGGACTTGGGTGGAAGAGGA GGGGGCAACCCGTTCGCTCATCTGCGTCCCAGATTCGGGCGCATGTTGTAAAAGTGAAAGTAAAATAAAAATGCAAC TCACCAAGGCCATGGCGACCGAGCGTGCGTTCGTTCTTTTTTGTTATCTGTGTCTAGTACGATGAGGAGACGAGCCG TGCTAGGCGGAGCGGTGGTGTATCCGGAGGGTCCTCCTCCTTCTTACGAGAGCGTGATGCAGCAACAGGCGGCGATG ATACAGCCCCCACTGGAGGTTCCCTTCGTACCCCCGCGGTACCTGGCGCCTACGGAAGGGAGAAACAGCATTCGTTA CTCGGAGCTGTCGCCCCTGTACGATACCACCAAGTTGTATCTGGTTGACAACAAGTCGGCGGACATCGCCTCCCTGA ACTATCAGAACGACCACAGCAACTTCCTGACCACGGTGGTGCAGAACAATGACTTTACCCCCACGGAGGCTAGCACC CAGACCATCAACTTTGACGAACGGTCGCGATGGGGCGGTCATCTGAAGACCATCATGCACACCAACATGCCCAACGT GAACGAGTACATGTTCAGCAACAAGTTCAAGGCGAGGGTGATGGTGTCCAGAAAAGCTCCTGAAGGTGTTACAGTAA ATGACACCTATGATCATAAAGAGGATATCTTGAAGTATGAGTGGTTTGAGTTCATTTTACCAGAAGGCAACTTTTCA GCCACCATGACGATCGACCTGATGAACAATGCCATCATTGACAACTACCTGGAAATTGGCAGACAGAATGGAGTGCT GGAAAGTGACATTGGTGTTAAGTTTGACACTAGAAATTTCAGGCTCGGGTGGGACCCCGAAACTAAGTTGATTATGC CAGGAGTCTACACTTATGAGGCATTCCATCCTGACATTGTATTGCTGCCTGGTTGCGGGGTAGACTTTACTGAAAGC CGACTTAGCAACTTGCTTGGCATCAGGAAGAGACATCCATTCCAGGAGGGTTTCAAAATCATGTATGAAGATCTTGA AGGGGGTAATATTCCTGCCCTTTTGGATGTCACTGCCTATGAGGAAAGCAAAAAGGATACCACTACTGAAACAACCA CACTGGCTGTTGCAGAGGAAACTAGTGAAGATGATAATATAACTAGAGGAGATACCTATATAACAGAAAAACACAAA CGTGAAGCTGCAGCTGCTGAAGTTAAAAAAGAGTTAAAGATCCAACCTCTAGAAAAAGACAGCAAGAGTAGAAGCTA CAATGTCTTGGAAGACAAAATCAACACGGCCTACCGCAGTTGGTACCTGTCCTACAATTACGGTAACCCTAAGAAAG GAATAAGGTCTTGGACACTGCTCACCACTTCAGATGTCACCTGTGGGGCAGAGCAGGTTTACTGGTCGCTCCCTGAC ATGATGCAAGACCCAGTCACGTTCCGCTCCACAAGACAAGTCAACAACTACCCAGTGGTGGGTGCAGAGCTTATGCC CGTCTTCTCAAAGAGTTTCTACAATGAGCAAGCCGTGTACTCTCAGCAGCTCCGACAGGCCACTTCGCTCACGCACG TCTTCAACCGCTTCCCTGAGAACCAGATCCTCATCCGCCCGCCGGCGCCCACAATTACCACCGTCAGTGAAAACGTT CCTGCTCTCACAGATCACGGGACCCTGCCGTTACGCAGCAGTATCCGGGGAGTCCAGCGCGTGACCGTTACTGACGC CAGACGCCGCACCTGTCCCTACGTTTACAAGGCCCTGGGCATAGTCGCGCCGCGCGTTCTTTCAAGCCGCACTTTCT AAAAAAAAAAAATGTCCATTCTCATCTCGCCCAGTAATAATACCGGTTGGGGACTGTATGCGCCCACCAAGATGTAT GGAGGCGCCCGCAAACGCTCTACCCAGCACCCTGTGCGCGTTCGCGGTCATTTCCGCGCTCCCTGGGGCGCACTCAA GGGTCGTACCCGCACTCGGACCACGGTCGATGATGTGATCGACCAGGTGGTCGCCGATGCTCGTAATTATACTCCTA CTGCGCCTACATCTACTGTGGATGCAGTTATTGACAGTGTGGTGGCAGACGCCCGCGCCTATGCTCGCCGGAAGAGC CGAAGGAGGCGCATCGCCAGGCGCCACAGGGCTACTCCCGCCATGCGAGCTGCAAAAGCTATTCTGCGGAGGGCCAA ACGTGTGGGGCGAAGAGCCATGCTTAGAGCGGCCAGACGCGCGGCTTCAGGTGCCAGCAGCGGCAGGTCCCGCAGGC GCGCGGCCACGGCGGCAGCAGCGGCCATTGCCAACATGGCCCAACCGCGAAGAGGCAATGTGTACTGGGTGCGTGAT GCCACTACCGGCCAGCGCGTGCCCGTGCGCACTCGCCCCCCTCGCACTTAGAAGATACTGAGCAGTCTCCGATGTTG TGTCCCAGCGGCAAGTATGTCCAAGCGCAAATACAAGGAAGAGATGCTCCAGGTCATCGCGCCTGAAATCTACGGTC CACCGGTGAAGGATGAAAAAAAGCCCCGCAAAATCAAGCGGGTCAAAAATAACAAAAAGGAAGAAGATGACGATGAT GGGCTGGTGGAGTTTGTGCGCGAGTTCGCCCCAAGACGGCGCGTGCAGTGGCGCGGGCGCAAAGTGCGTCAAGTGCT CAGACCCGGGACCACTGTGGTTTTTACACCCGGCGAGCGTTCCAGCACTACTTTTAAACGGTCCTATGATGAGGTGT ACGGGGATGACAATATTCTTGAGCAGGCGGCAGACCGCCTTGACGAGTTTGCTTATGGCAAGCGCACTAGATCCAGT CCCAAAGAGGAGGCGGTGTCCATTCCTTTGGATCATGGAAATCCCACCCCCAGCCTCAAACCAGTCACCCTGCAGCA AGTGCTGCCCGTGCCTGCGCGGAGAGGCGTAAAGCGCGAGGGTGAGGACCTGTATCCCACCATGCAGCTAATGGTGC CCAAGCGCCAGAGGCTAGAAGACGTACTGGAGAAAATGAAAGTGGATGCCGATATCCAGCCTGAGGTCAAAGTAAGA CCTATCAAGGAAGTGGCGCCAGGTTTGGGAGTACAAACCTTCGACATCAAGATTCCCACCGAGTCCATGGAAGTGCA GACCGAACCTGCAAAACCCACAACCACCTCAATTGAGGTGCAAACGGAACCCTGGATGCCCGCGCCCGTTGCCGCCC CCAGCACCACTCGAAGATCACGACGAAAGTACGGCCCAGCAAGTCTGCTAATGCCCAACTATGCTCTGCACCCATCC ATCATTCCCACTCCGGGTTACAGAGGCACTCGCTACTATCGAAACCGGAGCAACACCTCTCGCCGCCGCAAACCACC TGCAAGTCGCACTCGCCGTCGCCGCCGCCGCAACACTGCCAGCAAATTGACTCCCGCCGCCCTGGTGCGGAGAGTGT ACCGCGATGGTCGCGCTGAACCTCTGACGCTGCCGCGCGCGCGCTACCATCCAAGCATCACCACTTAATGACTGTTG ACGCTGCCTCCTTGCAGATATGGCCCTCACTTGCCGCCTTCGCGTCCCCATTACTGGCTACCGAGGAAGAAACTCGC GCCGTAGAAGGATGTTGGGGCGAGGGATGCGCCGCCACAGACGAAGGCGCGCTATCAGCAGACGATTAGGGGGTGGC TTTTTGCCAGCTCTTATACCCATCATCGCCGCAGCGATCGGGGCGATACCAGGCATAGCTTCCGTGGCGGTTCAGGC CTCGCAGCGCCACTAACATTGGAAAAACTTATAAATAAAAAATAGAATGGACTCTGACGCTCCTGGTCCTGTGACTA TGTTTTTGTAGAGATGGAAGACATCAATTTTTCATCCCTGGCTCCGCGACACGGCACGAGGCCGTACATGGGCACCT GGAGCGACATCGGCACGAGCCAACTGAACGGGGGCGCCTTCAATTGGAGCAGTATCTGGAGCGGGCTTAAAAATTTT GGCTCGACCGTAAAAACCTATGGGAACAAAGCTTGGAACAGCAGCACAGGGCAGGCTCTGAGAAATAAGCTTAAGGA ACAAAACTTCCAACAGAAGGTGGTCGATGGGATCGCCTCTGGTATTAACGGCGTAGTGGATCTGGCCAACCAGGCTG TACAAAAACAGATAAACAGCCGCCTGGACCCGCCGCCCGCAACCCCTGGTGAAATGGAAGTGGAGGAAGAACTTCCT CCGCTGGAAAAGCGGGGCGACAAGCGTCCGCGACCCGAGCTAGAGCACACGCTGGTGACGCGCGCAGACGAGCCCCC TTCATACGAGGAGGCAGTAAAGCTCGGAATGCCCACTACCAGGCCCGTAGCTCACATGGCTACCGGGGTGATGAAAC CTTCTGAGTTACATCGACCCGCCACCTTGGACTTGCCTCCTCCCCCTGCTTCTGCGGCGCCTGTTCCCAAACCTGTC GCTACCAGAAAGCCCACCGCCGTACAGCCCGTTGCCGTAGCCAGACCGCGTCCTGGGGGCACACCGCGCCCGAAAGC AAACTGGCAAAGTACTCTGAACAGCATCGTGGGTCTGGGCGTGCAGAGTGTAAAGCGCCGTCGCTGCTATTAATTAA ATATGGAGTAGCGCTTAACTTGCTTGTCTGTGTGTATGTATCATCACCACGCCGCCGCAGCAGAGGAGAAAGGAAGA GGTCGCGCGCCGAGGCTGAGTTGCTTTCAAGATGGCCACCCCATCGATGATGCCCCAATGGGCATACATGCACATCG CCGGACAGGATGCTTCGGAGTACCTGAGTCCGGGTCTGGTGCAGTTCGCCCGTGCAACAGACACCTACTTCAGTATG GGGAACAAGTTTAGAAACCCCACAGTGGCGCCCACCCACGATGTGACCACCGACCGTAGCCAGCGACTGATGCTGCG CTTCGTGCCCGTTGACCGGGAGGACAATACATACTCTTACAAAGTGCGGTACACCCTCGCCGTGGGCGACAACAGAG TGCTTGACATGGCCAGCACATTCTTTGACATTAGGGGGGTGCTTGATAGAGGTCCTAGCTTCAAGCCATATTCCGGC ACAGCTTACAATTCACTGGCTCCTAAGGGCGCGCCTAACACATCTCAGTGGATAGTTACAACGGGAGAAGACAATGC CACCACATACACATTTGGCATTGCTTCCACGAAGGGAGACAATATTACTAAGGAAGGTTTAGAAATTGGGAAAGACA TTACTGCAGACAACAAGCCCATTTATGCCGATAAAACATATCAGCCAGAGCCTCAAGTTGGAGAAGAATCATGGACT GATATTGATGGAACAAATGAAAAATTTGGAGGTAGAGCTCTTAAACCAGCTACTAAAATGAAGCCATGCTACGGGTC TTTTGCAAGACCTACAAACATAAAAGGGGGCCAAGCTAAAAACAGAAAAGTAACACCAACCGAAGGAGATGTTGAAG CTGAGGAGCCAGATATTGATATGGAATTTTTCGATGGTAGAGAAGCTGCTGACGCTTTTTCGCCTGAAATTGTGCTT TACACGGAAAATGTCAATTTGGAAACTCCAGACAGCCATGTGGTATACAAGCCAGGAACTTCTGATGGTAACTCTCA TGCAAATTTGGGTCAACAAGCCATGCCTAACAGACCCAATTACATTGGCTTCAGGGATAACTTTGTAGGTCTTATGT ACTACAACAGTACTGGAAATATGGGAGTTTTGGCCGGCCAAGCATCACAACTGAATGCAGTGGTTGACTTGCAGGAC AGAAACACTGAACTGTCATATCAGCTTTTGCTTGATTCTCTGGGAGACAGAAGCAGATACTTCAGCATGTGGAATCA GGCTGTGGACAGCTATGATCCCGATGTTCGTATTATTGAAAATCATGGCGTCGAGGATGAACTGCCTAATTACTGTT TTCCTCTGGATGGCATAGGACCAGGGAACAAATATCAAGGCATTAAACCTAGAGACACTGCATGGGAAAAAGATACT AAAGTTTCTACAGCTAATGAAATAGCCATAGGCAACAATCTGGCTATGGAAATTAATATCCAAGCTAATCTTTGGAG AAGTTTTCTGTACTCCAATGTGGCTTTGTACCTTCCAGATGTTTACAAGTACACGCCAACTAACATTACTCTGCCCG CTAACACCAACACCTATGAGTACATGAACGGGCGAGTGGTTTCCCCATCTCTGGTCGATTCATACATCAACATTGGC GCCAGGTGGTCTCTTGACCCAATGGACAATGTGAATCCATTTAACCACCACCGCAATGCTGGCCTACGCTACCGGTC CATGCTTCTGGGCAATGGCCGTTATGTGCCTTTCCACATACAAGTGCCTCAAAAATTCTTTGCTGTCAAGAACCTAC TTCTTCTACCTGGCTCCTACACCTATGAGTGGAACTTCAGAAAGGATGTGAACATGGTCCTGCAAAGTTCCCTTGGA AATGACCTCAGAACAGATGGTGCTAACATAAGTTTCACCAGCATCAACCTCTATGCCACCTTCTTCCCCATGGCTCA CAACACCGCTTCAACTCTTGAAGCCATGCTGCGCAACGATACCAATGATCAGTCATTCAACGACTACCTCTCTGCAG CTAACATGCTTTACCCCATCCCTGCCAATGCAACCAACATTCCAATTTCCATCCCATCTCGCAACTGGGCAGCCTTC AGGGGCTGGTCCTTCACCAGACTCAAAACCAAGGAGACTCCATCTCTTGGATCAGGGTTCGATCCCTACTTCGTTTA TTCTGGATCTATTCCCTACCTGGATGGCACTTTTTACCTTAACCACACTTTCAAGAAGGTCTCCATCATGTTTGACT CCTCAGTCAGCTGGCCTGGCAATGACAGGCTGTTGTCTCCAAATGAGTTTGAAATCAAGCGCACTGTGGATGGGGAA GGATACAATGTGGCCCAATGCAACATGACCAAAGACTGGTTCCTGGTTCAGATGCTTGCCAACTACAACATTGGCTA CCAGGGCTTTTACATCCCTGAGGGATACAAGGATCGCATGTACTCCTTTTTCAGAAACTTCCAGCCTATGAGCAGGC AGGTGGTTGATGAGGTTAATTACACTGACTACAAAGCCGTCACCTTACCATATCAACACAACAACTCTGGCTTTGTA GGATACCTTGCGCCTACTATGAGACAAGGGGAACCTTACCCAGCCAATTATCCATACCCGCTCATCGGAACTACTGC CGTTAAAAGTGTTACCCAAAAAAAGTTCCTGTGCGACAGGACCATGTGGCGCATACCGTTCTCCAGCAACTTCATGT CCATGGGAGCCCTTACGGACCTGGGACAGAACCTGCTCTATGCCAACTCGGCCCATGCGCTGGACATGACTTTTGAG GTGGATCCCATGGATGAGCCCACCCTGCTTTATCTTCTTTTCGAAGTCTTCGACGTGGTCAGAGTGCACCAGCCACA CCGCGGCGTCATCGAGGCCGTCTACCTGCGCACACCGTTCTCGGCCGGCAACGCCACCACATAAGAAGCCTCTTGCT TCTTGCAAGCAGCAGCTGCAGCCATGTCATGCGGGTCCGGAAACGGCTCCAGCGAGCAAGAGCTCAAAGCCATCGTC CGAGACCTGGGTTGCGGACCCTATTTCCTGGGAACCTTTGACAAGCGTTTCCCGGGGTTCATGGCCCCCGACAAGCT CGCCTGCGCCATAGTCAACACTGCCGGACGCGAGACGGGGGGAGAGCACTGGCTGGCTTTTGGTTGGAACCCGCGCT CCAACACCTGCTACCTTTTTGATCCTTTTGGGTTCTCGGATGAGCGACTCAAACAGATTTACCAGTTTGAGTACGAG GGGCTCCTGCGCCGCAGTGCCCTTGCTACCAAAGACCGCTGCATCACCCTGGAAAAGTCCACCCAGAGCGTGCAGGG CCCACGCTCAGCCGCCTGTGGACTTTTTTGCTGTATGTTCCTTCATGCCTTTGTGCACTGGCCCGACCGCCCCATGA ACGGAAACCCCACCATGAAGTTGCTGACTGGGGTGCCCAACAGCATGCTCCAATCTCCCCAAGTGCAGCCCACCCTG CGCCGCAACCAGGAGGCGCTATATCGCTTCCTAAACACCCACTCATCTTACTTTCGTTCTCACCGCGCACGCATCGA AAGGGCCACCGCGTTTGACCGTATGGATATGCAATAAGTCATGTAAAACCGTGTTCAATAAAAAGCACTTTATTTTT ACATGCACTAAGGCTCTCGTTTTTTACTCATTCGTTTTCATTATTCACTCAGAAATCAAATGGGTTCTGGCGGGAGT CAAAGTGACCCGCGGGCAGGGATACGTTGCGGAACTGTAACCTGTTCTGCCACTTGAACTCGGGGATCACCAACTTG GGAACTGGAATCTCGGGAAAGGTGTCTTGCCACAACTTTCTGGTCAGCTGCAGGGCGCCAAGTAGGTCAGGAGCAGA GATCTTGAAATCACAGTTGGGACCGGCATTCTGGACACGGGAGTTGCGGTACACTGGGTTGCAACACTGGAACACCA TCAAGGCTGGGTGTCTCACGCTTGCCAGCACGGTCGGGTCACTGATGGTAGTCACATCCAAGTCTTCAGCATTGGCC ATCCCAAAGGGGGTCATCTTACAGGTCTGCCTGCCCATCACGGGAGCGCAGCCTGGCTTGTGGTTGCAATCGCAATG AATGGGGATCAGCATCATCCTGGCTTGGTCGGGGGTTATCCCTGGGTACACGGCCTTCATGAAGGCTTCGTACTGCT TGAAAGCTTCCTGAGCCTTACTTCCCTCGGTATAGAACATCCCACAGGACTTGCTGGAAAATTGATTAGTAGCACAG TTGGCATCATTTACACAGCAGCGGGCATCGTTGTTGGCCAACTGGACCACATTTCTGCCCCAGCGGTTCTGGGTGAT CTTGGCTCTGTCTGGGTTCTCCTTCATAGCGCGCTGTCCGTTCTCGCTCGCCACATCCATCTCGATAATGTGGTCCT TCTGAATCATGATAGTGCCATGCAGGCATTTCACCTTGCCTTCATAATCGGTGCATCCATGAGCCCACAGAGCGCAC CCGGTGCACTCCCAACTATTGTGGGCGATCTCAGAATAAGAATGTACCAATCCCTGCATGAATCTTCCCATCATCGC TGTCAGGGTCTTCATGCTACTAAATGTCAGCGGGATGCCACGGTGCTCCTCGTTCACATACTGGTGGCAGATACGCT TGTACTGCTCGTGCTGCTCTGGCATCAGCTTGAAAGAGGTTCTCAGGTCATTATCCAGCCTGTACCTCTCCATTAGC ACAGCCATCACTTCCATGCCCTTCTCCCAGGCAGATACCAGGGGCAAGCTCAAAGGATTCCTAACAGCAATAGAAGT AGCTCCTTTAGCTATAGGGTCATTCTTGTCGATCTTCTCAACACTTCTCTTGCCATCCTTCTCAATGATGCGCACCG GGGGGTAGCTGAAGCCCACGGCCACCAACTGAGCCTGTTCTCTTTCTTCTTCGCTGTCGTGGCCGATGTCTTGCAGA GGGACATGCTTGGTCTTTCTGGGCTTCTTCTTGGGAGGGATCGGGGGAGGACTGTTGCTCCGTTCCGGAGACAGGGA TGACCGCGAAGTTTCGCTTACCAGTACCACCTGGCTCTCGATAGAAGAATCGGACCCCACGCGACGGTAGGTGTTCC TCTTCGGGGGCAGAGGTGGAGGCGACTGAGATGGGCTGCGGTCTGGCCTTGGAAGCGGATGGCTGGCAGAGCCCATT CCGCGTTCGGGGGTGTGCTCCCGTTGGCGGTCGCTTGACTGATTTCCTCCGCGGCTGGCCATTGTGTTCTCCTAGGC AGAGAAACAACAGACATGGAAACTCAGCCATCACTGCCAACATCGCTGCAAGCGCCATCACACCTCGCCCCCAGCAG CGACGAGGAGGAGAGCTTAACCACCCCACCACCCAGTCCAGCTACCACCACCTCTACCCTCGATGATGAGGAGGAGG AGGTCGACGCAGCCCAGGAGATGCAGGCGCAGGATAATGTGAAAGCGGAAGAGATTGAGGCAGATGTCGAGCAGGAC CCGGGCTATGTGACACCGGCGGAGCACGAGGAGGAGCTGAAACGTTTTATAGACAGAGAGGATGACGACCGCCCAGA GCATCAAGCAGATGGCGATCACCAGGAGGCTGGCATCGGGGATCAAGTTGCCGACTACCTCACCGGGCTTGGGGGGG AAGACGTGCTCCTCAAACATCTAGCAAGGCAGTCGAACATAGTTAAAGACGCACTACTCGACCTCACCGAAGTGCCC ATCAGTGTGGAAGAGCTTAGCCGCGCCTACGAGCTGAACCTCTTTTCGCCTCACATACCCCCCAAGCGGCAGCCAAA CGGCACCTGCGAGGCCAACCCTCGACTGAACTTCTATCCAGCTTTTACTGTCCCCGAAGTGCTGGCCACCTACCACA TCTTTTTTAAGAACCAAAAGATTCCAGTCTCCTGCCGCGCCAACCGCACCCGCGCCGATGCCCTTCTCAACTTGGGT CCGGGAGCTCGCTTACCTGATATAGCTTCCTTGGAAGAGGTTCCAAAAATCTTTGAGGGTCTGGGAAGTGATGAGAC TCGGGCCGCAAATGCTCTGCAACAGGGAGAGAATGGCATGGATGAACATCACAGCGCTTTAGTGGAACTGGAGGGTG ACAATGCCCGGCTTGCAGTGCTCAAGCGCAGTATCGTGGTCACCCATTTTGCCTACCCCGCTGTTAACCTGCCCCCC AAAGTTATGAGCGCTGTTATGGACCATCTGCTCATCAAACGAGCAGGTCCACTTTCAGAAAACCAGAACATGCAGGA TCCAGACGCCTCGGACGAGGGCAAGCCGGTAGTCAGTGACGAGCAGCTATCTCGCTGGCTGGGTACCAACTCCCCCC GAGATTTGGAAGAGAGGCGCAAGCTTATGATGGCTGTAGTGCTAGTAACTGTGGAGCTGGAGTGTTTGCGCCGCTTT TTCACCGACCCCGAGACCCTGCGCAAGCTAGAGGAGAACCTGCACTACACCTTTAGACATGGCTTCGTGCGGCAGGC ATGCAAGATCTCCAACGTGGAGCTTACCAACCTGGTTTCTTACATGGGCATTTTGCATGAGAACCGGCTAGGGCAGA GCGTCCTGCACACCACCCTTAAAGGGGAGGCCCGCCGTGACTACATCCGAGACTGTGTCTACCTCTACCTCTGCCAT ACCTGGCAGACTGGCATGGGTGTGTGGCAACAGTGTTTGGAAGAGCAGAACCTAAAAGAGCTGGACAAGCTCTTGCA GAGATCCCTCAAAGCCCTGTGGACAGGTTTTGATGAGCGCACCGTCGCCTCGGACCTGGCAGACATCATCTTCCCCG AGCGTCTCAGGGTTACTCTGCGAAACGGCCTGCCAGACTTTATGAGCCAGAGCATGCTTAACAACTTTCGCTCTTTC ATCCTGGAACGCTCCGGTATCCTGCCTGCCACCTGCTGTGCGCTGCCCTCCGACTTTGTGCCTCTCACCTACCGCGA GTGCCCACCGCCGCTATGGAGCCACTGCTACCTGTTCCGCCTGGCCAACTACCTCTCCTACCACTCGGATGTTATAG AGGATGTGAGCGGAGACGGTCTGCTGGAATGCCACTGCCGCTGCAATCTTTGCACACCCCACCGCTCCCTTGCCTGC AACCCCCAGTTGCTGAGCGAGACCCAGATCATCGGCACCTTCGAGTTGCAGGGTCCCAGCAGTGAAGGCGAGGGGTC TTCTCCGGGGCAGAGTCTGAAACTGACACCGGGGCTGTGGACCTCCGCCTACCTGCGCAAGTTTCATCCCGAGGATT ACCACCCCTATGAGATCAGGTTCTATGAGGACCAGTCACATCCTCCCAAAGTCGAGCTCTCAGCCTGCGTCATCACC CAGGGAGCAATTCTGGCCCAATTGCAAGCCATCCAAAAATCCCGCCAAGAATTTCTACTGAAAAAGGGAAGCGGGGT CTACCTTGACCCCCAGACCGGTGAGGAGCTCAACACAAGGTTCCCCCAGGATGTCCCATCGCCGAGGAAGCAAGAAG CTGAAGGTGCAGCTGACGCCCCCAGAGGATATGGAGGAAGACTGGGACAGTCAGGCAGAGGAGGAGATGGAAGATTG GGACAGCCAGGCAGAGGAGGTGGACAGCCTGGAGGAAGACAGTTTGGAGGAGGAAGACGAGGAGGCAGAGGAGGTGG AAGAAGCAACCGCCGCCAAACAGTTGTCATCGGCGGCGGAGACAAGCAAGTCCCCAGACAGCAGCACGGCTACCATC TCCGCTCCGGGTCGGGGGGTCCAGCGGCGGCCCAACAGTAGATGGGACGAGACCGGGCGATTCCCAAACCCGACCAC CGCTTCCAAGACCGGTAAGAAGGAGCGACAGGGATACAAGTCCTGGCGTGGACATAAAAACGCTATCATCTCCTGCT TGCATGAATGCGGGGGCAACATATCCTTCACCCGGCGATACCTGCTCTTCCACCACGGTGTGAACTTCCCCCGCAAT ATCTTGCATTACTACCGTCACCTCCACAGCCCCTACTGCAGTCAGCAAGTCCCGGCAACCCCGACAGAAAAAGACAG CAGCGACAACGGTGACCAGAAAACCAGCAGTTAGAAAATCTACAACAAGTGCAGCAGGAGGAGGACTGAGGATCACA GCGAACGAGCCAGCGCAGACCAGAGAGCTGAGGAACCGGATCTTTCCAACCCTCTATGCCATCTTCCAGCAGAGTCG GGGGCAAGAGCAGGAACTGAAAGTAAAAAACCGATCTCTGCGCTCGCTCACCAGAAGTTGTTTGTATCACAAGAGCG AAGACCAACTTCAGCGCACTCTCGAGGACGCCGAGGCTCTCTTCAACAAGTACTGCGCGCTGACTCTTAAAGAGTAG CCCTTGCCCGCGCTTATTCGAAAACGGCGGGAATCACGTCACCCTTGGCACCTGTCCTTTGCCCTAGTCATGAGTAA AGAGATTCCCACGCCTTACATGTGGAGCTATCAGCCCCAAATGGGGTTGGCAGCAGGCGCCTCCCAGGACTACTCCA CCCGCATGAATTGGCTTAGCGCCGGGCCCTCAATGATATCACGGGTTAATGATATACGAGCTTATCGAAACCAGTTA CTCCTAGAACAGTCAGCTCTCACCACCACACCCCGCCAACACCTTAATCCCCGAAATTGGCCCGCCGCCCTGGTGTA CCAGGAAACTCCCGCTCCCACCACCGTACTACTTCCTCGAGACGCCCAGGCCGAAGTTCAGATGACTAACGCAGGTG TACAGCTGGCGGGCGGTTCCGCCCTATGTCGTCACCGACCTCAACAGAGTATAAAACGCCTGGTGATCAGAGGCCGA GGTATCCAGCTCAACGACGAGTCGGTTAGCTCTTCGCTTGGTCTGCGACCAGACGGAGTCTTCCAGATCGCCGGCTG TGGGAGATCTTCCTTCACCCCTCGTCAGGCTGTACTGACTTTGGAGAGTTCGTCCTCGCAGCCCCGCTCGGGCGGCA TCGGAACTCTCCAGTTCGTGGAGGAGTTTACTCCCTCTGTCTACTTCAACCCCTTCTCCGGCTCTCCTGGCCAGTAC CCAGACGAGTTCATACCGAACTTCGACGCAATCAGCGAGTCAGTGGATGGCTATGATTGATGTCTAATGGTGGCGCG GCTGAGCTAGCTCGACTGCGACACCTAGACCACTGCCGCCGCTTTCGCTGCTTCGCCCGGGAACTCACCGAGTTCAT CTACTTCGAACTCCCCGAGGAGCACCCTCAGGGTCCGGCCCACGGAGTGCGGATTACCATCGAAGGGGGAATAGACT CTCGCCTGCATCGAATCTTCTCCCAGCGACCCGTGCTGATTGAGCGCGACCAGGGAAATACAACCATCTCCATTTAC TGCATCTGTAACCACCCCGGATTGCATGAAAGCCTTTGCTGTCTTGTTTGTGCTGAGTTTAATAAAAACTGAGTTAA GACCCTCCTACGGACTACCGCTTCTTCAATCAGGACTTTACAACACCAACCAGATCTTCCAGAAGACCCAGACCCTT CCTCCTCTGATCCAGGACTCTAACTCTACCTTACCAGCACCATCCACTACTAACCTTCCCGAAACTAACAAGCTTGG ATCTCATCTGCAACACCGCCTTTCACGAAGCCTTCTTTCTGCCAATACTACCACTCCCAAAACCGGAGGTGAGCTCC GCGGTCTCCCTACTGACGACCCCTGGGTGGTAGCGGGTTTTGTAACGTTAGGAGTAGTTGCGGGTGGGCTTGTGCTA ATCCTTTGCTACCTATACATACCTTGCTGTGCATATTTAGTCATATTGCGCTGTTGGTTTAAAAAATGGGGGCCATA TTAGTCGTGCTTGCTTTACTTTCGCTTTTGGGTCTGGGCTCTGCTAATCTCAATCCTCTTGATCACGATCCATGTCT AGACTTCGACCCAGAAAACTGCACACTTACTTTTGCACCCGACACAAGCCGTCTCTGTGGAGTTCTTATTAAGTGCG GATGGGACTGCAGGTCCGTTGAAATTACACATAATAATAAAACATGGAACAATACCTTATCCACCACATGGGAGCCA GGAGTTCCCGAGTGGTATACTGTCTCTGTCCGAGGTCCTGACGGTTCCATCCGCATTAGTAACAACACTTTTATTTT TTCTGAAATGTGCGATCTGGCCATGTTCATGAGCAGACAGTATGACCTATGGCCTCCCAGCAAAGAGAACATTGTGG CATTTTCCATTGCTTATTGCTTGGTAACATGCATCATCACTGCTATCATTTGTGTGTGCATACACTTGCTTATAGTT ATTCGCCCTAGACAAAGCAATAAGGAAAAAGAGAAAATGCCTTAACCTTTTTACTCATACCTTTTCTTTACAGCATG GCTTTTGTTACAGCTCTAATTATTGCCAACATTGTCACTGTCGCTCACGGGCAAACAATTATCCATATTACCTTAGG ACATAATCACACCCTTGTAGGGCCCCCAATTACTTCAGAGGTTATTTGGACCAAACTTGGAAGTGTTGATTATTTTG ATATAATTTGCAACAAAACTAAACCAATATTTGTAATCTGTAACAGACAAAATCTCACGTTAATTAATGTTAGCAAA ATTTATAACGGTTACTATTATGGTTATGACAGATCCAGTAGTCAATATAAAAATTACTTAGTTCGCATAACTCAGCC CAAATTAACAGTGCCCACTATGACAATAATTAAAATGGCTAATAAAGCATTAGAAAATTTTACATCACCAACAACGC CCAATGAAAAAAACATTCCAAATTCAATGATTGCAATTATTGCGGCGGTGGCATTGGGAATGGCACTAATAATAATA TGCATGTTCCTATATGCTTGTTGCTATAAAAAGTTTCAACATAAACAGGATCCACTACTAAATTTTAACATTTAATT TTTTATACAGATGTTTTCCACTACAATTTTTATCATTACTAGCCTTGCAGCTGTAACTTATGGCCGTTCACACCTAA CTCTACCTGTTGGCTCAACATGTACACTACAAGGACCCCAACAAGGCTATGTCACTTGGTGGAGAATATATGATAAT GGAGGGTTCGCTAGACCATGTGATCAGCCTGGTACAAAATTTTCATGCAACGGAAGAGACTTGACCATAATTAACAT AACATCAAATGAGCAAGGCTTCTATTATGGAACCAACTATAAAGATAGTTTAGATTACAACATTATTGTAGTGCCAG CCACCACTTCTGCTCCCCGCAAAACCACTTTCTCTAGCAGCAGTGCCAAAGCAAGCACAATTCCTAAAACAGCTTCT GCTATGTTAAAGCTTCAAAAAATCGCTTTAAATAATTCCACAGCCGCTCCCAATACAATTCCTAAATCAACAATTGG CATCATTACTGCCGTGGTAGTGGGATTAATTATTATATTTTTGTGCATAATGTACTATGCCTGCTGCTATAGAAAAC ATGAACAAAAAGGTGATGCATTACTAAATTTTGACATTTAATTTTTTATAGAATTATGATATTGTTTCAATCAAATA CCACTAACACTATCAATGTGCAGACTACTTTAAATCATGACATGGAAAACCACACTACCTCCTATGCATACACAAAC ATTCAGCCTAAATACGCTATGCAATAGAAATTCTAAAAGACGTCCCATCTATTCTCCTATGATTAGTCGTCCCCATA TGGCTTTGAATGAAATCTAAGATCTTTTTTTTTTTTCTCTTACAGTATGGTGAACACCAATCATGATCCCTAGAAAT TTCTTCTTCACCATACTCATCTGTGCTTTCAATGTCTGTGCTACTTTCACAGCAGTAGCCACTGCAAGCCCAGACTG TATAGGACCATTTGCTTCCTATGCACTTTTTGCCTTCGTTACTTGCATCTGCGTGTGTAGCATAGTCTGCCTGGTTA TTAATTTTTTCCAACTGGTAGACTGGATCTTTGTACGAATTGCCTACCTACGTCACCATCCCGAATACCGCAATCAA AATGTTGCGGCACTTCTTAGGCTTATTTAAAACCATGCAGGCTATGCTACCAGTCATTTTAATTCTGCTACTACCCT GCATTGCCCTAGCTTCCACCGCCACTCGCGCTACACCTGAACAACTTAGAAAATGCAAATTTCAACAACCATGGTCA TTTCTTGATTGCTACCATGAAAAATCTGATTTCCCCACATACTGGATAGTGATTGTTGGAATAATTAACATACTTTC ATGTACCTTTTTCTCAATCACAATATACCCCACATTTAATTTTGGGTGGAATTCTCCCAATGCACTGGGTTACCCAC AAGAACCAGATGAACATATCCCACTACAACACATACAACAACCACTAGCACTGGTAGAGTATGAAAATGAGCCACAA CCTTCACTACCTCCTGCCATTAGTTACTTCAACCTAACCGGCGGAGATGACTGAAATACTCACCACCTCCAATTCCG CCGAGGATCTGCTTGATATGGACGGCCGCGTCTCAGAACAGCGACTCGCCCAACTACGCATCCGCCAGCAGCAGGAA CGCGTGACCAAAGAGCTCAGAGATGTCATCCAAATTCACCAATGCAAAAAAGGCATATTTTGCTTGGTAAAACAAGC CAAGATATCCTACGAGATCACCGCTACTGACCATCGCCTCTCTTACGAACTTGGCCCCCAACGACAAAAATTTACAT GCATGGTGGGAATCACCCCTATAGTTATCACTCAGCAAAGTGGAGATACTAAGGGGTGCATTCACTGCTCTTGCGAT TCCATCGAGTGCACCTACACCCTGCTAAAGACCCTATGCGGCCTAAGAGACCTGCTACCCATGAATTAAAAATTAAT AAAAAATCACTTACTTGAAATCAGCAATAAGGTCTCTGTTGAAATTTTCTCCCAGCAGCACCTCACTTCCCTCTTCC CAACTCTGGTATTCTAAACCCCGTTCAGCGGCATACTTTCTCCATACTTTAAAGGGGATGTCAAATTTTAACTCCTG TCCTGTACCCACAATCTTCATGTCTTTCTTCCCAGATGACCAAGAGAGTCCGGCTCAGTGATTCCTTCAACCCTGTC TACCCCTATGAAGATGAAAGCACCTCCCAACACCCCTTTATAAACCCAGGGTTTATTTCCCCAAATGGCTTTACACA AAGCCCAGACGGAGTTCTTACTTTAAAATGTTTAACCCCACTAACAACCACAGGCGGGTCTCTACAGTTAAAAGTGG GAGGGGGTCTTACAATAGATGACACCGACGGTTTTTTGAAAGAAAACATAAGTGCCACCACACCACTCGTTAAGACT GGTCACTCTATAGGTTTGTCGCTAGGACCCGGATTAGGAACAAATGAAAACAAACTTTGTGCCAAATTGGGAGAAGG ACTTACATTCAATTCCAACAACATTTGCATTAATGACAATATTAACACCCTATGGACAGGAGTTAACCCCACCAGAG CCAACTGTCAAATAATGGCCTCCAGTGAATCTAATGATTGCAAATTAATTCTAACACTAGTTAAAACTGGAGCCCTC GTCACTGCATTTGTTTATGTTATAGGAGTATCTAACGATTTTAATATGCTAACTACACATAAAAATATAAATTTCAC TGCAGAGCTGTTTTTTGATTCTACTGGTAATTTATTAACTAGCCTTTCATCCCTAAAAACTCCACTTAATCATAAAT CAGGGCAAAACATGGCTACTGGTGCCCTTACTAATGCTAAAGGTTTCATGCCCAGCACAACTGCCTATCCTTTCAAT GTTAATTCCAGAGAAAAAGAAAACTACATTTACGGAACTTGTTACTACACAGCTAGTGATCACACTGCTTTTCCCAT TGACATATCTGTCATGCTTAACCAAAGAGCATTAAATAATGAGACATCATATTGTATTCGTGTAACTTGGTCCTGGA ATACAGGAGTTGCCCCAGAAGTGCAAACCTCTGCTACTACCCTAGTCACCTCTCCATTTACCTTTTACTACATTAGA GAAGACGACTGACAAATAAAGTTTAACTTGTTTATTTAAAATCAATTCATAAAATTCGAGTAGTTATTTTGCCTCCC CCTTCCCATTTAACAGAATACACCAATCTCTCCCCACGCACAGCTTTAAACATTTGGATACCATTACAGATAGACAT AGTTTTAGATTCCACATTCCAAACAGTTTCAAAGCGAGCCAATCTGGGGTCAGTGATACATAAAAATGCATCGGGAT AGTCTTTTAAAGCGCTTTCACAGTCCAACTGCTGCGGATGCGACTCCGGAGTCTGGATCACGGTCATCTGGAAGAAG AACGATGGGAATCATAATCCGAAAACGGAATCGGGCGATTGTGTCTCATCAAACCCACAAGCAGCCGCTGTCTGCGT CGCTCCGTGCGACTGCTGTTTATAGGATCGGGATCCACAGTGTCCTGAAGCATGATTTTAATAGCCCTTAACATTAA CTTTCTGGTGCGGTGCGCGCAGCAACGCATTCTGATTTCACTTAGATTACTACAGTAGGTACAGCACATTATCACAA TATTGTTTAATAAACCATAATTAAAAGCGCTCCAGCCAAAACTCATATCAGATATAATCGCCCCTGCATGACCATCA TACCAAATTTTAATATAAATTAAATGTCGTTCCCTCAAAAACACACTACCCACATACATAATCTCTTTTGGCATGTG CATATTAACAATCTGTCTGTACCATGGACAACGTTGGTTAATCATGCAACCCAATATAACCTTCCGAAACCACACTG CCAACACCGCTCCCCCAGCCATGCATTGAAGTGAACCCTGCCGATTACAATGACAATGAAGAACCCAATTCTCTCGA CCATGAATCACTTGAGAATAAAAAATATCTATAGTAGCACAACAAAGACATAAATGCATGCATCTTCTCATAATTCT TAACTCCTCGGGATTTAGAAACATATCCCAAGGAATGGGAAACTCTTGCAGAACAGTAAAGCTGGCAGAACAAGGAA GACCACGAACACAACTTACACTATGCATAGTCATAGTATCACAATCTGGCAACAGCGGGTGGTCTTCAGTCATAGAA GCTCGGGTTTCATTTTCCTCACATCGTGGTAACTGGGCTCTGGTGTAAGGGTGATGTCTGGCGCATGATGTCGAGCG TGCGCGCAACCTTGTCATAATGGAGTTGCTTCCTGACATTCTCGTATTTTGTATAGCAAAACGCGGCCCTGGCACAA CACACTCTTCTTCGTCTTCTATCCTGCCGCTTAGTGTGTTCCGTCTGATAATTCAAGTACAGCCACACTCTTAAGTT GGTCAAAAGAATGCTGGCTTCAGTTGTAATCAAAACTCCATCATATTTAATTGTTCTAAGGAAATCATCCACGGTAG CATATGCAAATCCCAACCAAGCAATGCAACTGGATTGCGTTTCAAGCAGCAGAGGAGAGGGAAGAGACGGAAGAATC ATGTTAATTTTTATTCCAAACGATCTCGCAGTACTTCAAATTGTAGATCGCGCAGATGGCATCTATCGCCCCCACTG TGTTGGTGAAAAAGCACAGCTAAATCAAAAGAAATGCGATTTTCAAGGTGCTCAACGGTGGCTTCCAACAAAGCCTC CACGCGCACATCCAAAAACAAAAGAATACCAAAAGAAGGAGCATTTTCTAACTCCTCAAACATCATATTACATTCCT GCACCATTCCCAGATAATTTTCAGCTTTCCAGCCTTGAATTATTCGTGTCAGTTCTTGTGGTAAATCCAAACCACAC ATTACAAACAGGTCCCGGAGGGCGCCCTCCACCACCATTCTTAAACACACCCTCATAATGTCAAAATATCTTGCTCC TGTGTCACCTGTAGCAAATTAAGAATGGCATCATCAATTGACATGCCCTTGGCTCTAAGTTCTTCTCTAAGTTCTAG TTGTAAATACTCTTTCATATTATCACCAAACTGCTTAGCCAGAAGCCCCCCGGGAACAATAGCAGGGGACGCTACAG TGCAGTACAAGCGCAGACCTCCCCAATTGGCTCCAGCAAAAACAAGATTAGAATAAGCATACTGGGAACCACCAGTA ATATCATCAAAGTTGCTGGAAATATAATCAGGCAGAGTTTCTTGTAAAAATTGAATAAAAGAAAAATTTTCCAAAGA AACATTCAAAACCTCTGGGATGCAAATGCAATAGGTTACCGCGCTGCGCTCCAACATTATTAGTTTTGAATTAGTCT GTAAAATAAAAGAAACAAGCGTCATATCATAGTAGCCTGTCGAACAGGTGGATAAATCAGTCTTTCCATTACAAGAC AAGCCACAGGGTCTCCAGCTCGACCCTCGTAAAACCTGTCATCGTGATTAAACAACAGCACCGAAAGTTCCTCGCGG TGGCCAGCATGAATAATTCTTGATGAAGCATATAATCCAGACATGTTAGCATCAGTTAAAGAAAAAAAACAGCCAAC ATAGCCTCTGGGTATAATTATGCTTAATCTTAAGTATAGCAAAGCCACCCCTCGCGGATACAAAGTAAAAGGCACAG GAGAATAAAAAATATAATTATTTCTCTGCTGCTGTTCAGGCAACGTTGCCCCCGGTCCCTCTAAATACACATACAAA GCCTCATCAGCCATGGCTTACCAGACAAAGTATAGCGGGCGCACAAAGCACAAGCTCTAAAGAAGCTCTAAAGACGC TCTCCAACCTCTCCACAATATATACACAAGCCCTAAACTGACGTAATGGGAGTAAAGTGTAAAAAATCCCGCCAAGC CCAACACACACCCCGAAACTGCGTCAGCAGGGAAAAGTACAGTTTCACTTCCGCAAACCCAACAAGCGTAGCTTCCT CTTTCTCACGGTACGTCACATCCGATTAACTTGCAACGTCATTTTCCCACGGCCGCCCCGCCCATTTTAGCCGTTAA CCCCACAGCCAATCACCACACAGCGCGCACTTTTTTAAATTACCTCATTTACATATTGGCACCATTCCATCTATAAG GTATATTATATAGAGAG

[0606] GenBank Accession No. AP_000564 MTKRVRLSDSFNPVYPYEDESTSQHPFINPGFISPNGFTQSPDGVLTLKCLTPLTTTGGSLQLKVGGGLTIDDTDGF LKENISATTPLVKTGHSIGLSLGPGLGTNENKLCAKLGEGLTFNSNNICINDNINTLWTGVNPTRANCQIMASSESN DCKLILTLVKTGALVTAFVYVIGVSNDENMLTTHKNINFTAELFFDSTGNLLTSLSSLKTPLNHKSGONMATGALTN AKGFMPSTTAYPFNVNSREKENYIYGTCYYTASDHTAFPIDISVMLNQRALNNETSYCIRVTWSWNTGVAPEVQTSA TTLVTSPFTFYYIREDD

[0607] GenBank Accession No. AP_000543 MRRRAVLGGAVVYPEGPPPSYESVMQQQAAMIQPPLEVPFVPPRYLAPTEGRNSIRYSELSPLYDTTKLYLVDNKSA DIASLNYQNDHSNFLTTVVONNDFTPTEASTQTINFDERSRWGGHLKTIMHTNMPNVNEYMFSNKFKARVMVSRKAP EGVTVNDTYDHKEDILKYEWFEFILPEGNFSATMTIDLMNNAIIDNYLEIGRONGVLESDIGVKFDTRNFRLGWDPE TKLIMPGVYTYEAFHPDIVLLPGCGVDFTESRLSNLLGIRKRHPFQEGFKIMYEDLEGGNIPALLDVTAYEESKKDT TTETTTLAVAEETSEDDNITRGDTYITEKHKREAAAAEVKKELKIQPLEKDSKSRSYNVLEDKINTAYRSWYLSYNY GNPKKGIRSWTLLTTSDVTCGAEQVYWSLPDMMQDPVTFRSTRQVNNYPVVGAELMPVFSKSFYNEQAVYSQQLRQA TSLTHVENREPENQILIRPPAPTITTVSENVPALTDHGTLPLRSSIRGVQRVTVTDARRRTCPYVYKALGIVAPRVL SSRTF

[0608] GenBank Accession No. AP_000548 MATPSMMPQWAYMHIAGODASEYLSPGLVQFARATDTYFSMGNKERNPTVAPTHDVTTDRSQRLMLRFVPVDREDNT YSYKVRYTLAVGDNRVLDMASTFFDIRGVLDRGPSFKPYSGTAYNSLAPKGAPNTSQWIVTTGEDNATTYTFGIAST KGDNITKEGLEIGKDITADNKPIYADKTYQPEPQVGEESWTDIDGTNEKFGGRALKPATKMKPCYGSFARPTNIKGG QAKNRKVTPTEGDVEAEEPDIDMEFFDGREAADAFSPEIVLYTENVNLETPDSHVVYKPGTSDGNSHANLGQQAMPN RPNYIGFRDNFVGLMYYNSTGNMGVLAGQASQLNAVVDLQDRNTELSYQLLLDSLGDRSRYFSMWNQAVDSYDPDVR IIENHGVEDELPNYCFPLDGIGPGNKYQGIKPRDTAWEKDTKVSTANEIAIGNNLAMEINIQANLWRSFLYSNVALY LPDVYKYTPTNITLPANTNTYEYMNGRVVSPSLVDSYINIGARWSLDPMDNVNPFNHHRNAGLRYRSMLLGNGRYVP FHIQVPQKFFAVKNLLLLPGSYTYEWNFRKDVNMVLQSSLGNDLRTDGANISFTSINLYATFFPMAHNTASTLEAML RNDTNDQSFNDYLSAANMLYPIPANATNIPISIPSRNWAAFRGWSFTRLKTKETPSLGSGFDPYFVYSGSIPYLDGT FYLNHTFKKVSIMFDSSVSWPGNDRLLSPNEFEIKRTVDGEGYNVAQCNMTKDWFLVOMLANYNIGYOGFYIPEGYK DRMYSFFRNFQPMSRQVVDEVNYTDYKAVTLPYQHNNSGFVGYLAPTMRQGEPYPANYPYPLIGTTAVKSVTOKKFL CDRTMWRIPFSSNFMSMGALTDLGQNLLYANSAHALDMTFEVDPMDEPTLLYLLFEVFDVVRVHQPHRGVIEAVYLR TPFSAGNATT

[0609] GenBank Accession No. NC_011202 (SEQ ID NO: 211) CATCATCAATAATATACCTTATAGATGGAATGGTGCCAATATGTAAATGAGGTGATTTTAAAAAGTGTGGATCGTGT GGTGATTGGCTGTGGGGTTAACGGCTAAAAGGGGCGGTGCGACCGTGGGAAAATGACGTTTTGTGGGGGTGGAGTTT TTTTGCAAGTTGTCGCGGGAAATGTGACGCATAAAAAGGCTTTTTTCTCACGGAACTACTTAGTTTTCCCACGGTAT TTAACAGGAAATGAGGTAGTTTTGACCGGATGCAAGTGAAAATTGTTGATTTTCGCGCGAAAACTGAATGAGGAAGT GTTTTTCTGAATAATGTGGTATTTATGGCAGGGTGGAGTATTTGTTCAGGGCCAGGTAGACTTTGACCCATTACGTG GAGGTTTCGATTACCGTGTTTTTTACCTGAATTTCCGCGTACCGTGTCAAAGTCTTCTGTTTTTACGTAGGTGTCAG CTGATCGCTAGGGTATTTATACCTCAGGGTTTGTGTCAAGAGGCCACTCTTGAGTGCCAGCGAGAAGAGTTTTCTCC TCTGCGCCGGCAGTTTAATAATAAAAAAATGAGAGATTTGCGATTTCTGCCTCAGGAAATAATCTCTGCTGAGACTG GAAATGAAATATTGGAGCTTGTGGTGCACGCCCTGATGGGAGACGATCCGGAGCCACCTGTGCAGCTTTTTGAGCCT CCTACGCTTCAGGAACTGTATGATTTAGAGGTAGAGGGATCGGAGGATTCTAATGAGGAAGCTGTAAATGGCTTTTT TACCGATTCTATGCTTTTAGCTGCTAATGAAGGGTTAGAATTAGATCCGCCTTTGGACACTTTTGATACTCCAGGGG TAATTGTGGAAAGCGGTACAGGTGTAAGAAAATTACCTGATTTGAGTTCCGTGGACTGTGATTTGCACTGCTATGAA GACGGGTTTCCTCCGAGTGATGAGGAGGACCATGAAAAGGAGCAGTCCATGCAGACTGCAGCGGGTGAGGGAGTGAA GGCTGCCAATGTTGGTTTTCAGTTGGATTGCCCGGAGCTTCCTGGACATGGCTGTAAGTCTTGTGAATTTCACAGGA AAAATACTGGAGTAAAGGAACTGTTATGTTCGCTTTGTTATATGAGAACGCACTGCCACTTTATTTACAGTAAGTGT GTTTAAGTTAAAATTTAAAGGAATATGCTGTTTTTCACATGTATATTGAGTGTGAGTTTTGTGCTTCTTATTATAGG TCCTGTGTCTGATGCTGATGAATCACCATCTCCTGATTCTACTACCTCACCTCCTGAGATTCAAGCACCTGTTCCTG TGGACGTGCGCAAGCCCATTCCTGTGAAGCTTAAGCCTGGGAAACGTCCAGCAGTGGAAAAACTTGAGGACTTGTTA CAGGGTGGGGACGGACCTTTGGACTTGAGTACACGGAAACGTCCAAGACAATAAGTGTTCCATATCCGTGTTTACTT AAGGTGACGTCAATATTTGTGTGACAGTGCAATGTAATAAAAATATGTTAACTGTTCACTGGTTTTTATTGCTTTTT GGGCGGGGACTCAGGTATATAAGTAGAAGCAGACCTGTGTGGTTAGCTCATAGGAGCTGGCTTTCATCCATGGAGGT TTGGGCCATTTTGGAAGACCTTAGGAAGACTAGGCAACTGTTAGAGAACGCTTCGGACGGAGTCTCCGGTTTTTGGA GATTCTGGTTCGCTAGTGAATTAGCTAGGGTAGTTTTTAGGATAAAACAGGACTATAACCAAGAATTTGAAAAGTTG TTGGTAGATTGCCCAGGACTTTTTGAAGCTCTTAATTTGGGCCATCAGGTTCACTTTAAAGAAAAAGTTTTATCAGT TTTAGACTTTTCAACCCCAGGTAGAACTGCTGCTGCTGTGGCTTTTCTTACTTTTATATTAGATAAATGGATCCCGC AGACTCATTTCAGCAGGGGATACGTTTTGGATTTCATAGCCACAGCATTGTGGAGAACATGGAAGGTTCGCAAGATG AGGACAATCTTAGGTTACTGGCCAGTGCAGCCTTTGGGTGTAGCGGGAATCCTGAGGCATCCACCGGTCATGCCAGC GGTTCTGGAGGAGGAACAGCAAGAGGACAACCCGAGAGCCGGCCTGGACCCTCCAGTGGAGGAGGCGGAGTAGCTGA CTTGTCTCCTGAACTGCAACGGGTGCTTACTGGATCTACGTCCACTGGACGGGATAGGGGCGTTAAGAGGGAGAGGG CATCTAGTGGTACTGATGCTAGATCTGAGTTGGCTTTAAGTTTAATGAGTCGCAGACGTCCTGAAACCATTTGGTGG CATGAGGTTCAGAAAGAGGGAAGGGATGAAGTTTCTGTATTGCAGGAGAAATATTCACTGGAACAGGTGAAAACATG TTGGTTGGAGCCTGAGGATGATTGGGAGGTGGCCATTAAAAATTATGCCAAGATAGCTTTGAGGCCTGATAAACAGT ATAAGATTACTAGACGGATTAATATCCGGAATGCTTGTTACATATCTGGAAATGGGGCTGAGGTGGTAATAGATACT CAAGACAAGGCAGTTATTAGATGCTGCATGATGGATATGTGGCCTGGGGTAGTCGGTATGGAAGCAGTAACTTTTGT AAATGTTAAGTTTAGGGGAGATGGTTATAATGGAATAGTGTTTATGGCCAATACCAAACTTATATTGCATGGTTGTA GCTTTTTTGGTTTCAACAATACCTGTGTAGATGCCTGGGGACAGGTTAGTGTACGGGGATGTAGTTTCTATGCGTGT TGGATTGCCACAGCTGGCAGAACCAAGAGTCAATTGTCTCTGAAGAAATGCATATTTCAAAGATGTAACCTGGGCAT TCTGAATGAAGGCGAAGCAAGGGTCCGCCACTGCGCTTCTACAGATACTGGATGTTTTATTTTGATTAAGGGAAATG CCAGCGTAAAGCATAACATGATTTGCGGTGCTTCCGATGAGAGGCCTTATCAAATGCTCACTTGTGCTGGTGGGCAT TGTAATATGCTGGCTACTGTGCATATTGTTTCCCATCAACGCAAAAAATGGCCTGTTTTTGATCACAATGTGATGAC GAAGTGTACCATGCATGCAGGTGGGCGTAGAGGAATGTTTATGCCTTACCAGTGTAACATGAATCATGTGAAAGTGT TGTTGGAACCAGATGCCTTTTCCAGAATGAGCCTAACAGGAATTTTTGACATGAACATGCAAATCTGGAAGATCCTG AGGTATGATGATACGAGATCGAGGGTACGCGCATGCGAATGCGGAGGCAAGCATGCCAGGTTCCAGCCGGTGTGTGT AGATGTGACTGAAGATCTCAGACCGGATCATTTGGTTATTGCCCGCACTGGAGCAGAGTTCGGATCCAGTGGAGAAG AAACTGACTAAGGTGAGTATTGGGAAAACTTTGGGGTGGGATTTTCAGATGGACAGATTGAGTAAAAATTTGTTTTT TCTGTCTTGCAGCTGTCATGAGTGGAAACGCTTCTTTTAAGGGGGGAGTCTTCAGCCCTTATCTGACAGGGCGTCTC CCATCCTGGGCAGGAGTTCGTCAGAATGTTATGGGATCTACTGTGGATGGAAGACCCGTCCAACCCGCCAATTCTTC AACGCTGACCTATGCTACTTTAAGTTCTTCACCTTTGGACGCAGCTGCAGCTGCCGCCGCCGCTTCTGTTGCCGCTA ACACTGTGCTTGGAATGGGTTACTATGGAAGCATCATGGCTAATTCCACTTCCTCTAATAACCCTTCTACCCTGACT CAGGACAAGTTACTTGTCCTTTTGGCCCAGCTGGAGGCTTTGACCCAACGTCTGGGTGAACTTTCTCAGCAGGTGGT CGAGTTGCGAGTACAAACTGAGTCTGCTGTCGGCACGGCAAAGTCTAAATAAAAAAATCCCAGAATCAATGAATAAA TAAACAAGCTTGTTGTTGATTTAAAATCAAGTGTTTTTATTTCATTTTTCGCGCACGGTATGCCCTAGACCACCGAT CTCTATCATTGAGAACTCGGTGGATTTTTTCCAGGATCCTATAGAGGTGGGATTGAATGTTTAGATACATGGGCATT AGGCCGTCTTTGGGGTGGAGATAGCTCCATTGAAGGGATTCATGCTCCGGGGTAGTGTTGTAAATCACCCAGTCATA ACAAGGTCGCAGTGCATGGTGTTGCACAATATCTTTTAGAAGTAGGCTGATTGCCACAGATAAGCCCTTGGTGTAGG TGTTTACAAACCGGTTGAGCTGGGATGGGTGCATTCGGGGTGAAATTATGTGCATTTTGGATTGGATTTTTAAGTTG GCAATATTGCCGCCAAGATCCCGTCTTGGGTTCATGTTATGAAGGACCACCAAGACGGTGTATCCGGTACATTTAGG AAATTTATCGTGCAGCTTGGATGGAAAAGCGTGGAAAAATTTGGAGACACCCTTGTGTCCTCCAAGATTTTCCATGC ACTCATCCATGATAATAGCAATGGGGCCGTGGGCAGCGGCGCGGGCAAACACGTTCCGTGGGTCTGACACATCATAG TTATGTTCCTGAGTTAAATCATCATAAGCCATTTTAATGAATTTGGGGCGGAGAGTACCAGATTGGGGTATGAATGT TCCTTCGGGCCCCGGAGCATAGTTCCCCTCACAGATTTGCATTTCCCAAGCTTTCAGTTCCGAGGGTGGAATCATGT CCACCTGGGGGGCTATGAAAAACACCGTTTCTGGGGCGGGGGTGATTAATTGTGATGATAGCAAATTTCTGAGCAAT TGAGATTTGCCACATCCGGTGGGGCCATAAATGATTCCGATTACGGGTTGCAGGTGGTAGTTTAGGGAACGGCAACT GCCGTCTTCTCGAAGCAAGGGGGCCACCTCGTTCATCATTTCCCTTACATGCATATTTTCCCGCACCAAATCCATTA GGAGGCGCTCTCCTCCTAGTGATAGAAGTTCTTGTAGTGAGGAAAAGTTTTTCAGCGGTTTCAGACCGTCAGCCATG GGCATTTTGGAGAGAGTTTGCTGCAAAAGTTCTAGTCTGTTCCACAGTTCAGTGATGTGTTCTATGGCATCTCGATC CAGCAGACCTCCTCGTTTCGCGGGTTTGGACGGCTCCTGGAATAGGGTATGAGACGATGGGCGTCCAGCGCTGCCAG GGTTCGGTCCTTCCAGGGTCTCAGTGTTCGAGTCAGGGTTGTTTCCGTCACAGTGAAGGGGTGTGCGCCTGCTTGGG CGCTTGCCAGGGTGCGCTTCAGACTCATCCTGCTGGTCGAAAACTTCTGTCGCTTGGCGCCCTGTATGTCGGCCAAG TAGCAGTTTACCATGAGTTCGTAGTTGAGCGCCTCGGCTGCGTGGCCTTTGGCGCGGAGCTTACCTTTGGAAGTTTT CTTGCATACCGGGCAGTATAGGCATTTCAGCGCATACAACTTGGGCGCAAGGAAAACGGATTCTGGGGAGTATGCAT CTGCGCCGCAGGAGGCGCAAACAGTTTCACATTCCACCAGCCAGGTTAAATCCGGTTCATTGGGGTCAAAAACAAGT TTTCCGCCATATTTTTTGATGCGTTTCTTACCTTTGGTCTCCATGAGTTCGTGTCCTCGTTGAGTGACAAACAGGCT GTCCGTGTCCCCGTAGACTGATTTTACAGGCCTCTTCTCCAGTGGAGTGCCTCGGTCTTCTTCGTACAGGAACTCTG ACCACTCTGATACAAAGGCGCGCGTCCAGGCCAGCACAAAGGAGGCTATGTGGGAGGGGTAGCGATCGTTGTCAACC AGGGGGTCCACCTTTTCCAAAGTATGCAAACACATGTCACCCTCTTCAACATCCAGGAATGTGATTGGCTTGTAGGT GTATTTCACGTGACCTGGGGTCCCCGCTGGGGGGGTATAAAAGGGGGCGGTTCTTTGCTCTTCCTCACTGTCTTCCG GATCGCTGTCCAGGAACGTCAGCTGTTGGGGTAGGTATTCCCTCTCGAAGGCGGGCATGACCTCTGCACTCAGGTTG TCAGTTTCTAAGAACGAGGAGGATTTGATATTGACAGTGCCGGTTGAGATGCCTTTCATGAGGTTTTCGTCCATTTG GTCAGAAAACACAATTTTTTTATTGTCAAGTTTGGTGGCAAATGATCCATACAGGGCGTTGGATAAAAGTTTGGCAA TGGATCGCATGGTTTGGTTCTTTTCCTTGTCCGCGCGCTCTTTGGCGGCGATGTTGAGTTGGACATACTCGCGTGCC AGGCACTTCCATTCGGGGAAGATAGTTGTTAATTCATCTGGCACGATTCTCACTTGCCACCCTCGATTATGCAAGGT AATTAAATCCACACTGGTGGCCACCTCGCCTCGAAGGGGTTCATTGGTCCAACAGAGCCTACCTCCTTTCCTAGAAC AGAAAGGGGGAAGTGGGTCTAGCATAAGTTCATCGGGAGGGTCTGCATCCATGGTAAAGATTCCCGGAAGTAAATCC TTATCAAAATAGCTGATGGGAGTGGGGTCATCTAAGGCCATTTGCCATTCTCGAGCTGCCAGTGCGCGCTCATATGG GTTAAGGGGACTGCCCCATGGCATGGGATGGGTGAGTGCAGAGGCATACATGCCACAGATGTCATAGACGTAGATGG GATCCTCAAAGATGCCTATGTAGGTTGGATAGCATCGCCCCCCTCTGATACTTGCTCGCACATAGTCATATAGTTCA TGTGATGGCGCTAGCAGCCCCGGACCCAAGTTGGTGCGATTGGGTTTTTCTGTTCTGTAGACGATCTGGCGAAAGAT GGCGTGAGAATTGGAAGAGATGGTGGGTCTTTGAAAAATGTTGAAATGGGCATGAGGTAGACCTACAGAGTCTCTGA CAAAGTGGGCATAAGATTCTTGAAGCTTGGTTACCAGTTCGGCGGTGACAAGTACGTCTAGGGCGCAGTAGTCAAGT GTTTCTTGAATGATGTCATAACCTGGTTGGTTTTTCTTTTCCCACAGTTCGCGGTTGAGAAGGTATTCTTCGCGATC CTTCCAGTACTCTTCTAGCGGAAACCCGTCTTTGTCTGCACGGTAAGATCCTAGCATGTAGAACTGATTAACTGCCT TGTAAGGGCAGCAGCCCTTCTCTACGGGTAGAGAGTATGCTTGAGCAGCTTTTCGTAGCGAAGCGTGAGTAAGGGCA AAGGTGTCTCTGACCATGACTTTGAGAAATTGGTATTTGAAGTCGATGTCGTCACAGGCTCCCTGTTCCCAGAGTTG GAAGTCTACCCGTTTCTTGTAGGCGGGGTTGGGCAAAGCGAAAGTAACATCATTGAAGAGAATCTTACCGGCTCTGG GCATAAAATTGCGAGTGATGCGAAAAGGCTGTGGTACTTCCGCTCGATTGTTGATCACCTGGGCAGCTAGGACGATC TCGTCGAAACCGTTGATGTTGTGTCCTACGATGTATAATTCTATGAAACGCGGCGTGCCTCTGACGTGAGGTAGCTT ACTGAGCTCATCAAAGGTTAGGTCTGTGGGGTCAGATAAGGCGTAGTGTTCGAGAGCCCATTCGTGCAGGTGAGGAT TTGCATGTAGGAATGATGACCAAAGATCTACCGCCAGTGCTGTTTGTAACTGGTCCCGATACTGACGAAAATGCCGG CCAATTGCCATTTTTTCTGGAGTGACACAGTAGAAGGTTCTGGGGTCTTGTTGCCATCGATCCCACTTGAGTTTAAT GGCTAGATCGTGGGCCATGTTGACGAGACGCTCTTCTCCTGAGAGTTTCATGACCAGCATGAAAGGAACTAGTTGTT TGCCAAAGGATCCCATCCAGGTGTAAGTTTCCACATCGTAGGTCAGGAAGAGTCTTTCTGTGCGAGGATGAGAGCCG ATCGGGAAGAACTGGATTTCCTGCCACCAGTTGGAGGATTGGCTGTTGATGTGATGGAAGTAGAAGTTTCTGCGGCG CGCCGAGCATTCGTGTTTGTGCTTGTACAGACGGCCGCAGTAGTCGCAGCGTTGCACGGGTTGTATCTCGTGAATGA GTTGTACCTGGCTTCCCTTGACGAGAAATTTCAGTGGGAAGCCGAGGCCTGGCGATTGTATCTCGTGCTCTTCTATA TTCGCTGTATCGGCCTGTTCATCTTCTGTTTCGATGGTGGTCATGCTGACGAGCCCCCGCGGGAGGCAAGTCCAGAC CTCGGCGCGGGAGGGGCGGAGCTGAAGGACGAGAGCGCGCAGGCTGGAGCTGTCCAGAGTCCTGAGACGCTGCGGAC TCAGGTTAGTAGGTAGGGACAGAAGATTAACTTGCATGATCTTTTCCAGGGCGTGCGGGAGGTTCAGATGGTACTTG ATTTCCACAGGTTCGTTTGTAGAGACGTCAATGGCTTGCAGGGTTCCGTGTCCTTTGGGCGCCACTACCGTACCTTT GTTTTTTCTTTTGATCGGTGGTGGCTCTCTTGCTTCTTGCATGCTCAGAAGCGGTGACGGGGACGCGCGCCGGGCGG CAGCGGTTGTTCCGGACCCGAGGGCATGGCTGGTAGTGGCACGTCGGCGCCGCGCACGGGCAGGTTCTGGTACTGCG CTCTGAGAAGACTTGCGTGCGCCACCACGCGTCGATTGACGTCTTGTATCTGACGTCTCTGGGTGAAAGCTACCGGC CCCGTGAGCTTGAACCTGAAAGAGAGTTCAACAGAATCAATTTCGGTATCGTTAACGGCAGCTTGTCTCAGTATTTC TTGTACGTCACCAGAGTTGTCCTGGTAGGCGATCTCCGCCATGAACTGCTCGATTTCTTCCTCCTGAAGATCTCCGC GACCCGCTCTTTCGACGGTGGCCGCGAGGTCATTGGAGATACGGCCCATGAGTTGGGAGAATGCATTCATGCCCGCC TCGTTCCAGACGCGGCTGTAAACCACGGCCCCCTCGGAGTCTCTTGCGCGCATCACCACCTGAGCGAGGTTAAGCTC CACGTGTCTGGTGAAGACCGCATAGTTGCATAGGCGCTGAAAAAGGTAGTTGAGTGTGGTGGCAATGTGTTCGGCGA CGAAGAAATACATGATCCATCGTCTCAGCGGCATTTCGCTAACATCGCCCAGAGCTTCCAAGCGCTCCATGGCCTCG TAGAAGTCCACGGCAAAATTAAAAAACTGGGAGTTTCGCGCGGACACGGTCAATTCCTCCTCGAGAAGACGGATGAG TTCGGCTATGGTGGCCCGTACTTCGCGTTCGAAGGCTCCCGGGATCTCTTCTTCCTCTTCTATCTCTTCTTCCACTA ACATCTCTTCTTCGTCTTCAGGCGGGGGGGGAGGGGGCACGCGGCGACGTCGACGGCGCACGGGCAAACGGTCGATG AATCGTTCAATGACCTCTCCGCGGCGGCGGCGCATGGTTTCAGTGACGGCGCGGCCGTTCTCGCGCGGTCGCAGAGT AAAAACACCGCCGCGCATCTCCTTAAAGTGGTGACTGGGAGGTTCTCCGTTTGGGAGGGAGAGGGCGCTGATTATAC ATTTTATTAATTGGCCCGTAGGGACTGCACGCAGAGATCTGATCGTGTCAAGATCCACGGGATCTGAAAACCTTTCG ACGAAAGCGTCTAACCAGTCACAGTCACAAGGTAGGCTGAGTACGGCTTCTTGTGGGGGGGGGTGGTTATGTGTTCG GTCTGGGTCTTCTGTTTCTTCTTCATCTCGGGAAGGTGAGACGATGCTGCTGGTGATGAAATTAAAGTAGGCAGTTC TAAGACGGCGGATGGTGGCGAGGAGCACCAGGTCTTTGGGTCCGGCTTGCTGGATACGCAGGCGATTGGCCATTCCC CAAGCATTATCCTGACATCTAGCAAGATCTTTGTAGTAGTCTTGCATGAGCCGTTCTACGGGCACTTCTTCCTCACC CGTTCTGCCATGCATACGTGTGAGTCCAAATCCGCGCATTGGTTGTACCAGTGCCAAGTCAGCTACGACTCTTTCGG CGAGGATGGCTTGCTGTACTTGGGTAAGGGTGGCTTGAAAGTCATCAAAATCCACAAAGCGGTGGTAAGCTCCTGTA TTAATGGTGTAAGCACAGTTGGCCATGACTGACCAGTTAACTGTCTGGTGACCAGGGCGCACGAGCTCGGTGTATTT AAGGCGCGAATAGGCGCGGGTGTCAAAGATGTAATCGTTGCAGGTGCGCACCAGATACTGGTACCCTATAAGAAAAT GCGGCGGTGGTTGGCGGTAGAGAGGCCATCGTTCTGTAGCTGGAGCGCCAGGGGCGAGGTCTTCCAACATAAGGCGG TGATAGCCGTAGATGTACCTGGACATCCAGGTGATTCCTGCGGCGGTAGTAGAAGCCCGAGGAAACTCGCGTACGCG GTTCCAAATGTTGCGTAGCGGCATGAAGTAGTTCATTGTAGGCACGGTTTGACCAGTGAGGCGCGCGCAGTCATTGA TGCTCTATAGACACGGAGAAAATGAAAGCGTTCAGCGACTCGACTCCGTAGCCTGGAGGAACGTGAACGGGTTGGGT CGCGGTGTACCCCGGTTCGAGACTTGTACTCGAGCCGGCCGGAGCCGCGGCTAACGTGGTATTGGCACTCCCGTCTC GACCCAGCCTACAAAAATCCAGGATACGGAATCGAGTCGTTTTGCTGGTTTCCGAATGGCAGGGAAGTGAGTCCTAT TTTTTTTTTTTGCCGCTCAGATGCATCCCGTGCTGCGACAGATGCGCCCCCAACAACAGCCCCCCTCGCAGCAGCAG CAGCAGCAATCACAAAAGGCTGTCCCTGCAACTACTGCAACTGCCGCCGTGAGCGGTGCGGGACAGCCCGCCTATGA TCTGGACTTGGAAGAGGGCGAAGGACTGGCACGTCTAGGTGCGCCTTCACCCGAGCGGCATCCGCGAGTTCAACTGA AAAAAGATTCTCGCGAGGCGTATGTGCCCCAACAGAACCTATTTAGAGACAGAAGCGGCGAGGAGCCGGAGGAGATG CGAGCTTCCCGCTTTAACGCGGGTCGTGAGCTGCGTCACGGTTTGGACCGAAGACGAGTGTTGCGGGACGAGGATTT CGAAGTTGATGAAATGACAGGGATCAGTCCTGCCAGGGCACACGTGGCTGCAGCCAACCTTGTATCGGCTTACGAGC AGACAGTAAAGGAAGAGCGTAACTTCCAAAAGTCTTTTAATAATCATGTGCGAACCCTGATTGCCCGCGAAGAAGTT ACCCTTGGTTTGATGCATTTGTGGGATTTGATGGAAGCTATCATTCAGAACCCTACTAGCAAACCTCTGACCGCCCA GCTGTTTCTGGTGGTGCAACACAGCAGAGACAATGAGGCTTTCAGAGAGGCGCTGCTGAACATCACCGAACCCGAGG GGAGATGGTTGTATGATCTTATCAACATTCTACAGAGTATCATAGTGCAGGAGCGGAGCCTGGGCCTGGCCGAGAAG GTGGCTGCCATCAATTACTCGGTTTTGAGCTTGGGAAAATATTACGCTCGCAAAATCTACAAGACTCCATACGTTCC CATAGACAAGGAGGTGAAGATAGATGGGTTCTACATGCGCATGACGCTCAAGGTCTTGACCCTGAGCGATGATCTTG GGGTGTATCGCAATGACAGAATGCATCGCGCGGTTAGCGCCAGCAGGAGGCGCGAGTTAAGCGACAGGGAACTGATG CACAGTTTGCAAAGAGCTCTGACTGGAGCTGGAACCGAGGGTGAGAATTACTTCGACATGGGAGCTGACTTGCAGTG GCAGCCTAGTCGCAGGGCTCTGAGCGCCGCGACGGCAGGATGTGAGCTTCCTTACATAGAAGAGGCGGATGAAGGCG AGGAGGAAGAGGGCGAGTACTTGGAAGACTGATGGCACAACCCGTGTTTTTTGCTAGATGGAACAGCAAGCACCGGA TCCCGCAATGCGGGCGGCGCTGCAGAGCCAGCCGTCCGGCATTAACTCCTCGGACGATTGGACCCAGGCCATGCAAC GTATCATGGCGTTGACGACTCGCAACCCCGAAGCCTTTAGACAGCAACCCCAGGCCAACCGTCTATCGGCCATCATG GAAGCTGTAGTGCCTTCCCGCTCTAATCCCACTCATGAGAAGGTCCTGGCCATCGTGAACGCGTTGGTGGAGAACAA AGCTATTCGTCCAGATGAGGCCGGACTGGTATACAACGCTCTCTTAGAACGCGTGGCTCGCTACAACAGTAGCAATG TGCAAACCAATTTGGACCGTATGATAACAGATGTACGCGAAGCCGTGTCTCAGCGCGAAAGGTTCCAGCGTGATGCC AACCTGGGTTCGCTGGTGGCGTTAAATGCTTTCTTGAGTACTCAGCCTGCTAATGTGCCGCGTGGTCAACAGGATTA TACTAACTTTTTAAGCGCTTTGAGACTGATGGTATCAGAAGTACCTCAGAGCGAAGTGTATCAGTCCGGTCCTGATT ACTTCTTTCAGACTAGCAGACAGGGCTTGCAGACGGTAAATCTGAGCCAAGCTTTTAAAAACCTTAAAGGTTTGTGG GGAGTGCATGCCCCGGTAGGAGAAAGAGCAACCGTGTCTAGCTTGTTAACTCCGAACTCCCGCCTATTATTACTGTT GGTAGCTCCTTTCACCGACAGCGGTAGCATCGACCGTAATTCCTATTTGGGTTACCTACTAAACCTGTATCGCGAAG CCATAGGGCAAAGTCAGGTGGACGAGCAGACCTATCAAGAAATTACCCAAGTCAGTCGCGCTTTGGGACAGGAAGAC ACTGGCAGTTTGGAAGCCACTCTGAACTTCTTGCTTACCAATCGGTCTCAAAAGATCCCTCCTCAATATGCTCTTAC TGCGGAGGAGGAGAGGATCCTTAGATATGTGCAGCAGAGCGTGGGATTGTTTCTGATGCAAGAGGGGGCAACTCCGA CTGCAGCACTGGACATGACAGCGCGAAATATGGAGCCCAGCATGTATGCCAGTAACCGACCTTTCATTAACAAACTG CTGGACTACTTGCACAGAGCTGCCGCTATGAACTCTGATTATTTCACCAATGCCATCTTAAACCCGCACTGGCTGCC CCCACCTGGTTTCTACACGGGCGAATATGACATGCCCGACCCTAATGACGGATTTCTGTGGGACGACGTGGACAGCG ATGTTTTTTCACCTCTTTCTGATCATCGCACGTGGAAAAAGGAAGGCGGCGATAGAATGCATTCTTCTGCATCGCTG TCCGGGGTCATGGGTGCTACCGCGGCTGAGCCCGAGTCTGCAAGTCCTTTTCCTAGTCTACCCTTTTCTCTACACAG TGTACGTAGCAGCGAAGTGGGTAGAATAAGTCGCCCGAGTTTAATGGGCGAAGAGGAGTATCTAAACGATTCCTTGC TCAGACCGGCAAGAGAAAAAAATTTCCCAAACAATGGAATAGAAAGTTTGGTGGATAAAATGAGTAGATGGAAGACT TATGCTCAGGATCACAGAGACGAGCCTGGGATCATGGGGATTACAAGTAGAGCGAGCCGTAGACGCCAGCGCCATGA CAGACAGAGGGGTCTTGTGTGGGACGATGAGGATTCGGCCGATGATAGCAGCGTGCTGGACTTGGGTGGGAGAGGAA GGGGCAACCCGTTTGCTCATTTGCGCCCTCGCTTGGGTGGTATGTTGTAAAAAAAAATAAAAAAAAAACTCACCAAG GCCATGGCGACGAGCGTACGTTCGTTCTTCTTTATTATCTGTGTCTAGTATAATGAGGCGAGTCGTGCTAGGCGGAG CGGTGGTGTATCCGGAGGGTCCTCCTCCTTCGTACGAGAGCGTGATGCAGCAGCAGCAGGCGACGGCGGTGATGCAA TCCCCACTGGAGGCTCCCTTTGTGCCTCCGCGATACCTGGCACCTACGGAGGGCAGAAACAGCATTCGTTATTCGGA ACTGGCACCTCAGTACGATACCACCAGGTTGTATCTGGTGGACAACAAGTCGGCGGACATTGCTTCTCTGAACTATC AGAATGACCACAGCAACTTCTTGACCACGGTGGTGCAAAACAATGACTTTACCCCTACGGAAGCCAGCACCCAGACC ATTAACTTTGATGAACGATCGCGGTGGGGCGGTCAGCTAAAGACCATCATGCATACTAACATGCCAAACGTGAACGA GTATATGTTTAGTAACAAGTTCAAAGCGCGTGTGATGGTGTCCAGAAAACCTCCCGACGGTGCTGCAGTTGGGGATA CTTATGATCACAAGCAGGATATTTTGAAATATGAGTGGTTCGAGTTTACTTTGCCAGAAGGCAACTTTTCAGTTACT ATGACTATTGATTTGATGAACAATGCCATCATAGATAATTACTTGAAAGTGGGTAGACAGAATGGAGTGCTTGAAAG TGACATTGGTGTTAAGTTCGACACCAGGAACTTCAAGCTGGGATGGGATCCCGAAACCAAGTTGATCATGCCTGGAG TGTATACGTATGAAGCCTTCCATCCTGACATTGTCTTACTGCCTGGCTGCGGAGTGGATTTTACCGAGAGTCGTTTG AGCAACCTTCTTGGTATCAGAAAAAAACAGCCATTTCAAGAGGGTTTTAAGATTTTGTATGAAGATTTAGAAGGTGG TAATATTCCGGCCCTCTTGGATGTAGATGCCTATGAGAACAGTAAGAAAGAACAAAAAGCCAAAATAGAAGCTGCTA CAGCTGCTGCAGAAGCTAAGGCAAACATAGTTGCCAGCGACTCTACAAGGGTTGCTAACGCTGGAGAGGTCAGAGGA GACAATTTTGCGCCAACACCTGTTCCGACTGCAGAATCATTATTGGCCGATGTGTCTGAAGGAACGGACGTGAAACT CACTATTCAACCTGTAGAAAAAGATAGTAAGAATAGAAGCTATAATGTGTTGGAAGACAAAATCAACACAGCCTATC GCAGTTGGTATCTTTCGTACAATTATGGCGATCCCGAAAAAGGAGTGCGTTCCTGGACATTGCTCACCACCTCAGAT GTCACCTGCGGAGCAGAGCAGGTCTACTGGTCGCTTCCAGACATGATGAAGGATCCTGTCACTTTCCGCTCCACTAG ACAAGTCAGTAACTACCCTGTGGTGGGTGCAGAGCTTATGCCCGTCTTCTCAAAGAGCTTCTACAACGAACAAGCTG TGTACTCCCAGCAGCTCCGCCAGTCCACCTCGCTTACGCACGTCTTCAACCGCTTTCCTGAGAACCAGATTTTAATC CGTCCGCCGGCGCCCACCATTACCACCGTCAGTGAAAACGTTCCTGCTCTCACAGATCACGGGACCCTGCCGTTGCG CAGCAGTATCCGGGGAGTCCAACGTGTGACCGTTACTGACGCCAGACGCCGCACCTGTCCCTACGTGTACAAGGCAC TGGGCATAGTCGCACCGCGCGTCCTTTCAAGCCGCACTTTCTAAAAAAAAAAAAAATGTCCATTCTTATCTCGCCCA GTAATAACACCGGTTGGGGTCTGCGCGCTCCAAGCAAGATGTACGGAGGCGCACGCAAACGTTCTACCCAACATCCT GTCCGTGTTCGCGGACATTTTCGCGCTCCATGGGGCGCCCTCAAGGGCCGCACTCGCGTTCGAACCACCGTCGATGA TGTAATCGATCAGGTGGTTGCCGACGCCCGTAATTATACTCCTACTGCGCCTACATCTACTGTGGATGCAGTTATTG ACAGTGTAGTGGCTGACGCTCGCAACTATGCTCGACGTAAGAGCCGGCGAAGGCGCATTGCCAGACGCCACCGAGCT ACCACTGCCATGCGAGCCGCAAGAGCTCTGCTACGAAGAGCTAGACGCGTGGGGCGAAGAGCCATGCTTAGGGCGGC CAGACGTGCAGCTTCGGGCGCCAGCGCCGGCAGGTCCCGCAGGCAAGCAGCCGCTGTCGCAGCGGCGACTATTGCCG ACATGGCCCAATCGCGAAGAGGCAATGTATACTGGGTGCGTGACGCTGCCACCGGTCAACGTGTACCCGTGCGCACC CGTCCCCCTCGCACTTAGAAGATACTGAGCAGTCTCCGATGTTGTGTCCCAGCGGCGAGGATGTCCAAGCGCAAATA CAAGGAAGAAATGCTGCAGGTTATCGCACCTGAAGTCTACGGCCAACCGTTGAAGGATGAAAAAAAACCCCGCAAAA TCAAGCGGGTTAAAAAGGACAAAAAAGAAGAGGAAGATGGCGATGATGGGCTGGCGGAGTTTGTGCGCGAGTTTGCC CCACGGCGACGCGTGCAATGGCGTGGGCGCAAAGTTCGACATGTGTTGAGACCTGGAACTTCGGTGGTCTTTACACC CGGCGAGCGTTCAAGCGCTACTTTTAAGCGTTCCTATGATGAGGTGTACGGGGATGATGATATTCTTGAGCAGGCGG CTGACCGATTAGGCGAGTTTGCTTATGGCAAGCGTAGTAGAATAACTTCCAAGGATGAGACAGTGTCGATACCCTTG GATCATGGAAATCCCACCCCTAGTCTTAAACCGGTCACTTTGCAGCAAGTGTTACCCGTAACTCCGCGAACAGGTGT TAAACGCGAAGGTGAAGATTTGTATCCCACTATGCAACTGATGGTACCCAAACGCCAGAAGTTGGAGGACGTTTTGG AGAAAGTAAAAGTGGATCCAGATATTCAACCTGAGGTTAAAGTGAGACCCATTAAGCAGGTAGCGCCTGGTCTGGGG GTACAAACTGTAGACATTAAGATTCCCACTGAAAGTATGGAAGTGCAAACTGAACCCGCAAAGCCTACTGCCACCTC CACTGAAGTGCAAACGGATCCATGGATGCCCATGCCTATTACAACTGACGCCGCCGGTCCCACTCGAAGATCCCGAC GAAAGTACGGTCCAGCAAGTCTGTTGATGCCCAATTATGTTGTACACCCATCTATTATTCCTACTCCTGGTTACCGA GGCACTCGCTACTATCGCAGCCGAAACAGTACCTCCCGCCGTCGCCGCAAGACACCTGCAAATCGCAGTCGTCGCCG TAGACGCACAAGCAAACCGACTCCCGGCGCCCTGGTGCGGCAAGTGTACCGCAATGGTAGTGCGGAACCTTTGACAC TGCCGCGTGCGCGTTACCATCCGAGTATCATCACTTAATCAATGTTGCCGCTGCCTCCTTGCAGATATGGCCCTCAC TTGTCGCCTTCGCGTTCCCATCACTGGTTACCGAGGAAGAAACTCGCGCCGTAGAAGAGGGATGTTGGGACGCGGAA TGCGACGCTACAGGCGACGGCGTGCTATCCGCAAGCAATTGCGGGGTGGTTTTTTACCAGCCTTAATTCCAATTATC GCTGCTGCAATTGGCGCGATACCAGGCATAGCTTCCGTGGCGGTTCAGGCCTCGCAACGACATTGACATTGGAAAAA AACGTATAAATAAAAAAAAAAAAATACAATGGACTCTGACACTCCTGGTCCTGTGACTATGTTTTCTTAGAGATGGA AGACATCAATTTTTCATCCTTGGCTCCGCGACACGGCACGAAGCCGTACATGGGCACCTGGAGCGACATCGGCACGA GCCAACTGAACGGGGGCGCCTTCAATTGGAGCAGTATCTGGAGCGGGCTTAAAAATTTTGGCTCAACCATAAAAACA TACGGGAACAAAGCTTGGAACAGCAGTACAGGACAGGCGCTTAGAAATAAACTTAAAGACCAGAACTTCCAACAAAA AGTAGTCGATGGGATAGCTTCCGGCATCAATGGAGTGGTAGATTTGGCTAACCAGGCTGTGCAGAAAAAGATAAACA GTCGTTTGGACCCGCCGCCAGCAACCCCAGGTGAAATGCAAGTGGAGGAAGAAATTCCTCCGCCAGAAAAACGAGGC GACAAGCGTCCGCGTCCCGATTTGGAAGAGACGCTGGTGACGCGCGTAGATGAACCGCCTTCTTATGAGGAAGCAAC GAAGCTTGGAATGCCCACCACTAGACCGATAGCCCCAATGGCCACCGGGGTGATGAAACCTTCTCAGTTGCATCGAC CCGTCACCTTGGATTTGCCCCCTCCCCCTGCTGCTACTGCTGTACCCGCTTCTAAGCCTGTCGCTGCCCCGAAACCA GTCGCCGTAGCCAGGTCACGTCCCGGGGGCGCTCCTCGTCCAAATGCGCACTGGCAAAATACTCTGAACAGCATCGT GGGTCTAGGCGTGCAAAGTGTAAAACGCCGTCGCTGCTTTTAATTAAATATGGAGTAGCGCTTAACTTGCCTATCTG TGTATATGTGTCATTACACGCCGTCACAGCAGCAGAGGAAAAAAGGAAGAGGTCGTGCGTCGACGCTGAGTTACTTT CAAGATGGCCACCCCATCGATGCTGCCCCAATGGGCATACATGCACATCGCCGGACAGGATGCTTCGGAGTACCTGA GTCCGGGTCTGGTGCAGTTCGCCCGCGCCACAGACACCTACTTCAATCTGGGAAATAAGTTTAGAAATCCCACCGTA GCGCCGACCCACGATGTGACCACCGACCGTAGCCAGCGGCTCATGTTGCGCTTCGTGCCCGTTGACCGGGAGGACAA TACATACTCTTACAAAGTGCGGTACACCCTGGCCGTGGGCGACAACAGAGTGCTGGATATGGCCAGCACGTTCTTTG ACATTAGGGGTGTGTTGGACAGAGGTCCCAGTTTCAAACCCTATTCTGGTACGGCTTACAACTCCCTGGCTCCTAAA GGCGCTCCAAATACATCTCAGTGGATTGCAGAAGGTGTAAAAAATACAACTGGTGAGGAACACGTAACAGAAGAGGA AACCAATACTACTACTTACACTTTTGGCAATGCTCCTGTAAAAGCTGAAGCTGAAATTACAAAAGAAGGACTCCCAG TAGGTTTGGAAGTTTCAGATGAAGAAAGTAAACCGATTTATGCTGATAAAACATATCAGCCAGAACCTCAGCTGGGA GATGAAACTTGGACTGACCTTGATGGAAAAACCGAAAAGTATGGAGGCAGGGCTCTCAAACCCGATACTAAGATGAA ACCATGCTACGGGTCCTTTGCCAAACCTACTAATGTGAAAGGCGGTCAGGCAAAACAAAAAACAACGGAGCAGCCAA ATCAGAAAGTCGAATATGATATCGACATGGAGTTTTTTGATGCGGCATCGCAGAAAACAAACTTAAGTCCTAAAATT GTCATGTATGCAGAAAATGTAAATTTGGAAACTCCAGACACTCATGTAGTGTACAAACCTGGAACAGAAGACACAAG TTCCGAAGCTAATTTGGGACAACAATCTATGCCCAACAGACCCAACTACATTGGCTTCAGAGATAACTTTATTGGAC TTATGTACTATAACAGTACTGGTAACATGGGGGTGCTGGCTGGTCAAGCGTCTCAGTTAAATGCAGTGGTTGACTTG CAGGACAGAAACACAGAACTTTCTTACCAACTCTTGCTTGACTCTCTGGGCGACAGAACCAGATACTTTAGCATGTG GAATCAGGCTGTGGACAGTTATGATCCTGATGTACGTGTTATTGAAAATCATGGTGTGGAAGATGAACTTCCCAACT ACTGTTTTCCACTGGACGGCATAGGTGTTCCAACAACCAGTTACAAATCAATAGTTCCAAATGGAGACAATGCGCCT AATTGGAAGGAACCTGAAGTAAATGGAACAAGTGAGATCGGACAGGGTAATTTGTTTGCCATGGAAATTAACCTTCA AGCCAATCTATGGCGAAGTTTCCTTTATTCCAATGTGGCTCTATATCTCCCAGACTCGTACAAATACACCCCGTCCA ATGTCACTCTTCCAGAAAACAAAAACACCTACGACTACATGAACGGGCGGGTGGTGCCGCCATCTCTAGTAGACACC TATGTGAACATTGGTGCCAGGTGGTCTCTGGATGCCATGGACAATGTCAACCCATTCAACCACCACCGTAACGCTGG CTTGCGTTACCGATCCATGCTTCTGGGTAACGGACGTTATGTGCCTTTCCACATACAAGTGCCTCAAAAATTCTTCG CTGTTAAAAACCTGCTGCTTCTCCCAGGCTCCTACACTTATGAGTGGAACTTTAGGAAGGATGTGAACATGGTTCTA CAGAGTTCCCTCGGTAACGACCTGCGGGTAGATGGCGCCAGCATCAGTTTCACGAGCATCAACCTCTATGCTACTTT TTTCCCCATGGCTCACAACACCGCTTCCACCCTTGAAGCCATGCTGCGGAATGACACCAATGATCAGTCATTCAACG ACTACCTATCTGCAGCTAACATGCTCTACCCCATTCCTGCCAATGCAACCAATATTCCCATTTCCATTCCTTCTCGC AACTGGGCGGCTTTCAGAGGCTGGTCATTTACCAGACTGAAAACCAAAGAAACTCCCTCTTTGGGGTCTGGATTTGA CCCCTACTTTGTCTATTCTGGTTCTATTCCCTACCTGGATGGTACCTTCTACCTGAACCACACTTTTAAGAAGGTTT CCATCATGTTTGACTCTTCAGTGAGCTGGCCTGGAAATGACAGGTTACTATCTCCTAACGAATTTGAAATAAAGCGC ACTGTGGATGGCGAAGGCTACAACGTAGCCCAATGCAACATGACCAAAGACTGGTTCTTGGTACAGATGCTCGCCAA CTACAACATCGGCTATCAGGGCTTCTACATTCCAGAAGGATACAAAGATCGCATGTATTCATTTTTCAGAAACTTCC AGCCCATGAGCAGGCAGGTGGTTGATGAGGTCAATTACAAAGACTTCAAGGCCGTCGCCATACCCTACCAACACAAC AACTCTGGCTTTGTGGGTTACATGGCTCCGACCATGCGCCAAGGTCAACCCTATCCCGCTAACTATCCCTATCCACT CATTGGAACAACTGCCGTAAATAGTGTTACGCAGAAAAAGTTCTTGTGTGACAGAACCATGTGGCGCATACCGTTCT CGAGCAACTTCATGTCTATGGGGGCCCTTACAGACTTGGGACAGAATATGCTCTATGCCAACTCAGCTCATGCTCTG GACATGACCTTTGAGGTGGATCCCATGGATGAGCCCACCCTGCTTTATCTTCTCTTCGAAGTTTTCGACGTGGTCAG AGTGCATCAGCCACACCGCGGCATCATCGAGGCAGTCTACCTGCGTACACCGTTCTCGGCCGGTAACGCTACCACGT AAGAAGCTTCTTGCTTCTTGCAAATAGCAGCTGCAACCATGGCCTGCGGATCCCAAAACGGCTCCAGCGAGCAAGAG CTCAGAGCCATTGTCCAAGACCTGGGTTGCGGACCCTATTTTTTGGGAACCTACGATAAGCGCTTCCCGGGGTTCAT GGCCCCCGATAAGCTCGCCTGTGCCATTGTAAATACGGCCGGACGTGAGACGGGGGGAGAGCACTGGTTGGCTTTCG GTTGGAACCCACGTTCTAACACCTGCTACCTTTTTGATCCTTTTGGATTCTCGGATGATCGTCTCAAACAGATTTAC CAGTTTGAATATGAGGGTCTCCTGCGCCGCAGCGCTCTTGCTACCAAGGACCGCTGTATTACGCTGGAAAAATCTAC CCAGACCGTGCAGGGTCCCCGTTCTGCCGCCTGCGGACTTTTCTGCTGCATGTTCCTTCACGCCTTTGTGCACTGGC CTGACCGTCCCATGGACGGAAACCCCACCATGAAATTGCTAACTGGAGTGCCAAACAACATGCTTCATTCTCCTAAA GTCCAGCCCACCCTGTGTGACAATCAAAAAGCACTCTACCATTTTCTTAATACCCATTCGCCTTATTTTCGCTCCCA TCGTACACACATCGAAAGGGCCACTGCGTTCGACCGTATGGATGTTCAATAATGACTCATGTAAACAACGTGTTCAA TAAACATCACTTTATTTTTTTACATGTATCAAGGCTCTGCATTACTTATTTATTTACAAGTCGAATGGGTTCTGACG AGAATCAGAATGACCCGCAGGCAGTGATACGTTGCGGAACTGATACTTGGGTTGCCACTTGAATTCGGGAATCACCA ACTTGGGAACCGGTATATCGGGCAGGATGTCACTCCACAGCTTTCTGGTCAGCTGCAAAGCTCCAAGCAGGTCAGGA GCCGAAATCTTGAAATCACAATTAGGACCAGTGCTTTGAGCGCGAGAGTTGCGGTACACCGGATTGCAGCACTGAAA CACCATCAGCGACGGATGTCTCACGCTTGCCAGCACGGTGGGATCTGCAATCATGCCCACATCCAGATCTTCAGCAT TGGCAATGCTGAACGGGGTCATCTTGCAGGTCTGCCTACCCATGGCGGGCACCCAATTAGGCTTGTGGTTGCAATCG CAGTGCAGGGGGATCAGTATCATCTTGGCCTGATCCTGTCTGATTCCTGGATACACGGCTCTCATGAAAGCATCATA TTGCTTGAAAGCCTGCTGGGCTTTACTACCCTCGGTATAAAACATCCCGCAGGACCTGCTCGAAAACTGGTTAGCTG CACAGCCGGCATCATTCACACAGCAGCGGGCGTCATTGTTAGCTATTTGCACCACACTTCTGCCCCAGCGGTTTTGG GTGATTTTGGTTCGCTCGGGATTCTCCTTTAAGGCTCGTTGTCCGTTCTCGCTGGCCACATCCATCTCGATAATCTG CTCCTTCTGAATCATAATATTGCCATGCAGGCACTTCAGCTTGCCCTCATAATCATTGCAGCCATGAGGCCACAACG CACAGCCTGTACATTCCCAATTATGGTGGGCGATCTGAGAAAAAGAATGTATCATTCCCTGCAGAAATCTTCCCATC ATCGTGCTCAGTGTCTTGTGACTAGTGAAAGTTAACTGGATGCCTCGGTGCTCCTCGTTTACGTACTGGTGACAGAT GCGCTTGTATTGTTCGTGTTGCTCAGGCATTAGTTTAAAAGAGGTTCTAAGTTCGTTATCCAGCCTGTACTTCTCCA TCAGCAGACACATCACTTCCATGCCTTTCTCCCAAGCAGACACCAGGGGCAAGCTAATCGGATTCTTAACAGTGCAG GCAGCAGCTCCTTTAGCCAGAGGGTCATCTTTAGCGATCTTCTCAATGCTTCTTTTGCCATCCTTCTCAACGATGCG CACGGGCGGGTAGCTGAAACCCACTGCTACAAGTTGCGCCTCTTCTCTTTCTTCTTCGCTGTCTTGACTGATGTCTT GCATGGGGATATGTTTGGTCTTCCTTGGCTTCTTTTTGGGGGGTATCGGAGGAGGAGGACTGTCGCTCCGTTCCGGA GACAGGGAGGATTGTGACGTTTCGCTCACCATTACCAACTGACTGTCGGTAGAAGAACCTGACCCCACACGGCGACA GGTGTTTCTCTTCGGGGGCAGAGGTGGAGGCGATTGCGAAGGGCTGCGGTCCGACCTGGAAGGCGGATGACTGGCAG AACCCCTTCCGCGTTCGGGGGTGTGCTCCCTGTGGCGGTCGCTTAACTGATTTCCTTCGCGGCTGGCCATTGTGTTC TCCTAGGCAGAGAAACAACAGACATGGAAACTCAGCCATTGCTGTCAACATCGCCACGAGTGCCATCACATCTCGTC CTCAGCGACGAGGAAAAGGAGCAGAGCTTAAGCATTCCACCGCCCAGTCCTGCCACCACCTCTACCCTAGAAGATAA GGAGGTCGACGCATCTCATGACATGCAGAATAAAAAAGCGAAAGAGTCTGAGACAGACATCGAGCAAGACCCGGGCT ATGTGACACCGGTGGAACACGAGGAAGAGTTGAAACGCTTTCTAGAGAGAGAGGATGAAAACTGCCCAAAACAACGA GCAGATAACTATCACCAAGATGCTGGAAATAGGGATCAGAACACCGACTACCTCATAGGGCTTGACGGGGAAGACGC GCTCCTTAAACATCTAGCAAGACAGTCGCTCATAGTCAAGGATGCATTATTGGACAGAACTGAAGTGCCCATCAGTG TGGAAGAGCTCAGCCGCGCCTACGAGCTTAACCTCTTTTCACCTCGTACTCCCCCCAAACGTCAGCCAAACGGCACC TGCGAGCCAAATCCTCGCTTAAACTTTTATCCAGCTTTTGCTGTGCCAGAAGTACTGGCTACCTATCACATCTTTTT TAAAAATCAAAAAATTCCAGTCTCCTGCCGCGCTAATCGCACCCGCGCCGATGCCCTACTCAATCTGGGACCTGGTT CACGCTTACCTGATATAGCTTCCTTGGAAGAGGTTCCAAAGATCTTCGAGGGTCTGGGCAATAATGAGACTCGGGCC GCAAATGCTCTGCAAAAGGGAGAAAATGGCATGGATGAGCATCACAGCGTTCTGGTGGAATTGGAAGGCGATAATGC CAGACTCGCAGTACTCAAGCGAAGCATCGAGGTCACACACTTCGCATATCCCGCTGTCAACCTGCCCCCTAAAGTCA TGACGGCGGTCATGGACCAGTTACTCATTAAGCGCGCAAGTCCCCTTTCAGAAGACATGCATGACCCAGATGCCTGT GATGAGGGTAAACCAGTGGTCAGTGATGAGCAGCTAACCCGATGGCTGGGCACCGACTCTCCCAGGGATTTGGAAGA GCGTCGCAAGCTTATGATGGCCGTGGTGCTGGTTACCGTAGAACTAGAGTGTCTCCGACGTTTCTTTACCGATTCAG AAACCTTGCGCAAACTCGAAGAGAATCTGCACTACACTTTTAGACACGGCTTTGTGCGGCAGGCATGCAAGATATCT AACGTGGAACTCACCAACCTGGTTTCCTACATGGGTATTCTGCATGAGAATCGCCTAGGACAAAGCGTGCTGCACAG CACCCTGAAGGGGGAAGCCCGCCGTGATTACATCCGCGATTGTGTCTATCTGTACCTGTGCCACACGTGGCAAACCG GCATGGGTGTATGGCAGCAATGTTTAGAAGAACAGAACTTGAAAGAGCTTGACAAGCTCTTACAGAAATCTCTTAAG GTTCTGTGGACAGGGTTCGACGAGCGCACCGTCGCTTCCGACCTGGCAGACCTCATCTTCCCAGAGCGTCTCAGGGT TACTTTGCGAAACGGATTGCCTGACTTTATGAGCCAGAGCATGCTTAACAATTTTCGCTCTTTCATCCTGGAACGCT CCGGTATCCTGCCCGCCACCTGCTGCGCACTGCCCTCCGACTTTGTGCCTCTCACCTACCGCGAGTGCCCCCCGCCG CTATGGAGTCACTGCTACCTGTTCCGTCTGGCCAACTATCTCTCCTACCACTCGGATGTGATCGAGGATGTGAGCGG AGACGGCTTGCTGGAGTGTCACTGCCGCTGCAATCTGTGCACGCCCCACCGGTCCCTAGCTTGCAACCCCCAGTTGA TGAGCGAAACCCAGATAATAGGCACCTTTGAATTGCAAGGCCCCAGCAGCCAAGGCGATGGGTCTTCTCCTGGGCAA AGTTTAAAACTGACCCCGGGACTGTGGACCTCCGCCTACTTGCGCAAGTTTGCTCCGGAAGATTACCACCCCTATGA AATCAAGTTCTATGAGGACCAATCACAGCCTCCAAAGGCCGAACTTTCGGCCTGCGTCATCACCCAGGGGGCAATTC TGGCCCAATTGCAAGCCATCCAAAAATCCCGCCAAGAATTTCTACTGAAAAAGGGTAAGGGGGTCTACCTTGACCCC CAGACCGGCGAGGAACTCAACACAAGGTTCCCTCAGGATGTCCCAACGACGAGAAAACAAGAAGTTGAAGGTGCAGC CGCCGCCCCCAGAAGATATGGAGGAAGATTGGGACAGTCAGGCAGAGGAGGCGGAGGAGGACAGTCTGGAGGACAGT CTGGAGGAAGACAGTTTGGAGGAGGAAAACGAGGAGGCAGAGGAGGTGGAAGAAGTAACCGCCGACAAACAGTTATC CTCGGCTGCGGAGACAAGCAACAGCGCTACCATCTCCGCTCCGAGTCGAGGAACCCGGCGGCGTCCCAGCAGTAGAT GGGACGAGACCGGACGCTTCCCGAACCCAACCAGCGCTTCCAAGACCGGTAAGAAGGATCGGCAGGGATACAAGTCC TGGCGGGGGCATAAGAATGCCATCATCTCCTGCTTGCATGAGTGCGGGGGCAACATATCCTTCACGCGGCGCTACTT GCTATTCCACCATGGGGTGAACTTTCCGCGCAATGTTTTGCATTACTACCGTCACCTCCACAGCCCCTACTATAGCC AGCAAATCCCGGCAGTCTCGACAGATAAAGACAGCGGCGGCGACCTCCAACAGAAAACCAGCAGCGGCAGTTAGAAA ATACACAACAAGTGCAGCAACAGGAGGATTAAAGATTACAGCCAACGAGCCAGCGCAAACCCGAGAGTTAAGAAATC GGATCTTTCCAACCCTGTATGCCATCTTCCAGCAGAGTCGGGGTCAAGAGCAGGAACTGAAAATAAAAAACCGATCT CTGCGTTCGCTCACCAGAAGTTGTTTGTATCACAAGAGCGAAGATCAACTTCAGCGCACTCTCGAGGACGCCGAGGC TCTCTTCAACAAGTACTGCGCGCTGACTCTTAAAGAGTAGGCAGCGACCGCGCTTATTCAAAAAAGGCGGGAATTAC ATCATCCTCGACATGAGTAAAGAAATTCCCACGCCTTACATGTGGAGTTATCAACCCCAAATGGGATTGGCGGCAGG CGCCTCCCAGGACTACTCCACCCGCATGAATTGGCTCAGCGCCGGGCCTTCTATGATTTCTCGAGTTAATGATATAC GCGCCTACCGAAACCAAATACTTTTGGAACAGTCAGCTCTTACCACCACGCCCCGCCAACACCTTAATCCCAGAAAT TGGCCCGCCGCCCTAGTGTACCAGGAAAGTCCCGCTCCCACCACTGTATTACTTCCTCGAGACGCCCAGGCCGAAGT CCAAATGACTAATGCAGGTGCGCAGTTAGCTGGCGGCTCCACCCTATGTCGTCACAGGCCTCGGCATAATATAAAAC GCCTGATGATCAGAGGCCGAGGTATCCAGCTCAACGACGAGTCGGTGAGCTCTCCGCTTGGTCTACGACCAGACGGA ATCTTTCAGATTGCCGGCTGCGGGAGATCTTCCTTCACCCCTCGTCAGGCTGTTCTGACTTTGGAAAGTTCGTCTTC GCAACCCCGCTCGGGCGGAATCGGGACCGTTCAATTTGTGGAGGAGTTTACTCCCTCTGTCTACTTCAACCCCTTCT CCGGATCTCCTGGGCATTACCCGGACGAGTTCATACCGAACTTCGACGCGATTAGCGAGTCAGTGGACGGCTACGAT TGATGTCTGGTGACGCGGCTGAGCTATCTCGGCTGCGACATCTAGACCACTGCCGCCGCTTTCGCTGCTTTGCCCGG GAACTCATTGAGTTCATCTACTTCGAACTCCCCAAGGATCACCCTCAAGGTCCGGCCCACGGAGTGCGGATTTCTAT CGAAGGCAAAATAGACTCTCGCCTGCAACGAATTTTCTCCCAGCGGCCCGTGCTGATCGAGCGAGACCAGGGAAACA CCACGGTTTCCATCTACTGCATTTGTAATCACCCCGGATTGCATGAAAGCCTTTGCTGTCTTATGTGTACTGAGTTT AATAAAAACTGAATTAAGACTCTCCTACGGACTGCCGCTTCTTCAACCCGGATTTTACAACCAGAAGAACGAAACTT TTCCTGTCGTCCAGGACTCTGTTAACTTCACCTTTCCTACTCACAAACTAGAAGCTCAACGACTACACCGCTTTTCC AGAAGCATTTTCCCTACTAATACTACTTTCAAAACCGGAGGTGAGCTCCAAGGTCTTCCTACAGAAAACCCTTGGGT GGAAGCGGGCCTTGTAGTGCTAGGAATTCTTGCGGGTGGGCTTGTGATTATTCTTTGCTACCTATACACACCTTGCT TCACTTTCTTAGTGGTGTTGTGGTATTGGTTTAAAAAATGGGGCCCATACTAGTCTTGCTTGTTTTACTTTCGCTTT TGGAACCGGGTTCTGCCAATTACGATCCATGTCTAGACTTCGACCCAGAAAACTGCACACTTACTTTTGCACCCGAC ACAAGCCGCATCTGTGGAGTTCTTATTAAGTGCGGATGGGAATGCAGGTCCGTTGAAATTACACACAATAACAAAAC CTGGAACAATACCTTATCCACCACATGGGAGCCAGGAGTTCCCGAGTGGTACACTGTCTCTGTCCGAGGTCCTGACG GTTCCATCCGCATTAGTAACAACACTTTCATTTTTTCTGAAATGTGCGATCTGGCCATGTTCATGAGCAAACAGTAT TCTCTATGGCCTCCTAGCAAGGACAACATCGTAACGTTCTCCATTGCTTATTGCTTGTGCGCTTGCCTTCTTACTGC TTTACTGTGCGTATGCATACACCTGCTTGTAACCACTCGCATCAAAAACGCCAATAACAAAGAAAAAATGCCTTAAC CTCTTTCTGTTTACAGACATGGCTTCTCTTACATCTCTCATATTTGTCAGCATTGTCACTGCCGCTCATGGACAAAC AGTCGTCTCTATCCCTCTAGGACATAATTACACTCTCATAGGACCCCCAATCACTTCAGAGGTCATCTGGACCAAAC TGGGAAGCGTTGATTACTTTGATATAATCTGCAACAAAACAAAACCAATAATAGTAACTTGCAACATACAAAATCTT ACATTGATTAATGTTAGCAAAGTTTACAGCGGTTACTATTATGGTTATGACAGATACAGTAGTCAATATAGAAATTA CTTGGTTCGTGTTACCCAGTTGAAAACCACGAAAATGCCAAATATGGCAAAGATTCGATCCGATGACAATTCTCTAG AAACTTTTACATCTCCCACCACACCCGACGAAAAAAACATCCCAGATTCAATGATTGCAATTGTTGCAGCGGTGGCA GTGGTGATGGCACTAATAATAATATGCATGCTTTTATATGCTTGTCGCTACAAAAAGTTTCATCCTAAAAAACAAGA TCTCCTACTAAGGCTTAACATTTAATTTCTTTTTATACAGCCATGGTTTCCACTACCACATTCCTTATGCTTACTAG TCTCGCAACTCTGACTTCTGCTCGCTCACACCTCACTGTAACTATAGGCTCAAACTGCACACTAAAAGGACCTCAAG GTGGTCATGTCTTTTGGTGGAGAATATATGACAATGGATGGTTTACAAAACCATGTGACCAACCTGGTAGATTTTTC TGCAACGGCAGAGACCTAACCATTATCAACGTGACAGCAAATGACAAAGGCTTCTATTATGGAACCGACTATAAAAG TAGTTTAGATTATAACATTATTGTACTGCCATCTACCACTCCAGCACCCCGCACAACTACTTTCTCTAGCAGCAGTG TCGCTAACAATACAATTTCCAATCCAACCTTTGCCGCGCTTTTAAAACGCACTGTGAATAATTCTACAACTTCACAT ACAACAATTTCCACTTCAACAATCAGCATTATCGCTGCAGTGACAATTGGAATATCTATTCTTGTTTTTACCATAAC CTACTACGCCTGCTGCTATAGAAAAGACAAACATAAAGGTGATCCATTACTTAGATTTGATATTTAATTTGTTCTTT TTTTTTTTATTTACAGTATGGTGAACACCAATCATGGTACCTAGAAATTTCTTCTTCACCATACTCATTTGTGCATT TAATGTTTGCGCTACTTTCACAGCAGTAGCCACAGCAACCCCAGACTGTATAGGAGCATTTGCTTCCTATGCACTTT TTGCTTTTGTTACTTGCATCTGCGTATGTAGCATAGTCTGCCTGGTTATTAATTTTTTCCAACTTATAGACTGGATC CTTGTGCGAATTGCCTACCTGCGCCACCATCCCGAATACCGCAACCAAAATATCGCGGCACTTCTTAGACTCATCTA AAACCATGCAGGCTATACTACCAATATTTTTGCTTCTATTGCTTCCCTACGCTGTCTCAACCCCAGCTGCCTATAGT ACTCCACCAGAACACCTTAGAAAATGCAAATTCCAACAACCGTGGTCATTTCTTGCTTGCTATCGAGAAAAATCAGA AATTCCCCCAAATTTAATAATGATTGCTGGAATAATTAATATAATCTGTTGCACCATAATTTCATTTTTGATATACC CCCTATTTGATTTTGGCTGGAATGCTCCCAATGCACATGATCATCCACAAGACCCAGAGGAACACATTCCCCTACAA AACATGCAACATCCAATAGCGCTAATAGATTACGAAAGTGAACCACAACCCCCACTACTCCCTGCTATTAGTTACTT CAACCTAACCGGCGGAGATGACTGAAACACTCACCACCTCCAATTCCGCCGAGGATCTGCTCGATATGGACGGCCGC GTCTCAGAACAGCGACTCGCCCAACTACGCATCCGCCAGCAGCAGGAACGCGCGGCCAAAGAGCTCAGAGATGTCAT CCAAATTCACCAATGCAAAAAAGGCATATTCTGTTTGGTAAAACAAGCCAAGATATCCTACGAGATCACCGCTACTG ACCATCGCCTCTCTTACGAACTTGGCCCCCAACGACAAAAATTTACCTGCATGGTGGGAATCAACCCCATAGTTATC ACCCAGCAAAGTGGAGATACTAAGGGTTGCATTCACTGCTCCTGCGATTCCATCGAGTGCACCTACACCCTGCTGAA GACCCTATACGGCCTAAGAGACCTGCTACCAATGAATTAAAAAATGATTAATAAAAAATCACTTACTTGAAATCAGC AATAAGGTCTCTGTTGAAATTTTCTCCCAGCAGCACCTCACTTCCCTCTTCCCAACTCTGGTATTCTAAACCCCGTT CAGCGGCATACTTTCTCCATACTTTAAAGGGGATGTCAAATTTTAGCTCCTCTCCTGTACCCACAATCTTCATGTCT TTCTTCCCAGATGACCAAGAGAGTCCGGCTCAGTGACTCCTTCAACCCTGTCTACCCCTATGAAGATGAAAGCACCT CCCAACACCCCTTTATAAACCCAGGGTTTATTTCCCCAAATGGCTTCACACAAAGCCCAAACGGAGTTCTTACTTTA AAATGTTTAACCCCACTAACAACCACAGGCGGATCTCTACAGCTAAAAGTGGGAGGGGGACTTACAGTGGATGACAC CAACGGTTTTTTGAAAGAAAACATAAGTGCCACCACACCACTCGTTAAGACTGGTCACTCTATAGGTTTACCACTAG GAGCCGGATTGGGAACGAATGAAAATAAACTTTGTATCAAATTAGGACAAGGACTTACATTCAATTCAAACAACATT TGCATTGATGACAATATTAACACCTTATGGACAGGAGTCAACCCCACCGAAGCCAACTGTCAAATCATGAACTCCAG TGAATCTAATGATTGCAAATTAATTCTAACACTAGTTAAAACTGGAGCACTAGTCACTGCATTTGTTTATGTTATAG GAGTATCTAACAATTTTAATATGCTAACTACACACAGAAATATAAATTTTACTGCAGAGCTGTTTTTCGATTCTACT GGTAATTTACTAACTAGACTCTCATCCCTCAAAACTCCACTTAATCATAAATCAGGACAAAACATGGCTACTGGTGC CATTACTAATGCTAAAGGTTTCATGCCCAGCACGACTGCCTATCCTTTCAATGATAATTCTAGAGAAAAAGAAAACT ACATTTACGGAACTTGTTACTACACAGCTAGTGATCGCACTGCTTTTCCCATTGACATATCTGTCATGCTTAACCGA AGAGCAATAAATGACGAGACATCATATTGTATTCGTATAACTTGGTCCTGGAACACAGGAGATGCCCCAGAGGTGCA AACCTCTGCTACAACCCTAGTCACCTCCCCATTTACCTTTTACTACATCAGAGAAGACGACTGACAAATAAAGTTTA ACTTGTTTATTTGAAAATCAATTCACAAAATCCGAGTAGTTATTTTGCCTCCCCCTTCCCATTTAACAGAATACACC AATCTCTCCCCACGCACAGCTTTAAACATTTGGATACCATTAGATATAGACATGGTTTTAGATTCCACATTCCAAAC AGTTTCAGAGCGAGCCAATCTGGGGTCAGTGATAGATAAAAATCCATCGGGATAGTCTTTTAAAGCGCTTTCACAGT CCAACTGCTGCGGATGCGACTCCGGAGTCTGGATCACGGTCATCTGGAAGAAGAACGATGGGAATCATAATCCGAAA ACGGTATCGGACGATTGTGTCTCATCAAACCCACAAGCAGCCGCTGTCTGCGTCGCTCCGTGCGACTGCTGTTTATG GGATCAGGGTCCACAGTGTCCTGAAGCATGATTTTAATAGCCCTTAACATCAACTTTCTGGTGCGATGCGCGCAGCA ACGCATTCTGATTTCACTCAAATCTTTGCAGTAGGTACAACACATTATTACAATATTGTTTAATAAACCATAATTAA AAGCGCTCCAGCCAAAACTCATATCTGATATAATCGCCCCTGCATGACCATCATACCAAAGTTTAATATAAATTAAA TGACGTTCCCTCAAAAACACACTACCCACATACATGATCTCTTTTGGCATGTGCATATTAACAATCTGTCTGTACCA TGGACAACGTTGGTTAATCATGCAACCCAATATAACCTTCCGGAACCACACTGCCAACACCGCTCCCCCAGCCATGC ATTGAAGTGAACCCTGCTGATTACAATGACAATGAAGAACCCAATTCTCTCGACCGTGAATCACTTGAGAATGAAAA ATATCTATAGTGGCACAACATAGACATAAATGCATGCATCTTCTCATAATTTTTAACTCCTCAGGATTTAGAAACAT ATCCCAGGGAATAGGAAGCTCTTGCAGAACAGTAAAGCTGGCAGAACAAGGAAGACCACGAACACAACTTACACTAT GCATAGTCATAGTATCACAATCTGGCAACAGCGGGTGGTCTTCAGTCATAGAAGCTCGGGTTTCATTTTCCTCACAA CGTGGTAACTGGGCTCTGGTGTAAGGGTGATGTCTGGCGCATGATGTCGAGCGTGCGCGCAACCTTGTCATAATGGA GTTGCTTCCTGACATTCTCGTATTTTGTATAGCAAAACGCGGCCCTGGCAGAACACACTCTTCTTCGCCTTCTATCC TGCCGCTTAGCGTGTTCCGTGTGATAGTTCAAGTACAACCACACTCTTAAGTTGGTCAAAAGAATGCTGGCTTCAGT TGTAATCAAAACTCCATCGCATCTAATCGTTCTGAGGAAATCATCCACGGTAGCATATGCAAATCCCAACCAAGCAA TGCAACTGGATTGTGTTTCAAGCAGGAGAGGAGAGGGAAGAGACGGAAGAACCATGTTAATTTTTATTCCAAACGAT CTCGCAGTACTTCAAATTGTAGATCGCGCAGATGGCATCTCTCGCCCCCACTGTGTTGGTGAAAAAGCACAGCTAGA TCAAAAGAAATGCGATTTTCAAGGTGCTCAACGGTGGCTTCCAGCAAAGCCTCCACGCGCACATCCAAGAACAAAAG AATACCAAAAGAAGGAGCATTTTCTAACTCCTCAATCATCATATTACATTCCTGCACCATTCCCAGATAATTTTCAG CTTTCCAGCCTTGAATTATTCGTGTCAGTTCTTGTGGTAAATCCAATCCACACATTACAAACAGGTCCCGGAGGGCG CCCTCCACCACCATTCTTAAACACACCCTCATAATGACAAAATATCTTGCTCCTGTGTCACCTGTAGCGAATTGAGA ATGGCAACATCAATTGACATGCCCTTGGCTCTAAGTTCTTCTTTAAGTTCTAGTTGTAAAAACTCTCTCATATTATC ACCAAACTGCTTAGCCAGAAGCCCCCCGGGAACAAGAGCAGGGGACGCTACAGTGCAGTACAAGCGCAGACCTCCCC AATTGGCTCCAGCAAAAACAAGATTGGAATAAGCATATTGGGAACCGCCAGTAATATCATCGAAGTTGCTGGAAATA TAATAAGGCAGAGTTTCTTGTAAAAATTGAATAAAAGAAAAATTTGCCAAAAAAACATTCAAAACCTCTGGGATGCA AATGCAATAGGTTACCGCGCTGCGCTCCAACATTGTTAGTTTTGAATTAGTCTGCAAAAATAAAAAAAAAAACAAGC GTCATATCATAGTAGCCTGACGAACAGATGGATAAATCAGTCTTTCCATCACAAGACAAGCCACAGGGTCTCCAGCT CGACCCTCGTAAAACCTGTCATCATGATTAAACAACAGCACCGAAAGTTCCTCGCGGTGACCAGCATGAATAATTCT TGATGAAGCATACAATCCAGACATGTTAGCATCAGTTAACGAGAAAAAACAGCCAACATAGCCTTTGGGTATAATTA TGCTTAATCGTAAGTATAGCAAAGCCACCCCTCGCGGATACAAAGTAAAAGGCACAGGAGAATAAAAAATATAATTA TTTCTCTGCTGCTGTTCAGGCAACGTCGCCCCCGGTCCCTCTAAATACACATACAAAGCCTCATCAGCCATGGCTTA CCAGACAAAGTACAGCGGGCACACAAAGCACAAGCTCTAAAGTGACTCTCCAACCTCTCCACAATATATATATACAC AAGCCCTAAACTGACGTAATGGGAGTAAAGTGTAAAAAATCCCGCCAAACCCAACACACACCCCGAAACTGCGTCAC CAGGGAAAAGTACAGTTTCACTTCCGCAATCCCAACAGGCGTAACTTCCTCTTTCTCACGGTACGTGATATCCCACT AACTTGCAACGTCATTTTCCCACGGTCGCACCGCCCCTTTTAGCCGTTAACCCCACAGCCAATCACCACACGATCCA CACTTTTTAAAATCACCTCATTTACATATTGGCACCATTCCATCTATAAGGTATATTATTGATGATG

[0610] GenBank Accession No. YP_002213828 MTKRVRLSDSFNPVYPYEDESTSQHPFINPGFISPNGFTQSPNGVLTLKCLTPLTTTGGSLQLKVGGGLTVDDTNGF LKENISATTPLVKTGHSIGLPLGAGLGTNENKLCIKLGQGLTENSNNICIDDNINTLWTGVNPTEANCQIMNSSESN DCKLILTLVKTGALVTAFVYVIGVSNNENMLTTHRNINFTAELFFDSTGNLLTRLSSLKTPLNHKSGONMATGAITN AKGFMPSTTAYPFNDNSREKENYIYGTCYYTASDRTAFPIDISVMLNRRAINDETSYCIRITWSWNTGDAPEVQTSA TTLVTSPFTFYYIREDD

[0611] GenBank Accession No. YP_002213807 MRRVVLGGAVVYPEGPPPSYESVMQQQQATAVMOSPLEAPFVPPRYLAPTEGRNSIRYSELAPQYDTTRLYLVDNKS ADIASLNYQNDHSNFLTTVVONNDFTPTEASTQTINFDERSRWGGOLKTIMHTNMPNVNEYMESNKFKARVMVSRKP PDGAAVGDTYDHKQDILKYEWFEFTLPEGNFSVTMTIDLMNNAIIDNYLKVGRONGVLESDIGVKFDTRNFKLGWDP ETKLIMPGVYTYEAFHPDIVLLPGCGVDFTESRLSNLLGIRKKOPFQEGFKILYEDLEGGNIPALLDVDAYENSKKE QKAKIEAATAAAEAKANIVASDSTRVANAGEVRGDNFAPTPVPTAESLLADVSEGTDVKLTIQPVEKDSKNRSYNVL EDKINTAYRSWYLSYNYGDPEKGVRSWTLLTTSDVTCGAEQVYWSLPDMMKDPVTFRSTRQVSNYPVVGAELMPVFS KSFYNEQAVYSQQLRQSTSLTHVFNRFPENQILIRPPAPTITTVSENVPALTDHGTLPLRSSIRGVQRVTVTDARRR TCPYVYKALGIVAPRVLSSRTF

[0612] GenBank Accession No. YP_002213812 MATPSMLPQWAYMHIAGQDASEYLSPGLVQFARATDTYFNLGNKERNPTVAPTHDVTTDRSQRLMLRFVPVDREDNT YSYKVRYTLAVGDNRVLDMASTFFDIRGVLDRGPSFKPYSGTAYNSLAPKGAPNTSQWIAEGVKNTTGEEHVTEEET NTTTYTEGNAPVKAEAEITKEGLPVGLEVSDEESKPIYADKTYQPEPQLGDETWTDLDGKTEKYGGRALKPDTKMKP CYGSFAKPTNVKGGQAKOKTTEQPNQKVEYDIDMEFFDAASQKTNLSPKIVMYAENVNLETPDTHVVYKPGTEDTSS EANLGQQSMPNRPNYIGFRDNFIGLMYYNSTGNMGVLAGQASQLNAVVDLQDRNTELSYQLLLDSLGDRTRYFSMWN QAVDSYDPDVRVIENHGVEDELPNYCFPLDGIGVPTTSYKSIVPNGDNAPNWKEPEVNGTSEIGOGNLFAMEINLQA NLWRSFLYSNVALYLPDSYKYTPSNVTLPENKNTYDYMNGRVVPPSLVDTYVNIGARWSLDAMDNVNPFNHHRNAGL RYRSMLLGNGRYVPFHIQVPQKFFAVKNLLLLPGSYTYEWNFRKDVNMVLQSSLGNDLRVDGASISFTSINLYATFF PMAHNTASTLEAMLRNDTNDQSFNDYLSAANMLYPIPANATNIPISIPSRNWAAFRGWSFTRLKTKETPSLGSGFDP YFVYSGSIPYLDGTFYLNHTFKKVSIMFDSSVSWPGNDRLLSPNEFEIKRTVDGEGYNVAQCNMTKDWFLVOMLANY NIGYQGFYIPEGYKDRMYSFFRNFQPMSRQVVDEVNYKDFKAVAIPYQHNNSGFVGYMAPTMRQGQPYPANYPYPLI GTTAVNSVTQKKFLCDRTMWRIPFSSNFMSMGALTDLGQNMLYANSAHALDMTFEVDPMDEPTLLYLLFEVFDVVRV HQPHRGIIEAVYLRTPFSAGNATT

[0613] GenBank Accession No. AY803294 (SEQ ID NO: 212) CATCATCAATAATATACCTTATAGATGGAATGGTGCCAATATGTAAATGAGGTGATTTTAAAAAGTGTGGGCTGTGT GGTAATTGGCTGTGGGGTTAACGGCTAAAAGGGGCGGCGCGGCCGTGGGAAAATGACGTTTTTTGGGGGTGGAGTGT TTTTGCAAGTTGTCGCGGTAAATGTGACGCAAACAAAGGCTTTTTTTTTACGGAACTACTTAGTGTTCCCACGGTAT TTAACAGGAAATGAGGTAGTTTTGGCCGGATGCAAGTAAAAATTGTTCATTTTCGCGCGAAAACTGAATGAGGAAGT GGTTTTCTGAATAATGCGGTATTTATGGCAGGGTGGAGTATTTGTTCAGGGCCAGGTAGACTTTGACCCATTACGTG GAGGTTTCGATTACCGCGGAGGTTTCGATTACCGTGTTTTTTACCTAAATTTCCGCGTACCGTGTGAAAGTCTTCTG TTTTTACGTAGGTGTCAGCTGATCGCTACGGTATTTATACCTCAGGGTTTGTGTCAAGAGGCCACTCTTGAGTGCCA GCGAGAAGAGTTTTCTCCTCTGCGCCGGCAGTTTAATATTAAAAAAAATGAGACACTTGCGATTTATGCCTCAGGAA ATAATTTCTGCTGAGACTGGAAACGAAATACTGGAGTTTGTGGTGCACGCCCTGATGGGAGACGATCCGGAGCCACC TGTGCAGCTTTTTGAGCCTCCTACGCTTCAGGAACTGTATGATTTAGAGGTAGAGGGATCGGAGGATTCTAATGAGG AAGCTGTGAATGGCTTTTTTACCGATTCTATGCTTTTAGCTGCTAATGAAGGATTAGAATTAGATCCGCCTTTGGAC ACTTTCGATACTCCAGGGGTGATTGTGGAAAGCGGTACAGCTGTAAGAAAATTACCTGATTTGGGTTCCGTGGACTG TGATTTGCACTGCTATGAAGACGGGTTTCCTTTGAGTGATGAGGAGGACCATGAAAAGGAGCAGTCTATGCAGACTG CAGCGGGTGAGGGAGTGAAGGCTGCCATTGGTTTTCAGTTGGATTGCCCGGAGCTTCCTGGACATGGCTGTAAGTCT TGTGAATTTCACAGGAAAAATACTGGAGTAAAGGAACTGTTATGTTCGCTTTGTTATATGAGAGCGCACTGCCACTT TATTTACAGTAAGTGTGTTTAAGTTAAAATTTAAAGGAATATGCTGTTTTTCACATGTATATTGAGTGGGAAATTTG TGCTTCTTATTATAGGTCCTGTGTCTGATGCTGATGAGTCACCATCTCCTGATTCTACTACCTCACCTCCTGAGATT CAAGCACCTGTTCCTGTGGACGTGCACAAGCCCATTCCTGTAAAGCTTAAGCCTGGAAAACGTCCAGCAGTGGAAAA ACTCGAGGACTTGTTACAGGGTGGGGACGGACCTTTGGACTTGAGTACACGGAAACGGCCAAGACAATAAGTGTTCC ATATCCGTGTTTACTTAAGGTGACGTCAATATTTGTGTGAGAGTGCAATGTAATAAAAATATGTTAACTGTGTACTG GTTTTTATTGCTTTTTGGGGGGGGACTCAGGTATATAAGTAGAAGCAGACCTGTGTGGTTAGCTCATAGAAGCTGGC TTTGATTCATGGAGGTTTGGGCCATTTTGGAAGACCTTAGAAAGACTAGGCAACTGTTAGAGAACGCTTCGGACGGA GTCTCCGGTTTTTGGAGATTCTGGTTCGCTAGTGAATTAGCTAGGGTAGTTTTTAGGATAAAACAGGACTATAAAGA AGAATTTGAAAAGTTGTTGGTAGATTGTCCAGGACTTTTTGAAGCTCTTAATTTGGGCCATCAAGTTCACTTTAAAG AAAAAGTTTTATCAGTTTTAGACTTTTCGACCCCAGGTAGAACTGCCGCTGCTGTGGCTTTTCTTACTTTTATATTA GATAAATGGATCCCGCAGACTCATTTCAGCAGGGGATACGTTTTGGATTTCGTAGCCACAGCATTGTGGAGAACATG GAAGGTTCGCAAGATGAGGACAATCTTAGGTTACTGGCCAGTGCAGCCTTTGGGTGTAGCGGGAATCCTGAGGCATC CACCGGTCATGCCAGCGGTTCTGGAGGAGGAACAGCAAGAGGACAACCCGAGAGCCGGCCTGGACCCTCCAGTGGAG GAGGCGGAGTAGCTGACTTGTCTCCTGAACTGCAACGGGTGCTTACTGGATCTACGTCCACTGGACGGGATAGGGGC GTTAAAAGGGAGAGGGCATCTAGTGGTACTGATGCTAGATCTGAGTTGGCTTTAAGTTTAATGAGTCGCAGACGTCC TGAAACCATTTGGTGGCATGAGGTCCAGAAAGAGGGAAGGGATGAAGTTTCTGTATTGCAGGAGAAATATTCACTGG AACAGGTGAAAACATGTTGGTTGGAGCCTGAGGATGATTGGGAGGTGGCCATTAAAAATTATGCCAAGATAGCTTTG AGGCCTGATAAACAGTATAAGATTACTAGACGGATTAATATCCGGAATGCTTGTTACATATCTGGAAATGGGGCTGA GGTGGTAATAGATACTCCAGACAAGACAGTTATTAGATGCTGCATGATGGATATGTGGCCTGGAGTAGTCGGTATGG AAGCAGTAACTTTTGTAAATGTTAAGTTTAGGGGAGATGGTTATAATGGAATAGTGTTTATGGCCAATACCAAACTT ATATTGCATGGTTGTAGCTTTTTTGGTTTTAACAATACCTGTGTAGATGCCTGGGGACAGGTTAGTGTACGGGGATG TAGTTTCTATGCGTGTTGGATTGCCACAGCTGGCAGAACCAAGAGTCAATTGTCTCTGAAGAAATGCATATTCCAAA GATGTAACCTGGGCATTCTTAATGAAGGCGAAGCAAGGGTCCGCCACTGCGCTTCTACAGATACTGGATGTTTTATT TTAATTAAGGGCAATGCCAGCGTAAAGCATAACATGATTTGCGGTGCTTCCGATGAGAGGCCTTATCAAATGCTCAC TTGTGCCGGAGGGCATTGTAACATGCTGGCTACTGTGCATATTGTTTCTCATCAACGCAAAAAATGGCCTGTTTTTG ATCACAATGTGTTGACCAAGTGTACCATGCATGCAGGTGGGCGTAGAGGAATGTTTATGCCTTACCAGTGTAACATG AATCATGTAAAAGTGTTGTTGGAACCAGATGCCTTTTCCAGAATGAGTCTAACAGGAATGTTTGACATGAACATGCA AATCTGGAAGATCCTGAGGTATGATGATACAAGATCGAGGGTGCGCGCATGCGAATGCGGAGGCAAGCATGCCAGGT TCCAGCCGGTGTGTGTAGATGTGACTGAAGATCTGAGACCGGATCATTTGGTTATTGCCCGCACTGGAGCAGAGTTC GGATCCAGTGGAGAAGAAACTGACTAAGGTGAGTATTGGGAAAACTTTGGGGTGGGATTTTCAGATGGACAGATTGA GTAAAAATTTGTTTTTCTGTCTTGCAGCTGTCATGAGTGGAAACGCTTCTTTTAATGGGGGAGTCTTCAGCCCTTAT CTGACAGGGCGTCTCCCATCCTGGGCAGGAGTTCGTCAGAATGTTATGGGATCTACTGTGGATGGAAGACCCGTCCA ACCCGCCAATTCTTCAACGCTGACCTATGCTACTTTAAGTTCTTCACCTTTGGACGCAGCTGCAGCCGCCGCTGCCG CCTCTGTTGCCGCTAACACTGTGCTTGGAATGGGTTACTATGGAAGCATCCTGGCTAATTCCACTTCCTCTAATAAC CCTTCTACCCTGACTCAGGACAAGTTACTTGTCCTTTTGGCCCAGCTGGAGGCTTTGACCCAACGTCTGGGTGAACT TTCTCAGCAGGTGGCCGAGTTGCGAGTACAAACTGAGTCTGCTGTCGGCACGGCAAAGTCTAAATAAAAAAAAAAAA TTCCAGAATCAATGAATAAATAAACGAGCTTGTTGTTGATTTAAAATCAAGTGTTTTTTATTTCATTTTTCGCGCAC GGTATGCCCTAGACCACCGATCTCGATCATTGAGAACACGGTGGATTTTTTCCAAAATCCTATAAAGGTGGGATTGA ATGTTTAGATACATGGGCATTAGGCCGTCTTTGGGGTGGAGATAGCTCCATTGAAGGGATTCATGCTCCGGGGTAGT GTTGTAAATTACCCAGTCATAACAAGGTCGCTGTGCATGGTGTTGCACAATATCTTTTAGAAGTAGGCTGATTGCCA CAGATAAGCCCTTGGTGTAGGTGTTTACAAACCGGTTGAGCTGGGAGGGGTGCATTCGGGGTGAAATTATGTGCATT TTGGATTGGATTTTTAAGTTGGCAATATTGCCGCCAAGATCTCGTCTTGGGTTCATGTTATGAAGTACCACCAAGAC GGTGTATCCGGTACATTTAGGAAATTTATCGTGCAGCTTGGATGGAAAAGCGTGGAAAAATTTGGAGACACCCTTGT GTCCTCCGAGATTTTCCATGCACTCATCCATGATAATAGCAATAGGGCCGTGGGCAGCAGCGCGGGCAAACACGTTC CGTGGGTCTGACACATCATAGTTATGTTCCTGAGTTAAATCATCATAGGCCATTTTAATAAATTTGGGACGGAGAGT ACCCGATTGGGGTATGAATGTTCCTTCGGGCCCCGGAGCATAGTTCCCCTCACAGATTTGCATTTCCCAAGCTTTCA GTTCCGAGGGTGGAATCATGTCCACCTGGGGGGCTATAAAGAACACCGTTTCTGGGGCTGGGGTAATTAGTTGGGAT GATAGCAAGTTTCTGAGCAATTGAGATTTGCCACATCCGGTGGGGCCATAAATGATTCCGATTACAGGTTGCAGTTG GTAGTTTAGGGAACGGCAACTGCCGTCTTCTCGAAGCAAGGGGGCCACCTCGTTCATCATTTCCCTTACATGCATAT TTTCCCGCACCAAATCCATTAGGAGGCGCTCTCCTCCTAGTGATAGAAGTTCTTGTAGTGAGGAAAAGTTTTTCAGC GGTTTTAGACCGTCAGCCATGGGCATTTTGGAGAGAGTCTGTTGCAAAAGTTCTAGTCTGTTCCACAGTTCAGTGAT GTGTTCTATGGCATCTCGATCCAGCAGACCTCCTCGTTTCGCGGGTTTGGACGGCTCCTGGAGTAGGGTATGAGACG ATGGGCGTCCAGCGCTGCCAGGGTTCGGTCCTTCCAGGGTCTCAAAGTTCGGGTCAGGGTTGTTTCCGTCACAGTGA AGGGGTGTGCGCCTGCTTGGGCGCTTGCCAGGGTGCGCTTCAGACTCATCCTGCTGGTCGAAAACTTGTGCCGCTTG GCGCCCTGTATGTCGGCCAAGTAGCAGTTTACCATGAGTTCGTAGTTGAGCGCCTCGGCTGCGTGGCCCTTGGCGCG GAGCTTACCTTTGGAAGTTTTCTTGCATACCGGGCAGTATAGGCATTTCAGCGCATACAGCTTGGGCGCAAGGAAAA TGGATTCTGGGGAGTATGCATCCGCGCCGCAGGAGGCGCAAACAGTTTCACATTCCACCAGCCAGGTTAAATCCGGT TCATTGGGGTCAAAAACAAGTTTTCCGCCATATTTTTTGATGCGTTTCTTACCTTTGGTCTCCATGAGTTCGTGTCC TCGTTGAGTGACAAACAGGCTGTCCGTGTCCCCGTAGACTGATTTTACAGGCCTCTTTTCCAGTGGAGTGCCTCGGT CTTCTTCGTATAGGAACTCTGACCACTCTGATACAAAGGCGCGCGTCCAGGCCAGCACAAAGGAGGCTATGTGGGAG GGGTAGCGATCGTTGTCAACCAGGGGGTCCACCTTTTCCAAAGTATGCAAACACATGTCACTCTCTTCAACATCCAG GAATGTGATTGGCTTGTAGGTGTATTTCACGTGACCTGGGGTCCCAGCTGGGGGGGTATAAAAGGGGGCGGTTCTCT GCTCTTCCTCACTGTCTTCCGGATCGCTGTCCAGGAACGTCAGCTGTTGGGGTAGGTATTCCCTCTCGAAGGGGGC ATGACCTCTGCACTCAGGTTGTCAGTTTCTAAGAACGAGGAGGATTTGATATTGACAGTGCCGCTTGAGATGCCTTT CATGAGGTTTTCGTCCATTTGGTCAGAAAACACAATTTTTTTATTGTCAAGTTTGGTGGCAAATGATCCATACAGGG CGTTGGATAAAAGTTTGGCAATGGATCGCATGGTTTGGTTCTTTTCCTTGTCCGCGCGCTCTTTGGCAGCGATGTTG AGTTGGACATATTCGCGTGCCAGGCACTTCCATTCGGGGAAGATAGTTGTCAATTCATCTGGCACAATTCTCACTTG CCACCCTCGGTTATGCAAGGTAATTAAATCCACACTGGTGGCCACCTCGCCTCGAAGGGGTTCGTTGGTCCAGCAGA GCCTACCTCCTTTCCTAGAACAGAAAGGTGGAAGTGGGTCTAGCATAAGTTCATCGGGAGGGTCTGCATCCATGGTA AAGATTCCAGGAAGTAAATCCTTATCAAAATAGCTGATGGGAGTGGGGTCATCTAAGGCCATTTGCCATTCTCGAGC TGCCAGTGCGCGCTCATATGGGTTAAGGGGACTGCCCCAGGGCATGGGATGGGTGAGTGCAGAGGCATACATGCCAC AGATGTCATAGACGTAGATGGGATCCTCAAAGATGCCTATGTAGGTTGGATAGCATCGCCCCCCTCTGATACTTGCT CGCACATAGTCATATAGTTCATGTGACGGCGCTAGCAGCCCCGGACCCAAGTTGGTGCGATTGGGTTTTTCTGTTCT GTAGACAATCTGGCGAAAGATGGCGTGAGAATTGGAAGAGATGGTGGGTCTTTGAAAAATGTTGAAGTGGGCATGAG GTAGACCTACAGAGTCTCTGATAAAGTGGGCATAAGATTCTTCAAGCTTGGTTACCAGTTGGGCGGTGACAAGTACG TCCAGGGCGCAGTAGTCAAGTGTTTCTTGAATGATGTCATAACCTGGTTGGTTTTTCTTTTCCCACAGTTCGCGGTT GAGAAGGTATTCTTCGCGATCCTTCCAGTACTCTTCTAGCGGAAACCCGTCTTTGTCTGCACGGTAAGATCCTAGCA TGTAGAACTGATTAACTGCCTTGTAAGGGCAGCAGCCCTTCTCTACGGGTAGAGAGTATGCTTGAGCAGCTTTTCGT AGCGAAGCGTGAGTAAGGGCGAAGGTGTCTCTAACCATGACTTTGACAAATTGGTATTTAAAGTCCATGTCGTCACA GGCTCCCTGTTCCCAGAGTTGGAAGTCTACCCGTTTCTTGTAGGCGGGGTTGGGCAAAGCGAAAGTAACATCGTTGA AGAGAATCTTACCGGCTCTGGGCATAAAATTGCGAGTGATGCGAAAAGGCTGTGGTACTTCCGCTCGATTGTTGATC ACCTGGGCAGCTAGGACGATCTCGTCGAAGCCGTTGATGTTGTGTCCTACAATGTATAATTCTATGAAACGCGGCGT GCCTCTGACGTGAGGTAGCTTATTGAGCTCATCAAAGGTTAGGTCTGTAGGGTCAGATAAGGCGTAGTGTTCAAGGG CCCATTCGTGCAGATGAGGATTTGCATGTAGGAATGATGACCAAAGATCCACCGCCAGTGCTGTTTGTAACTGGTCC CGATACTGACGAAAATGCTGGCCAATTGCCATTTTTTCTGGAGTGACACAGTAGAAGGTTCCGGGATCTTGTTGCCA TCGATCCCACTTAAGTTTAATGGCTAGATCGTGGGCCATGTTGACGAGACGCTCTTCTCCTGAGAGTTTCATGACCA GCATGAAAGGAACTAGTTGTTTGCCAAAGGACCCCATCCAGGTGTAAGTTTCCACATCGTAGGTCAGGAAGAGTCTT TCTGTGCGAGGATGAGAGCCGATTGGGAAAAACTGGATTTCCTGCCACCAGTTGGAGGATTGGCTGTTGATGTGATG GAAGTAGAAGTTTCTGCGGCGCGCCGAGCATTCGTGTTTGTGCTTGTACAGACGGCCGCAGTAGTCGCAGCGTTGCA CGGGTTGTATCTCGTGAATGAGCTGTACCTGGCTTCCCTTGACGAGAAATTTCAGTGGGAAGCCGAGGCCTGGCGAT TGTATCTCGTGCTCTTCTATATTCGCTGTATTGGCCTGTTCATCTTCTGTTTCGATGGTGGTCATGCTGACGAGCCC CCGCGGGAGGCAAGTCCAGACCTCGGCGCGGGAGGGGCGGAGCTGAAGGACGAGAGCGCGCAGGCTGGAGCTGTCCA GAGTCCTGAGACGCTGCGGACTCAGGTTAGTAGGTAGGGACAGAAGATTAACTTGCATGATCTTTTCCAGGGCGTGC GGGAGGTTTAGATGGTACTTGATTTCCACAGGTTCGTTTGTAGAGACGTCAATGGCTTGCAGGGTTCCGTGTCCTTT GGGTGCCACTACCGTACCTTTGTTTTTTCTTTTGATCGGTGGTGGCTCTCTTGCTTCTTGCATGCTTAAAAGCGGTG ACGGGGACGCGCGCCGGGCGGCAGCGGTTGTTCCGGACCCGGGGGCATGGCTGGTAGTGGCACGTCGGCGCCGCGCA CGGGCAGGTTCTGGTACTGCGCTCTGAGAAGACTTGCGTGCGCCACCACGCGTCGATTGACGTCTTGTATCTGACGT CTTTGGGTGAAAGCTACCGGCCCCGTGAGCTTGAACCTGAAAGAGAGTTCAACAGAATCAATTTCGGTATCGTTAAC GGCAGCTTGTCTCAGTATTTCTTGTACGTCACCAGAGTTGTCCTGGTAGGCGATCTCCGCCATGAACTGCTCGATTT CTTCCTCCTGAAGATCTCCGCGACCCGCTCTCTCGACGGTGGCCGCGAGGTCATTGGAGATACGGCCCATGAGTTGG GAGAATGCATTCATGCCCGCCTCGTTCCAGACGCGGCTGTAAACCACGGCCCCCTCGGAGTCTCTTGCGCGCATCAC CACCTGAGCGAGGTTAAGCTCCACGTGTCTGGTGAAGACCGCATAGTTGCATAGGCGCTGAAAAAGGTAGTTGAGTG TGGTGGCGATGTGTTCGGCGACAAAGAAATACATGATCCATCGTCTCAGCGGCATTTCGCTGACATCGCCCAGAGCT TCCAAGCGCTCCATGGCCTCGTAGAAGTCCACGGCAAAATTAAAAAACTGGGAGTTTCGCGCGGACACGGTCAATTC CTCCTCGAGAAGACGGATGAGTTCGGCTATGGTGGCCCGTACTTCGCGTTCGAAGGCTCCCGGCATCTCTTCTTCCT CTTCTATCTCTTCTTCCACTAACATCTCTTCTTCGTCTTCAGGCGGGGGGGGAGGGGGCACGCGGCGACGTCGACGG CGCACGGGCAAACGGTCGATGAATCGTTCAATGACCTCTCCGCGGCGGCGGCGCATGGTTTCAGTGACGGCGCGGCC GTTCTCGCGCGGTCGCAGAGTAAAAACACCGCCGCGCATCTCCTTAAAGTGGTGACTGGGAGGTTCTCCGTTTGGGA GGGAAAGGGCGCTGATTATACATTTTATTAATTGGCCCGTAGGGACTGCGCGCAGAGATCTAATCGTGTCAAGATCC ACGGGATCTGAAAACCTTTCAACGAAAGCGTCTAACCAGTCACAGTCACAAGGTAGGCTGAGTACGGCTTCTTGTGG GCGGGGGTGGTTATGTGTTCGGTCTGGGTCTTCTATTCCTTCTTCATCTCGGGAAGGTGAGACGATGCTGCTGGTGA TGAAATTAAAGTAGGCAGTTCTAAGACGGCGGATGGTGGCGAGGAGCACCAGGTCTTTGGGTCCGGCTTGCTGGATA CGCAGGCGATTGGCCATTCCCCAAGCATTATCCTGACATCTAGCCAGATCTTTGTAGTAGTCTTGCATGAGCCGTTC TACGGGCACTTCTTCTTCACCCGTTCTGCCATGCATACGTGTGAGTCCAAACCCGCGCATTGGTTGGACCAGTGCCA AGTCAGCTACAACTCTTTCGGCGAGGATGGCTTGCTGTACTTGGGTGAGGGTGGCTTGAAAGTCATCAAAATCCACG AAGCGGTGGTAAGCCCCGGTATTGATGGTGTAAGCACAGTTGGCCATGACTGACCAGTTAACTGTTTGGTGACCATG GCGCACGAGCTCGGTGTATTTAAGGCGCGAATAGGCGCGGGTGTCAAAAATGTAATCGTTGCAGGTGCGCACCAGAT ACTGGTACCCTATAAGAAAATGCGGTGGTGGTTGGCGGTAGAGAGGCCATTGTTCTGTAGCTGGAGCGCCGGGGGCG AGGTCTTCCAACATAAGGCGGTGATAGCCGTAGATGTACCTGGACATCCAGGTGATTCCTGCGGCGGTAGTGGAAGC CCGAGGAAACTCGCGTACGCGGTTCCAAATGTTGCGTAGCGGCATGAAGTAGTTCATTGTAGGCACGGTTTGACCAG TGAGGCGCGCGCAGTCATTGATGCTCTATAGACACGAAGAAAATGAAAGCGTTCAGCGACTCGACTCTGTAGCCTGG AGGAACGTGAACGGGTTGGGTCGCGGTGTACCCCGGTTCAAGACTTGTACTCGAGCCGGCCGGAGCCGCGGCTAACG TGGTATTGGCACTCCCGTCTCGACCCAGCCTACAAAAATCCAGGATACGGAATCGAGTCGTTTTGCTGGTTGCTGAA TGGCAGGGAAGTGAGTCCTATTTTTTTTTTTGCCGCTCAGATGCATCCCGTGCTGCGACAGATGCGTCCCCAACAAC AGCCCCCCTCGCAGCAGCAGCAACCACAAAAGGCTGTCCCTGCAACTACTGCAACTGCCGCCGTGAGCGGTGCGGGA CAGCCCGCCTATGATCTGGACTTGGAAGAGGGCGAAGGACTGGCACGTCTAGGTGCGCCCTCGCCCGAGCGGCATCC GCGAGTTCAACTGAAAAAAGATTCTCGCGAGGCGTATGTGCCCCAACAGAACCTATTTAGAGACAGAAGCGGCGAGG AGCCGGAGGAGATGCGAGCTTCCCGCTTTAACGCGGGTCGTGAGCTGCGTCACGGTTTGGACCGAAGACGAGTGTTG CGGGACGAGGATTTCGAAGTTGATGAAGTGACAGGGATCAGTCCTGCCAGGGCACACGTGGCTGCAGCCAACCTTGT ATCGGCTTACGAGCAGACAGTAAAGGAAGAGCGTAACTTCCAAAAGTCTTTTAATAATCATGTGCGAACCCTGATTG CCCGCGAAGAAGTTACTCTTGGTTTGATGCATTTGTGGGATTTGATGGAAGCTATCATTCAGAACCCTACTAGCAAA CCTCTGACCGCACAGCTGTTTCTGGTGGTGCAACACAGCAGAGACAACGAGGCTTTCAGAGAGGCACTGCTCAACAT CACTGAACCCGAGGGGAGATGGTTGTATGATCTTATCAACATTCTACAGAGTATCATAGTGCAGGAGCGGAGCCTGG GCCTGGCCGAAAAGGTGGCTGCCATCAATTACTCGGTTTTAAGTTTGGGAAAATATTACGCTCGCAAGATCTACAAG ACTCCATACGTTCCCATAGACAAGGAGGTGAAGATAGATGGGTTCTACATGCGTATGACGCTCAAGGTCTTGACCCT GAGCGATGATCTTGGGGTGTACCGCAATGACAGAATGCATCGCGCCGTTAGCGCCAGTAGGAGGCGCGAGTTAAGCG ACAGGGAACTGATGCACAGTTTGCAAAGAGCTCTGACTGGAGCTGGAACAGAGGGTGAGAATTACTTTGACATGGGA GCTGACTTGCAGTGGCAGCCTAGTCGCAGGGCTCTGAGCGCCGCGACGGCAGGATGTGAGCTTCCTTACATAGAAGA GGCGGATGAAGGCGAGGAGGAAGAGGGCGAGTACTTGGAAGACTGATGGCACAACCCGTGTTTTTTGCTAGATGGAA CAGCAAGCACCGGATCCCGCAACGCGGGCGGCGCTGCAGAGCCAGCCGTCCGGCATTAACTCCTCGGACGATTGGAC CCAGGCCATGCAACGTATCATGGCGTTGACGACTCGCAACCCCGAAGCCTTTAGACAGCAACCCCAGGCCAACCGTC TATCGGCCATCATGGAAGCTGTAGTGCCTTCCCGCTCTAATCCCACTCATGAGAAGGTCCTGGCCATTGTAAACGCG TTGGTGGAGAACAAAGCTATTCGTCCAGATGAGGCCGGACTGGTATACAACGCTCTTTTAGAACGCGTGGCTCGCTA CAACAGTAGCAATGTGCAAACCAATTTGGACCGTATGATAACAGATGTACGCGAAGCCGTGTCTCAGCGTGAAAGGT TCCAGCGCGATGCCAACCTTGGTTCGCTGGTGGCGTTAAATGCTTTTTTGAGTACTCAGCCTGCTAATGTGCCGCGT GGTCAACAGGATTATACTAACTTTTTGAGTGCGTTGAGACTGATGGTATCTGAAGTACCTCAGAGCGAAGTGTATCA GTCCGGACCTGACTACTTCTTTCAGACTAGCAGACAGGGTTTGCAGACGGTAAATCTGAGCCAAGCTTTTAAAAACC TTAAAGGTTTGTGGGGAGTGCATGCCCCGGTAGGAGAAAGAGCAACCGTGTCTAGCTTGTTAACTCCAAACTCCCGC CTATTACTACTGTTGGTAGCTCCTTTCACCGACAGCGGCAGCATCGACCGTAATTCCTATTTGGGTTACCTACTAAA CCTGTATCGCGAAGCCATAGGGCAAAGCCAGGTGGACGAGCAGACCTATCAAGAAATTACCCAAGTCAGTCGCGCTT TGGGTCAGGAAGACACTGGCAGTTTGGAAGCCACTCTGAACTTCTTGCTTACCAATCGGTCTCAGAAGATCCCTCCT CAATATGCTCTTACTGCGGAGGAGGAGAGGATCCTTAGATATGTGCAGCAGAGCGTGGGATTGTTTCTGATGCAAGA GGGGGCAACTCCGACTGCGGCATTGGACATGACAGCGCGAAATATGGAGCCCAGCATGTATGCCAGTAACCGGCCTT TCATTAACAAACTGCTGGACTACTTGCACAGAGCTGCCGCTATGAACTCTGATTATTTTACCAATGCCATCCTAAAC CCGCACTGGCTGCCCCCACCTGGTTTCTACACGGGCGAATATGACATGCCCGACCCTAATGACGGGTTTCTGTGGGA CGACGTGGACAGTAATGTTTTTTCACCTCTTTTTGATCATCGCACGTGGAAAAAGGAAGGCGGCGATAGAATGCATT CTTCTGCATCGCTGTCCGGGGTCATGGGTGCTACCGCGGCTGAGCCCGAGTCTGCAAGTCCTTTTCCTAGTCTACCC TTTTCTCTACACAGTGTACGTAGCAGCGAAGTGGGTAGAATAAGTCGCCCGAGTTTAATGGGCGAAGAGGAATACCT AAACGATTCCTTGCTCAGACCGGCGAGAGAAAAAAATTTCCCAAACAATGGAATAGAAAGTTTGGTGGATAAGATGA GTAGATGGAAGACTTATGCTCAGGATCACAGAGACGAGCCTGGGATCATGGGGACTACAAGTAGAGCGAGCCGTAGA CGCCAGCGTCATGACAGACAGAGGGGTCTTGTGTGGGAAGATGAGGATTCGGCCGATGATAGCAGCGTGTTGGACTT GGGTGGGAGAGGAAGGGGCAACCCGTTTGCTCATTTGCGCCCTCGCTTGGGTGGTATGTTGTAAAAAAAAAATAAAA AGGAAAACTCACCAAGGCCATGGCGACGAGCGTACGTTCGTTCTTCTTTATTATTTGTGTCTAGTATAATGAGGCGA GTCGTGCTAGGCGGAGCGGTGGTGTATCCGGAGGGTCCTCCTCCTTCGTACGAGAGCGTGATGCAGCAGCAGCAGGC GACGGCGGTGATGCAATCCCCACTGGAGGCTCCCTTTGTACCTCCGCGATACCTGGCACCTACGGAGGGCAGAAACA GCATTCGTTACTCGGAACTGGCACCTCAGTACGATACCACCAGGTTGTATCTGGTGGACAACAAGTCGGCGGACATT GCTTCTCTGAACTATCAGAATGACCACAGCAACTTCTTGACCACGGTGGTGCAGAACAATGACTTTACCCCTACGGA AGCCAGTACCCAGACCATTAACTTTGATGAACGATCGCGGTGGGGCGGTCAGCTAAAGACCATCATGCATACTAACA TGCCCAACGTAAACGAGTATATGTTTAGTAACAACTTCAAAGCGCGTGTGATGGTGTCCAGAAAACCTCCCGAAGGT GCTGCAGTTGGGGATACATATGATCACAAGCAGGATATTTTGGAATATGAGTGGTTCGAGTTTACTTTGCCAGAAGG CAACTTTTCAGTTACTATGACCATTGATTTGATGAACAATGCCATCATAGATAACTACTTGAAAGTGGGCAGACAGA ATGGAGTGCTTGAAAGTGACATTGGTGTTAAGTTCGACACCAGGAACTTCAAGCTGGGATGGGATCCCGAAACCAAG TTGATTATGCCTGGAGTGTATACGTATGAAGCCTTTCATCCTGACATTGTCTTACTGCCTGGCTGTGGAGTGGACTT TACCGAAAGTCGTTTGAGCAACCTTCTTGGTATCAGAAAAAAACAGCCATTTCAAGAGGGTTTTAAGATTTTGTATG AAGATTTAGAAGGAGGTAATATTCCGGCCCTCTTGGATGTAGATGCCTATGAGAACAGTAAGAAAGAACAAAAAGCC AAAATAGAAGCTGCTGCGGAAGCTAAGGCAAACATAGTTGCCAGCGACTTTACAAGGGTTGCTAACGCTGGAGAGGT CAGAGGAGACAATTTTGCACCAACACCTGTTCCGACTGCAGAATCATTATTGGCCGATGTAACTGGAGGAACGGACG TGAAACTCACTATTCAACCTGTAGAAAAAGATAGTAAGAATAGAAGCTATAATGTGTTGGAAGATAAAATCAACACA GCCTATCGCAGTTGGTACCTTTCGTACAATTATGGCGATCCCGAAAAAGGAGTGCGTTCCTGGACATTGCTCACCAC CTCAGATGTCACCTGCGGAGCAGAGCAGGTCTACTGGTCGCTTCCAGACATGATGCAGGATCCTGTCACTTTCCGCT CCACTAGACAAGTCAGCAACTACCCTGTGGTGGGTGCAGAGCTTATGCCCGTCTTCTCAAAGAGCTTCTACAACGAA CAAGCTGTGTACTCCCAGCAGCTCCGCCAGTCCACCTCGCTTACGCACGTCTTCAACCGCTTTCCTGAGAACCAGAT TTTAATCCGTCCGCCGGCGCCCACCATTACCACCGTCAGTGAAAACGTTCCTGCTCTCACAGATCACGGGACCCTGC CGTTGCGCAGCAGTATCCGGGGAGTCCAACGTGTGACCGTTACTGACGCCAGACGCCGCACCTGTCCCTACGTGTAC AAGGCACTGGGCATAGTCGCACCGCGCGTCCTTTCAAGCCGCACTTTCTAAAAAAATGTCCATTCTTATCTCGCCCA GTAATAACACCGGTTGGGGTCTGCGCGCTCCAAGCAAGATGTACGGAGGCGCACGCAAACGTTCTACCCAACATCCC GTGCGTGTTCGCGGTCATTTTCGCGCTCCATGGGGTGCCCTCAAGGGCCGCACTCGCGTTCGAACCACCGTCGATGA TGTAATCGATGAGGTGGTTGCCGACGCCCGTAATTATACTCCTACTGCGCCTACATCTACTGTGGATGCAGTTATTG ACAGTGTAGTGGCTGACGCTCGCAACTATGCTCGACGTAAGAGCCGGCGAAGGCGCATTGCCAGACGCCACCGAGCT ACCACTGCCATGCGAGCCGCAAGAGCTCTGCTACGAAGAGCTAGACGCGTGGGACGAAGAGCCATGCTTAGGGCGGC CAGACGTGCAGCTTCGGGCGCCAGCGCCGGCAGGTCCCGCAGGCAAGCAGCCGCTGTCGCAGCGGCGACTATTGCCG ACATGGCCCAAACGCGAAGAGGCAATGTATACTGGGTGCGTGACGCTGCCACCGGTCAACGTGTACCCGTGCGCACC CGTCCCCCTCGCACTTAGAAGATACTGAGCAGTCTCCGATGTTGTGTCCCAGCGGCGAGGATGTCCAAGCGCAAATA CAAGGAAGAAATGCTGCAGGTTATCGCACCTGAAGTCTACGGCCAACCGCTGAAGGATGAAAAAAAACCCCGCAAAA TCAAGCGGGCTAAAAAGGACAAAAAAGAAGAGGAAGATGGCGATGATGGGCTGGCGGAGTTTGTGCGCGAGTTTGCC CCACGGCGACGCGTGCAATGGCGTGGACGCAAAGTTCGACATTTGTTGAGACCTGGAACTTCGGTGGTCTTTACACC CGGCGAGCGTTCAAGCGCTACTTTTAAGCGTTCCTATGATGAGGTGTACGGGGATGATGATATTCTTGAGCAGGCGG CTGACCGATTAGGCGAGTTTGCTTATGGCAAGCGTAGTAGAATAAATCCCAAGGATGAGACAGTGTCCATACCCTTG GATCATGGAAATCCCACCCCTAGTCTTAAACCGGTCACTTTGCAGCAAGTGTTACCCGTAACTCCGCGAACAGGTGT TAAACGCGAAGGTGAAGATTTGTATCCCACTATGCAACTAATGGTACCCAAACGCCAAAAGTTGGAGGACGTTTTGG AGAAAGTAAAAGTGGATCCAGATATTCAACCTGAGGTTAAAGTGAGACCCATTAAGCAGGTAGCGCCTGGTCTGGGA GTACAAACTGTAGACATTAAGATTCCCACTGAAAGTATGGAAGTGCAAACTGAACCCGCAAAGCCTACTGCCACCTC CACTGAAGTGCAAACGGATCCATGGATGCCGATGCCTATTACAACTGACGCCGCCGGTCCCACTCGAAGATCCCGAC GAAAGTACGGTCCAGCAAGTCTGTTGATGCCCAACTATGTTGTACACCCATCTATTATTCCTACTCCTGGTTACCGA GGCACTCGCTACTATCGCAGCCGAAACAGTACCTCCCGCCGTCGCCGCAAGACACCTGCAAATCGCAGTCGTCGCCG TAGACGCACAAGCAAACCGACTCCCGGCGCCCTGGTGCGGCAAGTGTACCGCAATAGTAGTGCGGAACCTTTGACAC TGCCGCGTGCGCGTTACCATCCAAGTATCATCACTTAATCAATGTTGCCGCTGCCTCCTTGCAGATATGGCCCTCAC TTGTCGCCTTCGCGTTCCCATCACTGGTTACCGAGGAAGAAATTCGCGCCGTAGAAGAGGGATGTTGGGGCGCGGAA TGCGACGCTACAGGCGACGGCGTGCTATCCGCAAGCAATTGCGGGGTGGTTTTTTGCCAGCCTTAATTCCAATTATC GCTGCTGCAATTGGCGCGATACCAGGCATAGCTTCCGTGGCGGTTCAGGCCTCGCAACGACATTGACATTGGAAAAA AAAGTATAAATAAAAAAAAAAATACAATGGACTCTGACACTCCTGGTCCTGTGACTATGTTTTCTTAGAGATGGAAA ACATCAATTTTTCATCCTTGGCTCCGCGACACGGCACGAAGCCGTACATGGGCACCTGGAGCGACATCGGCACGAGC CAACTGAACGGGGGCGCCTTCAATTGGAGCAGTATCTGGAGCGGGCTTAAAAATTTTGGCTCAACCATAAAAACATA CGGGAACAAAGCTTGGAACAGCAGTACAGGACAGGCGCTTAGAAATAAACTTAAAGACCAGAACTTTCAACAAAAAG TAGTCGATGGGATAGCTTCCGGCATCAATGGAGTGGTAGATTTGGCTAATCAGGCTGTGCAGAAAAAGATAAACAGT CGTTTGGACCCGCCGCCAGCAACCCCAGGTGAAATACAAGTGGAGGAAGAAATTCCTCCGCCAGAAAAACGAGGCGA CAAGCGTCCGCGTCCCGATTTGGAAGAGACGCTGGTGACGCGCGTAGATGAACCGCCTTCTTATGAGGAAGCAACGA AGCTTGGAATGCCCACCACTAGACCGATAGCCCCTATGGCTACCGGGGTAATGAAACCTTCTCAGTTGCATCGACCC GTCACTTTGGATTTGCCCCCTCCCCCTGCTGCTACTGCTGTACCCGCTTCTAAGCCTGTCGCTGCCCCGAAACCAGT CGCCGTAGCCAGGTCACGTCCCGGGGGCGCTCCTCGTCCAAATGCGCACTGGCAAAATACTCTGAACAGCATCGTGG GTCTAGGCGTGCAAAGTGTAAAACGCCGTCGCTGCTTTTAATTAAATATGGAGTAGCGCTTAACTTGCCTATCTGTG TATATGTGTCATTACACGCCGTCACAGCAGCAGAGGAAAAAAGGAAGAGGTCGTGCGTCGACGCTGAGTTACTTTCA AGATGGCCACCCCATCGATGCTGCCCCAGTGGGCATACATGCACATCGCCGGACAGGATGCTTCGGAGTACCTGAGT CCGGGTCTGGTGCAGTTCGCCCGCGCCACAGACACCTACTTCAATCTGGGAAATAAGTTTAGAAATCCCACCGTAGC GCCAACCCACGATGTGACCACCGACCGTAGCCAGCGGCTCATGTTGCGCTTCGTGCCCGTTGACCGGGAGGACAATA CATACTCTTACAAAGTGCGGTACACCCTGGCCGTGGGCGACAACAGAGTGCTGGATATGGCCAGCACGTTCTTTGAC ATTAGGGGCGTGTTGGACAGAGGTCCCAGTTTCAAACCCTATTCTGGTACGGCTTACAACTCTCTGGCTCCTAAAGG CGCTCCAAATGCATCTCAGTGGTTGGATAAAGGGGTTGAAACTACTGAAGAACGGCAAAATGAAGACGGGGAAAATG ACGAAAAAGCTACATACACTTTTGGCAATGCCCCAGTAAAAGCCGATGCTGACATTACAAAAGACGGACTACCAATA GGTTTGGAAGTCCCAGCTGAAGGTGACCCTAAACCTATCTACGCTAATAAGCTTTACCAACCAGAACCCCAGGTGGG ACAGGAATCGTGGACTGATACAGATGGCACTGAAGAAAAATACGGAGGCAGAGTACTTAAACCGGACACTAAAATGA AACCGTGCTATGGGTCTTTTGCTAAACCTACTAATGTGAAAGGCGGACAGGCAAAAGTGAAAACAGAAGAAGGCAAC AACATTGAATATGACATTGACATGAACTTTTTTGACTTAAGATCACAAAAACAAGGTCTTAAACCTAAGATTGTAAT GTATGCAGAAAATGTGGACCTGGAATCTCCAGATACTCATGTTGTGTACAAACCTGAAGTTTCAGATGCTAGTTCAA ATGCTAATCTTGGACAGCAGTCTATGCCCAACAGACCCAACTACATTGGCTTCAGAGATAATTTTATTGGTCTTATG TACTATAACAGTACTGGTAACATGGGGGTGCTGGCTGGCCAAGCATCTCAGTTGAATGCAGTGGTTGACTTGCAGGA CAGAAACACAGAACTGTCTTACCAACTCTTGCTTGACTCCCTGGGCGATAGAACCAGATACTTTAGCATGTGGAATC AGGCTGTTGACAGTTATGATCCCGATGTGCGTGTTATTGAAAATCATGGTGTGGAAGATGAACTTCCCAACTACTGT TTTCCACTGGACGGCATCGGTCCGCGAACAGATAGTTACAAGGAGATTCAGTTAAATGGAGACCAAGCTTGGAAAGA TGTAAATCCAAATGGTATCAGTGAACTTGTTAAGGGAAATCCATTTGCCATGGAAATTAACCTTCAAGCCAATCTAT GGCGAAGTTTCCTTTATTCCAATGTGGCTCTGTATCTCCCAGACTCGTACAAATACACCCCGTCCAATGTCACTCTT CCAGAAAACAAAAACACCTACGACTACATGAACGGGCGGGTGGTGCCGCCATCTCTAGTAGACACCTATGTGAACAT TGGCGCCAGGTGGTCTCTGGATGCTATGGACAATGTCAACCCATTCAACCACCACCGTAACGCTGGCTTGCGTTACC GATCCATGCTTTTGGGTAACGGACGTTATGTGCCTTTCCACATACAAGTGCCTCAAAAATTCTTCGCTGTCAAAAAC CTGCTGCTTCTCCCAGGCTCCTACACTTATGAGTGGAACTTCAGGAAGGATGTGAACATGGTGCTACAGAGTTCCCT CGGTAACGACCTACGGGTAGATGGCGCCAGCATCAGTTTCACGAGCATCAACCTCTATGCTACCTTTTTCCCCATGG CTCACAACACCGCTTCCACCCTTGAAGCCATGCTGCGGAATGACACCAATGATCAGTCATTCAACGACTATCTATCT GCAGCTAACATGCTCTATCCCATTCCTGCCAATGCAACCAATATTCCCATTTCCATTCCTTCTCGCAACTGGGCGGC TTTCAGAGGCTGGTCATTTACCAGACTCAAAACCAAAGAAACTCCCTCTTTGGGGTCTGGATTTGACCCCTACTTTG TCTATTCTGGTTCTATTCCCTACCTGGATGGTACCTTCTACCTGAACCACACTTTTAAGAAGGTTTCCATCATGTTT GACTCTTCAGTGAGCTGGCCTGGAAATGACAGGTTACTATCTCCCAACGAATTTGAAATAAAGCGCACTGTGGATGG CGAAGGCTACAATGTAGCCCAATGCAACATGACCAAAGACTGGTTCTTGGTACAGATGCTCGCCAACTACAACATAG GCTATCAGGGCTTCTACATTCCAGAAGGATACAAAGATCGCATGTATTCATTTTTCAGAAACTTCCAGCCCATGAGC AGGCAGGTGGTTGATGAGGTCAATTACAAAGACTTCAAGGCCGTCGCCATACCCTACCAACACAACAACTCTGGCTT TGTGGGTTACATGGCTCCGACCATGCGCCAAGGTCAACCCTATCCCGCTAACTATCCCTATCCACTCATTGGAACAA CTGCCGTAAATAGTGTTACGCAGAAAAAGTTCTTGTGTGACAGAACCATGTGGCGCATACCGTTCTCGAGCAACTTC ATGTCTATGGGGGCCCTTACAGACTTGGGACAGAACATGCTTTATGCCAACTCAGCTCATGCTCTGGACATGACCTT TGAGGTGGATCCCATGGATGAGCCCACCCTGCTTTATCTTCTCTTCGAAGTTTTCGACGTGGTCAGAGTGCATCAGC CACATCGCGGCATCATCGAGACAGTCTACCTGCGTACACCGTTCTCGGCCGGTAACGCTACCACGTAAAAAGCTTCT TGCTTCTTGCAAACAGCAGCTGCAACCATGGCCTGCGGATCCCAAAACGGCTCCAGCGAGCAAGAGCTCAGAGCCAT TGTCCAAGACCTGGGTTGCGGACCCTATTTTTTGGGAACCTACGATAAGCGCTTCCCGGGGTTCATGGCCCCCGATA AGCTCGCCTGTGCCATTGTAAACACGGCCGGACGTGAGACGGGGGGAGAGCACTGGTTGGCTTTCGGTTGGAACCCA CGTTCTAACACCTGCTACCTTTTTGATCCTTTTGGATTCTCGGATGATCGTCTTAAACAGATTTACCAGTTTGAATA TGAGGGTCTCCTGCGCCGCAGCGCTCTTGCTACCAAGGACCGCTGTATTACGCTGGAAAAATCTACCCAGACCGTGC AGGGCCCCCGTTCTGCCGCCTGCGGACTTTTCTGCTGCATGTTCCTTCATGCCTTTGTGCACTGGCCTGACCGTCCC ATGGACGGAAACCCCACCATGAAATTGCTGACTGGAGTGCCAAACAACATGCTTCATTCTCCTAAAGTCCAGCCCAC CCTGTGTGACAATCAAAAAGCACTCTACCATTTTCTCAATACCCATTCGCCTTATTTTCGCTCCCATCGTACACACA TCGAAAGGGCCACTGCGTTCGACCGTATGGATGTGCAATAATGACTCATGTAAACAACGTGTTGAATAAACAGCACT TTATTTTTTACACGTATCAAGGCTCTGGATTACTTATTTATTTACAAGTCGAATGGGTTCTGACGAGAATCAGAATG ACCCGCGGGCAGTGATACGTTGCGGAACTGATACTTGGGTTGCCACTTGAATTCGGGAATCACCAACTTGGGAACCG GTATATCGGGTAGGATGTCACTCCACAGCTTTCTGGTCAGCTGCAAAGCTCCCAGCAGGTCAGGAGCCGAAATCTTG AAATCACAATTAGGACCAGTGCTCTGAGCGCGAGAGTTGCGGTACACCGGATTGCAGCACTGAAACACCATCAGCGA CGGATGTCTCACGCTTGCCAGCACGGTGGGATCTGCAATCATGCCCACATCCAGATCTTCAGCATTGGCAATGCTGA ACGGGGTCATCTTGCAGGTCTGCCTACCCATGGCGGGCACCCAATTAGGCTTGTGGTTGCAATCGCAGTGCAGGGGG ATTAGTATCATCTTGGCCTGATCCTGTCTGATTCCTGGATACACGGCTCTCATGAAAGCATCATATTGCTTGAAAGC CTGCTGGGCTTTACTACCCTCGGTATAGAACATCCCGCAGGACCTGCTCGAAAACTGGTTAGCTGCGCAGCCGGCAT CATTCACACAGCAGCGGGCGTCATTGTTGGCTATTTGCACCACACTTCTGCCCCAGCGGTTTTGGGTGATTTTGGTT CGCTCGGGATTCTCCTTCAAGGCTCGTTGTCCATTCTCGCTGGCCACATCCATCTCGATAATCTGCTCCTTCTGAAT CATAATAGTGCCATGCAGGCACTTCAGCTTGCCCTCATAATCATTGCAGCCATGAGGCCACAACGCACAGCCTGTAC ATTCCCAATTATGGTGGGCGATCTGAGAAAAAGAATGTATCATTCCCTGCAGAAATCTTCCCATCATCGTGCTCAGT GTCTTGTGACTAGTGAAAGTTAACTGGATGCCTCGGTGCTCCTCGTTTACGTACTGGTGACAGATGCGCTTGTATTG TTCGTGCTGCTCAGGCATTAGTTTAAAAGAGGTTCTAAGTTCGTTATCCAGCCTGTACTTCTCCATCAGTACACACA TCACTTCCATGCCCTTCTCCCAAGCAGACACCAGGGGCAAGCTAATCGGATTCTTAACAGTACAGGCAGCAGCTCCT TTAGCCAGAGGATCATCTTTGGCAATCTTTTCAATGCTTCTTTTGCCATCCTTCTCAACGATGCGCACGGGCGGGTA GCTGAAACCTACTGCTACAAGCTGCGCCTCTTCTCTTTCTTCTTCGCTGTCTTGACTGATGTCTTGCATGGGAACAT GTTTGGTCTTCCTTGGCTTCTTTTTGGGGGGTATCGGGGGAGGAGGACTGTCGCTCCGTTCCGGAGACAGGGAGGAT TGTGAAGTTTCGCTCACCATTACCAACTGACTGTCGGTAGAAGAACCTGACCCCACACGGCGACAGGTGTTTCTCTT CGGGGGCAGAGGTGGAGGCGATTGCGAAGGGCTGCGGTCCGACCTGGAAGGCGGATGACTGGCAGAACCCCTTCCGC GTTCGGGGGTGTGCTCCCTGTGGCGGTCGCTTAACTGATTTCCTTCGCGGCTGGCCATTGTGTTCTCCTAGGCAGAG AAACAACAGACATGGAAACTCAGCCATTGCTGTCAACATCGCCACAAGTGCCATCACATCTCGTCGTCAGCGACGAG GAAAAGGAGCAGAGCTTAACCATTCCACCGCCCAGTCCTGCCACCACCTCTACCCTAGAAGATAAGGAGGTCGACGC ATCTCATGACATGCAGAATAAAAAAGCGAAAGAGTCTGAAACAGACATCGAGCAAGACCCGGGCTATGTGACACCGG TGGAACACGAGGAAGAGTTGAAACGCTTTCTAGAGAGAGAGGATGAAAACTGCCCAAAACAGCAAGCGGATAACTAT CACCAAGATGCTGGAAATAGGGATCAGAACACCGACTACCTCATAGGGCTTGACGGGGAAGACGCGCTCCTTAAACA TCTAGCAAGACAGTCACTCATAGTCAAGGATGCATTATTGGACAGAACTGAAGTGCCCATCAGTGTGGAAGAGCTCA GCCGCGCCTACGAGCTTAACCTTTTTTCACCTCGTACTCCCCCCAAACGCCAGCCAAACGGCACCTGCGAGCCAAAT CCTCGCTTAAACTTTTATCCAGCTTTTGCTGTGCCAGAAGTACTCGCTACTTATCACATCTTTTTTAAAAATCAAAA AATTCCAGTCTCCTGCCGCGCTAATCGCACCCGCGCTGACGCCCTACTTAATCTGGGACCTGGTTCACGCTTACCTG ATATAGCTTCCTTGGAAGAGGTTCCAAAAATCTTCGAGGGTCTGGGCAATAATGAGACTCGGGCCGCAAATGCTCTG CAAAAGGGAGAAAATGGCATGGATGAGCATCACAGCGTTCTGGTGGAATTGGAGGGCGATAATGCCAGACTCGCAGT ACTCAAGCGAAGCGTCGAGGTCACACACTTTGCATACCCCGCTGTCAACCTGCCCCCTAAAGTTATGACGGCGGTCA TGGACCAGTTACTCATTAAGCGCGCAAGTCCCCTTTCAGAAGACATGCATGACCCAGACGCCTGTGATGAGGGTAAA CCAGTGGTCAGTGATGAGCAGCTAACCCGATGGCTGGACACCGACTCTCCCCGGGATTTGGAAGAGCGTCGCAAGCT TATGATGGCCGTAGTGCTGGTTACCGTAGAACTAGAGTGTCTCCGGCGTTTCTTTACCGATTCAGAAACCTTGCGCA AACTCGAAGAGAATCTGCACTACACTTTTAGACACGGCTTTGTGCGGCAGGCGTGCAAGATATCTAACGTGGAACTC ACCAACCTGGTTTCCTACATGGGTATTCTGCATGAGAATCGTCTAGGACAAAGCGTGCTGCACAGCACCCTTAAGGG GGAAGCCCGCCGTGATTACATCCGCGATTGTGTCTATCTCTACCTGTGCCACACGTGGCAAACCGGCATGGGTGTAT GGCAGCAATGTTTAGAAGAACAGAACTTGAAAGAGCTTAACAAGCTCTTACAGAAATCTCTTAAGGTTCTGTGGACA GGGTTCGACGAGCGCACCGTCGCTTCCGACCTGGCAGACCTCATCTTCCCAGAGCGTCTTAGGGTTACTTTGCGAAA CGGACTGCCTGACTTTATGAGCCAGAGCATGCTTAACAATTTTCGCTCTTTCATCCTGGAACGCTCCGGTATCCTGC CCGCCACCTGCTGCGCACTGCCCTCCGACTTTGTGCCTCTCACCTACCGCGAGTGCCCCCCGCCGCTATGGAGTCAC TGCTACCTGTTCCGTCTGGCCAACTACCTCTCCTACCACTCGGATGTGATCGAGGATGTGAGCGGAGACGGCTTGCT GGAGTGTCACTGCCGCTGCAATCTGTGCACGCCCCACCGGTCCCTAGCTTGCAACCCCCAGTTGATGAGCGAAACCC AGATAATAGGCACCTTTGAACTGCAAGGCCCCAGCAGCCAAGGCGATGGGTCTTCTCCTGGGCAAAGTTTAAAACTG ACCCCGGGACTGTGGACCTCTGCCTACTTGCGCAAGTTTGCCCCGGAAGATTACCACCCCTATGAAATCAAGTTCTA TGAGGACCAATCACAGCCTCCAAAGGCCGAACTTTCGGCCTGCGTCATCACCCAGGGGGCAATTCTAGCCCAATTGC AAGCCATCCAAAAATCCCGCCAAGAATTTCTACTGAAAAAGGGTAAGGGGGTCTACCTTGACCCCCAGACCGGCGAG GAACTCAACACAAGGTTCCCTCAGGATGTCCCAACGACGAGAAAGCAAGAAGTTGAAGGTGCAGCCGCCGCCCCCAG AAGATATGGAGGAAGATTGGGACAGTCAGGCAGAGGAAGCGGAGGAGGACAGTCTGGAGGACAGTCTGGAGGAAGAC AGTTTGGAGGAGGAAAACGAGGAGGCAGAGGAGGTGGAAGAAGTAACCGCCGACAAACAGTTATCCCCGGCTGCGGA GACAAGCAACAGCGCTATCATCTCCGCTCCGAGTCGAGGAACGCGGCGGCGTCCCAGCAGTAGATGGGACGAGACCG GACGCTTCCCGAACCCAACCACCGCTTCCAAGACCGGTAAGAAGGATCGGCAGGGATACAAGTCCTGGCGGGGGCAT AAGAATGCCATCATCTCCTGCTTGCATGAGTGCGGGGGAAACATATCCTTCACGCGACGCTACTTGCTATTCCACCA TGGGGTGAACTTTCCACGCAATGTTTTGCATTACTACCGTCACCTCCACAGCCCCTACTATAGCCAGCAAATCCCGG CAATCTCGACAGAAAAAGACAGCGGCGGCGACCTCCAACAGAAAACCAGCAGCGGCAGTTAAAAAATACACAACAAG TGCAGCAACAGGAGGATTAAAGATTACAGCCAACGAGCCAGCGCAAACCCGAGAGCTAAGAAATCGGATCTTTCCAA CCCTGTATGCCATCTTCCAGCAGAGTCGGGGCCAAGAGCAGGAACTGAAAATAAAAAACCGATCTTTGCGTTCGCTC ACCAGAAGTTGTTTGTATCACAAGAGCGAAGATCAACTTCAGCGCACTCTTGAGGACGCCGAGGCTCTCTTCAACAA GTACTGCGCGCTGACTCTTAAAGAGTAGGCAGCGACCGCGCTTATTCAAAAAAGGCGGGAATTACATCATCCTCGTC ATGAGTAAAGAAATTCCCACGCCTTACATGTGGAGTTATCAGCCCCAAATGGGATTGGCGGCAGGCGCCTCCCAGGA CTACTCCACCCGCATGAATTGGCTCAGCGCCGGGCCTTCTATGATTTCTCGAGTTAATGATATACGCGCCTACCGAA ACCAAATACTTTTGGAACAGTCAGCTCTTACCACCACGCCCCGCCAACACCTTAATCCCAGAAATTGGCCCGCCGCC CTAGTATACCAGGAAAGTCCCGCTCCCACCACTGTATTACTTCCTCGAGACGCCCAGGCCGAAGTCCAAATGACTAA TGCAGGTGCGCAGTTAGCTGGCGGCTCCACCCTATGTCGTCACAGGCCTCGGCATAATATAAAACGCCTGATGATTA GAGGCCGAGGTATTCAGCTTAACGACGAGTCGGTGAGCTCTCCGCTTGGTCTACGACCAGACGGAATCTTTCAAATT GCCGGCTGCGGGAGATCTTCCTTCACCCCTCGTCAGACTGTTTTGACTTTGGAAAGTTCGTCTTCGCAACCCCGCTC GGGCGGAATCGGGACCGTTCAATTTGTGGAGGAGTTTACTCCCTCTGTCTACTTCAACCCTTTCTCCGGATCTCCTG GGCACTACCCGGACGAGTTCATACCGAACTTTGACGCAATTAGCGAGTCAGTGGACGGCTACGATTGATGTCTGGTG ACGCGGCTGAGCTATCTCGGCTGCGACATCTAGACCACTGCCGCCGCTTTCGCTGTTTTGCCCGGGAACTCATTGAG TTCATTTACTTCGAACTCCCCAAGGATCACCCTCAAGGTCCGGCCCACGGAGTGCGGATTACTATCGAAGGTAAAAT AAACTCTCGCCTGCATCGAATTTTCTCCCAGCGGCCCGTGCTGATCGAGCGAGACCAGGGAAACACCACGGTTTCTA TCTACTGCATTTGTAATCACCCAGGATTGCATGAAAGCCTTTGCTGTCTTATGTGTACTGAGTTTAATAAAAACTGA ATTAAGACTCTCCTACGGACTGCCGCTTCTTCAACCCGGATTTTACAACCAGAAGAACGAAACTTTTCCTCTCATCC AGGACTCTGTTAACTTTACCTTTCCTACTTACAAACCAGAAGCTCAACGACAACACCGCTTTTCCAGAAGCATTTTC CCTACTAATACTACTTTCAAAACCGGAGGTGAGCTCCACAGTCTCCCCGCAGAAAACCCTTGGGTGGAAGCGGGCCT TGTAGTGCTAGGAATTCTTGCGGGCGGGCTTGTGATTATTCTTTGCTACCTATACACACCTTGCTTCACTTTCCTAG TGGTGTTGTGGTATTGGTTTAAAAAATGGGGCCCATACTAGTCTTGCTTGTTTTACTTTCGCTTTTGGGACCGGGTT CTGCCAACTACAATCCATGTCTAGACTTTGACCCAGAAAACTGCACACTTACTTTTGCACCCGACACAAGCCGCATC TGTGGAGTTCTTATTAAGTGCGGATGGGAATGCAGGTCCGTTGAAATTACACACAATAACAAAACCTGGAACAATAC CTTATCCACCACATGGGAGCCAGGAGTTCCCGAGTGGTACACTGTCTCTGTCCGAGGTCCTGACGGTTCCATCCGCA TTAGTAACAACACTTTTATTTTTTCTACAATGTGCGATCTGGCCATGTTCATGAGCAAACAGTATTCTCTATGGCCT CCCAGCAAGGACAACATTGTAACGTTCTCCATTGCTTATTGCTTGTGCGCTTGCCTTCTTACTGCTTTACTGTGCGT ATGCATACACCTGCTTGTAACCACTCGTATCAAAAACGCCAATAACAAAGAAAAAATGCCTTAACCTCTTTCTGTTT ACAGACATGGCTTTTCTTACAGCTCTCATACTTGTCAGCATTGTCACTGCCGCTCACGGACAAACAGTCGTCTCTAT CCCTCTAGGTCATAATTACACTCTCATAGGACCCCCAATCACTTCAGAGGTCATCTGGACCAAACTGGGAAGCGTTG ATTACTTTGATATAATCTGTAACAAAACAAAACCAATAATAGTAACCTGCAACATACAAAATCTTACATTAATTAAT GTTAGCAAAGTTTACAGCGGTTACTATTATGGTTATGACAGATACAGTAGTCAATATAGAAATTACTTGGTTCGTGT TACCCAGTCCAAAACCACGAAAATGCCAAATATGGCAGAAATTCGATCCGATGACAATTCTCTAGAAACTTTTACAT CTTCCACCACACCTGACGAAAAAAATATCCCAGATTCAATGATTGCAATTATCGCAGCGGTGGCAGTGGTGATGGCA CTAACAGTAATATGCATGCTTTTATATGCTTGTCGCTACAAAAAGTTTCATCCTAAAAAACAAGATCTCCTACTAAG GCTTAACATTTAATTTCTTTTTACACAGCCATGGTTTCCACTACCACATTCCTTATGCTTACTAGTATAGCAACTCT GACTTCTGCTCGCTCACACCTCACTGTAACTATAGGCTCAAACTGCACACTAAAAGGACCTCAAGGTGGTCATGTCT TTTGGTGGAGAATATATGACAATGGATGGTTTACAAAACCATGTGACCAACCTGGTAGATTTTTCTGCAACGGCAGA GACCTAACCATTATCAACGTGACAGCAAATGACAAAGGCTTCTATTATGGAACCGACTATAAAAGTAGTTTAGATTA TAACATTATTGTACTGCCATCCACCACTCCAGCGCCCCGCAAAACTACTTTCTCTAGCAGCAGTGCCGCTAACAATA CAATTTCCAATCCAACCTTTACCGCGCTTTTAAAACGCACTGTGAATAATTCTACAACAATTTCCACTTCAACAATC AGCATCATCGCTGCCGTGACAATTGGAATATCTATTCTTGTTTTTACCATAACCTACTACACCTGCTGCTATAAAAA AGACGAACATAAAGGTGATCCATTACTTAGATTTGATATTTAATTTGTTCTTTTTTTTTTTATTTACAGTATGGTGA ACACCAATCATGGTACCTAGAAATTTCTTCTTCACCATACTCATCTGTGCTTTTAATGTTTGCGCTACTTTCACAGC AGTAGCCACAGCAAGCCCAGACTGTATAGGAGCATTTGCTTCCTATGCACTTTTTGCTTTTGTCACTTGCATCTGCG TATGTAGCATAGTCTGCCTGGTTATTAATTTTTTCCAACTTCTAGACTGGATCCTTGTGCGAATTGCCTACCTGCGC CACCATCCCGAATACCGCAACCAAAATATCGCGGCACTTCTTAGACTTATCTAAAACCATGCAGGCTATACTACCAA TATTTTTGCTTCTATTGCTTCCCTACGCTGTCTCAACCCCAGCTACCTATAGTACTCCACCAGAACACCTTAGAAAA TGCAAATTCCAACAACCGTGGTCATTTCTTGCTTGCTATCGAGAAAAATCTGAAATTCCCCCAACTTTAATAATGAT TGCTGGAATAATTAATGTAATCTGTTGCACCATAATTTCATTTCTGATATACCCCCTATTTGATTTTGGCTGGAATG CTCCCAATGCACATGATTATTCCCAAGACCCAGAGGAACACATTCCCCTACATAACATGCAACAACCAATAGCGCTA ATAGAATACGAAAGTGAACCACAACCCCCACTACTCCCTGCTATTAGTTACTTCAACCTAACCGGCGGAGATGACTG AAACACTCACCACCTCCAATTCCGCCGAGGATCTGCTTGATATGGACGGCCGCGTCTCAGAACAGCGACTCGCCCAA CTACGCATCCGCCAGCAGCAGGAACGCGTGGCCAAAGAGCTCAGAGATGTCATCCAAATTCACCAATGCAAAAAAGG CATATTCTGTTTGGTAAAACAAGCCAAAATATCCTACGAGATCACCGCTACCGACCATCGCCTCTCTTACGAGCTTG GCCCCCAACGACAAAAATTTACCTGCATGGTGGGAATCAACCCCATAGTTATCACCCAACAAAGTGGAGATACTAAG GGTTGCATTCACTGCTCCTGCGATTCCATCGAGTGCACCTACACCCTGCTGAAGACCCTATGCGGACTAAGAGACCT GCTACCCATGAATTAAAAAAATGATTAATAAAAAATCACTTACTTAAAATCAGCAATAAGGTCTCTATTGAAATTTT CTCCCAGCAGCACCTCACTTCCCTCTTCCCAACTCTGGTATTCTAAACCCCGTTCAGCGGCATACTTTCTCCATACT TTAAAGGGGATGTCAAATTTTAGCTCCTCTCCTGTACCCACAATCTTCATCTCTTTCTTCCCAGATGACCAAGAGAG TCCGGCTCAGTGACTCCTTCAACCCTGTCTACCCCTATGAAGATGAAAGCACCTCCCAACACCCCTTTATAAACCCA GGGTTTATTTCCCCAAATGGCTTCACCCAAAGCCCAGACGGAGTTCTTACTTTAAAATGTTTAACCCCGCTAACAAC CACAGGCGGGTCTCTACAGCTAAAAGTGGGAGGGGGACTTACAGTAGATGACACTGATGGGACCTTACAAGAAAACA TAGGTGCCACCACACCACTTGTTAAGACTGGGCACTCTATAGGTTTATCCCTAGGAGCCGGATTGGGAACAGATGAA AATAAACTTTGTACCAAATTGGGAGAAGGACTTACATTCAATTCAAACAACATTTGCATTGATGACAATATTAACAC CCTGTGGACAGGAGTTAACCCCACCGAAGCCAACTGTCAAATGATGGACTCCAGTGAATCTAATGATTGCAAATTAA TTCTAACACTAGTTAAAACTGGAGCCCTAGTCACTGCATTTGTTTATGTTATAGGAGTATCTAACAATTTTAATATG CTAACTACATACAGAAATATAAATTTTACTGCGGAGCTGTTTTTTGATTCTGCGGGTAATTTACTAACTAGCCTGTC ATCCCTAAAAACTCCACTTAATCATAAATCAGGACAAAACATGGCTACTGGTGCCATTACTAATGCTAAAAGTTTCA TGCCCAGCACAACTGCTTATCCTTTCAATAATAATTCTAGAGAAAAAGAAAACTACATTTACGGAACTTGTCACTAC ACAGCTAGTGATCACACTGCTTTTCCCATTGACATATCTGTCATGCTTAACCAAAGAGCAATAAGAGCTGATACATC ATATTGTATTCGTATAACTTGGTCCTGGAACACAGGAGATGCCCCAGAGGGGCAAACCTCTGCTACAACCCTAGTTA CCTCCCCATTTACCTTTTACTACATCAGAGAAGACGACTGACAAATAAAGTTTAACTTGTTTATTTGAAAATCAATT CACAAACTCCGAGTAGTTATTTTGCCTCCCCCTTCCCATTTAACAGAATATACCAATCTCTCCCCACGCACAGCTTT AAACATTTGGATACCATTAGAGATAGACATGGTTTTAGATTCCACATTCCAAACAGTTTCAGAGCGAGCCAATCTGG GGTCAGTGATAGATAAAAATCCATCGGGATAGTCTTTTAAAGCGCTTTCACAGTCCAACTGATGCGGATGCGACTCC GGAGTCTGGATCACGGTCATCTGGAAGAAGAACGATGGGAATCATAATCCGAAAACGGGATCGGGCGATTGTGTCTC ATCAAACCCACAAGCAGCCGCTGTCTGCGTCGCTCCGTGCGACTGCTGTTTATGGGATCGGGATCCACAGTGTCCTG AAGCATGATTTTAATAGCCCTTAACATTAACTTTCTGGTGCGATGCGCGCAGCAACGCATTCTTATTTCACTTAGAT TAATACAGTAGGTACAGCACATTATCACAATATTGTTTAATAAACCATAATTAAAAGCACTCCAGCCAAAACTCATA TCTGATATAATCGCCCCTGCATGACCATCATACCAAAGTTTAATATAAATTAAATGACGTTCCCTCAAAAACACACT ACCCACATACATGATCTCTTTTGGCATGTGCATATTAACAATCTGTCTGTACCATGGACAACGTTGGTTAATCATGC AGCCCAATATAACCTTCCGGAACCACACTGCCAACACCGCTCCCCCAGCCATGCATTGAAGTGAACCCTGCTGATTA CAATGACAATGAAGAATCCAATTCTCTCGACCGTGAATCACTTGAGAATGAAAAATATCTATAGTAGCACAACATAG ACATAAATGCATGCATCTTCTCATAATTTTTAACTCCTCAGGATTTAGAAACATATCCCAAGGAATAGGAAGCTCTT GCAGAACAGTAAAGCTGGCAGAACAAGGAAGACCACGAACACAACTTACACTATGCATAGTCATAGTATCACAATCT GGCAACAGCGGGTGGTCTTCAGTCATAGAAGCTCGGGTTTCATTTTCCTCACAACGTGGTAACTGGGCTCTGGTGTA AGGATGATGTCTGGCGCATGATGTCGAGCGTGCGCACAACCTTGTCATAATGGAGTTGCTTCCTGACATTCTCGTAT TTTGTATAGCAAAACGCGGCCCTGGCAGAACACACTCTTCTTCGCCTTTTATCCTGCCGCTTAGCGTGTTCCGTGTG ATAGTTCAAGTACAGCCACACTCTTAAGTTGGTCAAAAGAATGCTGGCTTCAGTTGTAATCAAAACTCCATCACATC TAATCGTTCTGAGGAAATGATCCACGGTAGCATATGCAAATCCCAACCAAGCAATGCAACTGGATTGCGTTTCAAGC AGGAGAGGAGAGGGAAGAGACGGAAGAACCATGTTAATTTTTATTCCAAACGATCTCGCAGTACTTCAAATTGTAGA TCGCGCAGATGGCATCTGTCGCCCCCACTGTGTTGGTGAAAAAGCACAGCTAGATCAAAAGAAATGCGATTTTCAAG GTGCTCAACGGTGGCTTCCAGCAAAGCCTCCACGCGCACATCCAAGAACAAAAGAATACCAAAAGAAGGAGCATTTT CTAACTCCTCAATCATCATATTACAGTCCTGCACCATTCCCAGATAATTTTCAGCTTTCCAGCCTTGGATTATTCGT GTCATTTCTTGTGGTAAATCCAATCCACACATTACAAACAGGTCCCGGAGGGCGCCCTCCACCACCATTCTTAAACA CACCCTCATAATGACAAAATATCTTGCTCCTGTGTCACCTGTAGCAAATTGAGAATGGCAACATCAATTGACATGCC GTTGGCTCTAAGTTCTTCTCTAAGTTCTAGTTGTAAATACTCTTTCATATTATCACCAAACTGCTTAGCCAGAAGCC CCCCGGGAACAAGAGCAGGACACGCTACAGTGCAGTACAAGCGCAGACCTCCCCAATTGGCTCCAGCAAAAACAAGA TTGGAATAAGCATATTGGGAACCACCAGTAATGTCATCAAAGTTGCTGGAAATATAATCAGGCAGAGTTTGTTGTAA AAATTGAATAAAAGAAAAATTTGCCAAAAAAACATTCAAAACCTCTGGGATGCAAATGCAATAAGTTACCGCGCTGC GCTCCAACATTGTTAGTTTTGAATGAGTCTGCAAAAAATAAAAAAACAAGCGTCATATCAGAGTAGCCTGACGAACA GGTGGATAAATCAGTCTTTCCATCACAAGACAAGCCACAGGGTCTCCAGCCCGACCCTCGTAAAACCTGTCATCGTG ATTAAACAACAGCACCGAAAGTTCCTCGCGGTGACCAGCATGAATAATTCTTGATGAAGCATACAATCCAAACATGT TAGCATCAGTTAAAGACAAAAAACAGCCAATATAGCCTCTGGGTATAATTATGCTTAATCGTAAATATAGCAAAGCC ACCCCTCGCGGATACAAAGTAAAAGGCACAGGAGAATAAAAAATATAATTATTCCTTTGCTGCTGTTCAGGCAACGT CGCCCCCGGTCCCTCTAAATACACATACAAAGCCTCATCAGCCATGGCTTACCAGACAAAGTACAGCAGGCACACAA AGCACAAGCTCTAAAGTCACTCACCAACCTGTCCACAGTATATATACACAAACCCTAAACTGACGTAATGGGGCTAA AGTACACAAAATCCCGCCAAACCCAACACACACCCCGAAACTGCGTCACCACAAAAGTACAGTTTCACTTCCGCAAT CCCAACAAGCGGCACTTCCTCTTTCTCACGGGACGTCACATCCGCTTAACTTGCAACCTCATTTTCCCACGGCCGCG CCGCCCCTTTTAGCCGTTAACCCCACAGCCAATTACCACACAGCCCACACTTTTTAAAATCACCTCATTTACATATT GGCACCATTCCATCTATAAGGTATATTATTGATGATG

[0614] GenBank Accession No. AAW33140 MTKRVRLSDSFNPVYPYEDESTSQHPFINPGFISPNGFTQSPDGVLTLKCLTPLTTTGGSLQLKVGGGLTVDDTDGT LOENIGATTPLVKTGHSIGLSLGAGLGTDENKLCTKLGEGLTENSNNICIDDNINTLWTGVNPTEANCOMMDSSESN DCKLILTLVKTGALVTAFVYVIGVSNNENMLTTYRNINFTAELFFDSAGNLLTSLSSLKTPLNHKSGONMATGAITN AKSFMPSTTAYPENNNSREKENYIYGTCHYTASDHTAFPIDISVMLNQRAIRADTSYCIRITWSWNTGDAPEGQTSA TTLVTSPFTFYYIREDD

[0615] GenBank Accession No. AAW33119 MRRVVLGGAVVYPEGPPPSYESVMQQQQATAVMOSPLEAPFVPPRYLAPTEGRNSIRYSELAPQYDTTRLYLVDNKS ADIASLNYQNDHSNFLTTVVONNDFTPTEASTQTINFDERSRWGGQLKTIMHTNMPNVNEYMESNNFKARVMVSRKP PEGAAVGDTYDHKQDILEYEWFEFTLPEGNFSVTMTIDLMNNAIIDNYLKVGRONGVLESDIGVKFDTRNFKLGWDP ETKLIMPGVYTYEAFHPDIVLLPGCGVDFTESRLSNLLGIRKKOPFQEGFKILYEDLEGGNIPALLDVDAYENSKKE QKAKIEAAAEAKANIVASDFTRVANAGEVRGDNFAPTPVPTAESLLADVTGGTDVKLTIQPVEKDSKNRSYNVLEDK INTAYRSWYLSYNYGDPEKGVRSWTLLTTSDVTCGAEQVYWSLPDMMQDPVTFRSTRQVSNYPVVGAELMPVFSKSF YNEQAVYSQQLRQSTSLTHVENREPENQILIRPPAPTITTVSENVPALTDHGTLPLRSSIRGVQRVTVTDARRRTCP YVYKALGIVAPRVLSSRTF

[0616] GenBank Accession No. AAW33124 MATPSMLPQWAYMHIAGQDASEYLSPGLVQFARATDTYENLGNKERNPTVAPTHDVTTDRSQRLMLRFVPVDREDNT YSYKVRYTLAVGDNRVLDMASTFFDIRGVLDRGPSFKPYSGTAYNSLAPKGAPNASQWLDKGVETTEERQNEDGEND EKATYTFGNAPVKADADITKDGLPIGLEVPAEGDPKPIYANKLYQPEPQVGQESWTDTDGTEEKYGGRVLKPDTKMK PCYGSFAKPTNVKGGQAKVKTEEGNNIEYDIDMNFFDLRSQKOGLKPKIVMYAENVDLESPDTHVVYKPEVSDASSN ANLGQQSMPNRPNYIGFRDNFIGLMYYNSTGNMGVLAGQASQLNAVVDLQDRNTELSYQLLLDSLGDRTRYFSMWNQ AVDSYDPDVRVIENHGVEDELPNYCFPLDGIGPRTDSYKEIQLNGDQAWKDVNPNGISELVKGNPFAMEINLQANLW RSFLYSNVALYLPDSYKYTPSNVTLPENKNTYDYMNGRVVPPSLVDTYVNIGARWSLDAMDNVNPFNHHRNAGLRYR SMLLGNGRYVPFHIQVPQKFFAVKNLLLLPGSYTYEWNFRKDVNMVLQSSLGNDLRVDGASISFTSINLYATFFPMA HNTASTLEAMLRNDTNDQSFNDYLSAANMLYPIPANATNIPISIPSRNWAAFRGWSFTRLKTKETPSLGSGFDPYFV YSGSIPYLDGTFYLNHTFKKVSIMFDSSVSWPGNDRLLSPNEFEIKRTVDGEGYNVAQCNMTKDWELVOMLANYNIG YQGFYIPEGYKDRMYSFFRNFQPMSROVVDEVNYKDFKAVAIPYQHNNSGFVGYMAPTMRQGQPYPANYPYPLIGTT AVNSVTQKKFLCDRTMWRIPFSSNFMSMGALTDLGONMLYANSAHALDMTFEVDPMDEPTLLYLLFEVFDVVRVHQP HRGIIETVYLRTPFSAGNATT

[0617] GenBank Accession No. AY601636 (SEQ ID NO: 213) CATTATCTATAATATACCTTATAGATGGAATGGTGCCAACATGTAAATGAGGTAATTTAAAAAAGTGCGCGCTGTGT GGTGATTGGCTGCGGGGTGAACGGCTAAAAGGGGGGGGCAATGCTGGGATGTGACGTAACTTATGTGGGAGGAGTTA TGTTGCAAGTTATCGCGGTAAAGGTGACGTAAAACGAGGTGTGGTTTGGACACGGAAGTAGACAGTTTTCCCACGTT TACTGACAGGATATGAGGTAGTTTTGGGCGGATGCAAGTGAAAATTCTCCATTTTCGCGCGAAAACTGAATGAGGAA GTGAATTTCTGAGTCATTTCGCGGTTATGACAGGGTGGAGTATTTGCCGAGGGCCGAGTAGACTTTGACCGTTTACG TGGAGGTTTCGATTACCGTGTTTTTCACCTAAATTTCCGCGTACGGTGTCAAAGTCCTGTGTTTTTACGTAGGTGTC AGCTGATCACTAGGGTATTTAAACCTGTCGAGTTCCGTCAAGAGGCCACTCTTGAGTGCCAGCGAGAAGAGTTTTCT CCTCCGCGCTGCGAGTCAGTTTTGCGCTTTGAAAATGAGACACCTGCGATTCCTGCCACAGGAGATTATCTCCAGCG AGACCGGGATCGAAATACTGGAGTTTGTGGTAAATACCCTGATGGGAGATGACCCGGAACCGCCAGTGCAGCCTTTC GATCCACCTACGCTGCACGATCTGTATGATTTAGAGGTAGACGGGCCTGATGATCCCAATGAGGAAGCTGTAAATGG GTTTTTTACTGATTCTATGCTGCTAGCTGCCGATGAAGGATTGGACATAAACCCTCCTCCTGAGACCCTTGATACCC CAGGGGTGGTTGTGGAAAGCGGCAGAGGTGGGAAAAAATTGCCTGATCTGGGAGCAGCTGAAATGGACTTGCGTTGT TATGAAGAGGGTTTTCCTCCGAGTGATGATGAAGACGGGGAAACTGAACAGTCCATCCATACCGCAGTGAATGAGGG AGTAAAAGCTGCCAGCGATGTTTTTAAGTTGGACTGTCCGGAGCTGCCTGGACATGGCTGTAAGTCTTGTGAATTTC ACAGGAATAACACTGGAATGAAAGAACTATTGTGCTCGCTTTGCTATATGAGAATGCACTGCCACTTTATTTACAGT AAGTGTATTTAAGTGAAATTTAAAGGAATAGTGTAGCTGTTTAATAACTGTTGAATGGTAGATTTATGTTTTTGCTT GCGATTTTTTGTAGGTCCTGTGTCTGATGATGAGTCACCTTCTCCTGATTCAACTACCTCACCTCCTGAAATTCAGG CGCCCGTACCTGCAAACGTATGCAAGCCCATTCCTGTGAAGCCTAAGTCTGGGAAACGCCCTGCTGTGGATAAGCTT GAGGACTTGTTGGAGGGTGGGGATGGACCTTTGGACCTTAGTACCCGGAAACTGCCAAGGCAATGAGTGCCCTGCAG CTGTGTTTATTTAGTGACGTCATGTAATAAAATTATGTCAGCTGCTGAGTGTTTTATTGCTTCTTGGGTGGGGACTT GGATATATAAGTAGGAGCAGATCTGTGTGGTTAGCTCATAGCAACCTGCTGCCATCCATGGAGGTTTGGGCTATCTT GGAAGACCTGAGACAGACTAGGCTACTGCTAGAAAACGCCTCGGACGGAGTCTCTGGCTTTTGGAGATTCTGGTTCG GTGGCGATCTAGCTAGGCTAGTGTTTAGGATAAAACAGGACTATAGGGAAGAATTTGAAAAGTTATTGGACGACAGT CCAGGACTTTTTGAAGCTCTTAACTTGGGCCATCAGGCTCATTTTAAGGAGAAGGTTTTATCAGTTTTAGATTTTTC TACTCCTGGTAGAACTGCTGCTGCTGTAGCTTTTCTTACTTTTATATTGGATAAATGGATCCGCCAAACCCACTTCA GCAAGGGATACGTTTTGGATTTCATAGCAGCAGCTTTGTGGAGAACATGGAAGGCTCGCAGGATGAGGACAATCTTA GATTACTGGCCAGTGCAGCCTCTGGGAGTAGCAGGGATACTGAGACACCCACCGGCCATGCCAGCGGTTCTGGAGGA GGAGCAGCAGGAGGACAATCCGAGAGCCGGCCTGGACCCTCCGGTGGAGGAGTAGCTGACTTGTTTCCTGAACTGCG ACGGGTGCTTACTAGGTCTACGTCCAGTGGACAGGACAGGGGCATTAAGAGGGAAAGGAATCCTAGTGGGAATAATT CAAGAACCGAGTTGGCTTTAAGTTTAATGAGCCGTAGGCGTCCTGAAACTGTTTGGTGGCATGAGGTTCAGAGCGAA GGCAGGGATGAAGTTTCAATATTGCAGGAGAAATATTCACTAGAACAACTTAAGACCTGTTGGTTGGAACCTGAGGA TGATTGGGAGGTGGCCATTAGGAATTATGCTAAGATATCTCTGAGGCCTGATAAACAGTATAGAATTACTAAGAAGA TTAATATTAGAAATGCATGCTACATATCAGGGAATGGGGCAGAGGTTATAATAGATACACAAGATAAAGCAGCTTTT AGATGTTGTATGATGGGTATGTGGCCAGGGGTTGTCGGCATGGAAGCAGTAACATTTATGAATATTAGGTTTAAAGG GGATGGGTATAATGGCATTGTATTTATGGCTAACACTAAGCTGATTCTACATGGTTGTAGCTTTTTTGGGTTTAATA ATACTTGTGTAGAAGCTTGGGGGCAAGTTAGTGTGAGGGGTTGTAGTTTTTATGCATGCTGGATTGCAACATCAGGT AGGGTCAAGAGTCAGTTGTCTGTGAAGAAATGCATGTTTGAGAGATGTAATCTTGGCATACTGAATGAAGGTGAAGC AAGGGTCCGCCACTGCGCAGCTACAGAAACTGGCTGCTTCATTCTAATAAAGGGAAATGCCAGTGTGAAGCATAATA TGATCTGTGGACATTCGAATGAGAGGCCTTATCAGATGCTGACCTGCGCTGGTGGACATTGCAATATTCTGGCTACC GTGCATATCGTTTCCCATGCACGCAAGAAATGGCCTGTATTTGAACATAATGTGATTACCAAGTGCACCATGCACAT AGGTGGTCGCAGGGGAATGTTTATGCCTTACCAGTGTAACATGAATCATGTGAAGGTGATGTTGGAACCAGATGCCT TTTCCAGAGTAAGCTTAACAGGAATCTTTGATATGAATATTCAACTATGGAAGATCCTGAGATATGATGACACTAAA CCGAGGGTGCGCGCATGCGAATGCGGAGGCAAGCATGCTAGATTCCAGCCGGTGTGCGTGGATGTGACTGAAGACCT GAGACCCGATCATTTGGTGCTTGCCTGCACTGGAGCGGAGTTCGGTTCTAGTGGTGAAGAAACTGACTAAAGTGAGT AGTGGGACGAGCTGTGGAGGTGGGACTTTGAGGTTGGTAAGGTGGGCAGATTGGGTAAATTTTGTTAATTTCTGTCT TGCAGCTGCCATGAGTGGAAGCGCTTCTTTTGAGGGGGGAGTATTTAGCCCTTATCTGACGGGCAGGCTCCCACCAT GGGCAGGAGTTCGTCAGAATGTCATGGGATCCACTGTGGATGGGAGACCCGTCCAGCCCGCCAATTCCTCAACGCTG ACCTATGCCACTTTGAGTTCGTCACCATTGGATGCAGCTGCAGCCGCCGCCGCTACTGCTGCCGCCAACACCATCCT TGGAATGGGCTATTACGGAAGCATCGTTGCCAATTCCAGTTCCTCTAATAACCCTTCAACCCTGGCTGAGGACAAGC TACTTGTTCTCTTGGCTCAGCTCGAGGCCTTAACCCAACGCTTAGGCGAACTGTCTAAGCAGGTGGCCCAGTTGCGT GAGCAAACTCAGTCTGCTGTTGCCACAGCAAAGTCTAAATAAAGATCTTAAATCAATAAATAAAGAAATACTTGTTA TAAAAACAAATGAATGTTTATTTGATTTTTCGCGCGCGGTATGCCCTGGACCATCGGTCTCGATCATTGAGAACTCG GTGGATCTTTTCCAGTACCCTGTAAAGGTGGGATTGAATGTTTAGATACATGGGCATTAGTCCGTCCCGGGGGTGGA GATAGCTCCATTGAAGAGCCTCTTGCTCCGGGGTAGTGTTATAAATCACCCAGTCATAGCAAGGTCGGAGTGCATGG TGTTGCACAATATCTTTTAGGAGCAGACTAATTGCAACGGGGAGGCCCTTAGTGTAGGTGTTTACAAATCTGTTGAG CTGGGACGGGTGCATCCGGGGTGAAATTATATGCATTTTGGACTGGATCTTGAGGTTGGCAATGTTGCCGCCTAGAT CCCGTCTGGGGTTCATATTGTGCAGAACCACCAAGACAGTGTATCCGGTGCACTTGGGAAATTTATCATGCAGCTTA GAGGGAAAAGCATGAAAAAATTTGGAGACGCCTTTGTGACCCCCCAGATTCTCCATGCACTCATCCATAATGATAGC GATGGGGCCGTGGGCAGCGGCACGGGCGAACACGTTCCGGGGGTCTGAAACATCATAGTTATGCTCCTGAGTCAGGT CATCATAAGCCATTTTAATAAACTTTGGGCGAAGGGTGCCAGATTGGGGGATGAAAGTTCCCTCTGGCCCGGGAGCA TAGTTTCCCTCACATATTTGCATTTCCCAGGCTTTCAGTTCAGAGGGGGGGATCATATCCACCTGCGGGGCTATAAA AAATACTGTTTCTGGAGCCGGGGTGATTAACTGGGATGAGAGCAAATTCCTAAGCAGCTGAGACTTGCCGCACCCAG TGGGACCGTAAATGACCCCAATTACGGGTTGCAGATGGTAGTTTAGGGAGCGACAGCTGCCGTCCTCCCGGAGCAGG GGGGCCACTTCGTTCATCATTTCCCTTACATGGATATTTTCCCGCACCAAGTCCGTTAGGAGGCGCTCTCCCCCAAG GGATAGAAGCTCCTGGAGCGAGGAGAAGTTTTTCAGCGGCTTCAGCCCGTCAGCCATGGGCATTTTGGAAAGAGTCT GTTGCAAGAGCTCGAGCCGGTCCCAGAGCTCGGTGATGTGCTCTATGGCATCTCGATCCAGCAGACCTCCTCGTTTC GCGGGTTGGGACGGCTCCTGGAGTAGGGAATCAGACGATGGGCGTCCAGCGCTGCCAGGGTCCGATCCTTCCATGGT CGCAGCGTCCGAGTCAGGGTTGTTTCCGTCACGGTGAAGGGGTGCGCGCCTGGTTGGGCGCTTGCGAGGGTGCGCTT CAGACTCATCCTGCTGGTCGAGAACCGCTGCCGATCGGCGCCCTGCATGTCGGCCAGGTAGCAGTTTACCATGAGTT CGTAGTTGAGCGCCTCGGCCGCGTGGCCTTTGGCACGGAGCTTACCTTTGGAAGTTTTATGGCAGGCGGGGCAGTAG ATACATTTGAGGGCATACAGCTTGGGCGCGAGGAAAATGGATTCGGGGGAGTATGCATCCGCACCGCAGGAGGCGCA GACGGTTTCGCACTCCACGAGCCATGTCAGATCCGGCTCATCGGGGTCAAAAACAAGTTTTCCGCCATGTTTTTTGA TGCGTTTCTTACCTTTGGTTTCCATGAGTTCGTGTCCCCGCTGGGTAACAAAGAGGCTGTCCGTGTCCCCGTAGACT GACTTTATGGGCCTGTCCTCGAGCGGAGTGCCGCGGTCCTCTTCGTAGAGGAACCCAGCCCACTCTGATACAAAAGC GCGTGTCCAGGCCAGCACAAAGGAGGCCACGTGGGAGGGGTAGCGGTCGTTGTCAACCAGGGGGTCCACCTTCTCTA CGGTATGTAAACACATGTCCCCCTCCTCCACATCCAAGAATGTGATTGGCTTGTAAGTGTAGGCCACGTGACCAGGG GTCCCCGCCGGGGGGGTATAAAAGGGGGGGGCCTCTGTTCGTCTTCACTGTCTTCCGGATCGCTGTCCAGGAGCGC CAGCTGTTGGGGTAGGTATTCCCTCTCGAAGGCGGGCATGACCTCTGCACTCAGGTTGTCAGTTTCTAGGAACGAGG AGGATTTGATATTGACAGTACCAGCAGAGATGCCTTTCATAAGACTCTCGTCCATCTGGTCAGAAAACACAATCTTC TTGTTGTCCAGCTTGGTGGCAAATGATCCATAGAGGGCATTGGATAGAAGCTTGGCGATAGAGCGCATGGTTTGGTT CTTTTCCTTGTCCGCGCGCTCCTTGGCGGCGATGTTAAGCTGGACGTACTCGCGCGCCACACATTTCCATTCAGGGA AGATGGTTGTCAGTTCATCCGGAACTATTCTGACTCGCCATCCCCTATTGTGCAGGGTTATCAGATCCACACTGGTG GCTACCTCGCCTCGGAGGGGCTCATTGGTCCAGCAGAGTCGACCTCCTTTTCTTGAACAGAAAGGGGGGAGGGGGTC TAGCATGAACTCATCAGGGGGGTCCGCATCTATGGTAAATATTCCCGGTAGCAAATCCTTGTCAAAATAGCTGATGG TGGCGGGATCATCCAAAGTCATCTGCCATTCTCGAACTGCCAGCGCGCGCTCATAGGGGTTAAGAGGGGTGCCCCAG GGCATGGGGTGGGTGAGCGCGGAGGCATACATGCCACAGATATCGTAGACATAGAGGGGCTCTTCGAGGATGCCGAT GTAAGTGGGATAACAGCGCCCCCCTCTGATGCTTGCTCGCACATAGTCATAGAGTTCATGTGAGGGGGCGAGAAGAC CCGGGCCCAGATTGGTGCGGTTGGGTTTTTCCGCCCTGTAAACGATCTGGCGAAAGATGGCATGGGAATTGGAAGAG ATAGTAGGTCTCTGGAATATGTTAAAATGGGCATGAGGGAGGCCTACAGAGTCCCTTATGAAGTGGGCATATGACTC TTGCAGCTTGGCTACCAGCTCGGCGGTGACAAGTACGTCTAGGGCACAGTAGTCGAGAGTTTCCTGGATGATGTCAT AACGCGGTTGGTTTTTCTTTTCCCACAGCTCGCGGTTGAGAAGGTATTCTTCGCGATCCTTCCAGTACTCTTCGAGG GGAAACCCGTCTTTTTCTGCACGGTAAGAGCCCAACATGTAGAATTGATTGACTGCCTTGTAGGGACAGCATCCCTT CTCCACTGGGAGAGAGTATGCTTGGGCTGCATTGCGCAGCGAGGTATGAGTGAGGGCAAAAGTGTCCCTGACCATGA CTTTGAGGAATTGATACTTGAAGTCGATGTCATCACAGGCCCCCTGTTCCCAGAGTTGGAAGTCCACCCGCTTCTTG TAGGCGGGGTTGGGCAAAGCGAAAGTAACATCATTGAAGAGGATCTTGCCGGCCCTGGGCATAAAATTTCGGGTGAT TCTGAAAGGCTGAGGGACCTCTGCTCGGTTATTGATAACCTGAGCGGCCAAGACGATCTCATCAAAGCCATTGATGT TGTGCCCCACTATGTACAGTTCTAAGAATCGAGGTGTGCCCCTGACATGAGGCAGCTTCTTGAGTTCTTCAAAAGTG AGGTCTGTAGGGTCAGTGAGAGCATAGTGTTCGAGGGCCCATTCGTGCAGGTGAGGGTTCGCTTTGAGGAAGGAGGA CCAGAGGTCCACTGCCAGTGCTGTTTGTAACTGGTCCCGGTACTGACGAAAATGCTGCCCGACTGCCATCTTTTCTG GGGTGACGCAATAGAAGGTTTGGGGGTCCTGCTGCCAGCGATCCCACTTGAGTTTTATAGCCAGGTCATAGGCGATG TTGACGAGCCGCTGGTCTCCAGAGAGTTTCATGACCAGCATGAAGGGGATTAGCTGCTTGCCAAAGGACCCCATCCA GGTGTAGGTTTCCACATCGTAGGTGAGGAAGAGCCTTTCTGTGCGAGGATGAGAGCCAATCGGGAAGAACTGGATCT CCTGCCACCAGTTGGAGGAATGGCTGTTGATGTGATGGAAGTAGAACTCCCTGCGACGCGCCGAGCATTCATGCTTG TGCTTGTACAGACGGCCGCAGTACTCGCATCGATTCACGGGATGCACCTCATGAATGAGTTGTACCTGACTTCCTTT GACGAGAAATTTCAGTGGAAAATTGAGGCCTGGCGCTTGTACCTCGCGCTCTACTATGTTGTCTGCATCGGCATGAC CATCTTCTGTCTCGATGGTGGTCATGCTGACGAGCCCTCGCGGGAGGCAAGTCCAGACCTCGGCGCGGCAGGGGCGG AGCTCGAGGACGAGAGCGCGCAGGTCGGAGCTGTCCAGGGTCCTGAGACGCTGCGGAGTCAGGTTAGTAGGCAGTGT CAGGAGATTGACTTGCATGATCTTTTCGAGGGCGTGAGGGAGGTTCAGATGGTACTTGATCTCCACGGGTCCGTTGG TGGAGATGTCGATGGCTTGCAGGGTTCCGTGCCCCTTGGGCGCTACCACCGTGCCCTTGTTTTTCCGTTTGGGCGGC GGTGGCTCTGTTGCTTCTTGCATGTTTAGAAGCGGTGTCGAGGGCGCGCACCGGGCGGCAGGGGCGGCTCGGGACCC GGCGGCATGGCCGGCAGTGGTACGTCGGCGCCGCGCGCGGGTAGGTTCTGGTACTGCGCCCTGAGAAGACTTGCATG CGCGACGACGCGGCGGTTGACATCCTGGATCTGACGCCTCTGGGTGAACGCTACCGGCCCCGTGAGCTTGAACCTGA AAGAGAGTTCAACAGAATCAATCTCGGTATCGTTGACGGCGGCTTGCCTAAGGATTTCTTGCACGTCGCCAGAGTTG TCCTGGTAGGCGATCTCGGCCATGAACTGCTCGATCTCTTCCTCTTGAAGATCTCCGCGGCCCGCTCTCTCGACGGT GGCCGCAAGGTCGTTGGAGATGCGTCCAATGAGTTGAGAGAATGCATTCATGCCCGCCTCGTTCCAGACGCGGCTGT AGACCACAGCCCCCTCGGGATCTCTCGCGCGCATGACCACCTGGGCGAGGTTGAGCTCCACGTGGCGGGTGAAGACC GCATAGTTGCATAGGCGCTGGAAAAGGTAGTTGAGTGTGGTGGCGATGTGCTCGGTGACGAAGAAATACATGATCCA TCGTCTCAGCGGCATCTCGCTAACATCGCCCAGCGCTTCCAAGCGCTCCATGGCCTCGTAGAAGTCCACGGCAAAGT TGAAAAACTGGGAGTTACGCGCGGACACGGTCAACTCCTCTTCCAGAAGACGGATGAGTTCGGCGATGGTGGTGCGC ACCTCGCGCTCGAAAGCCCCCGGGATTTCTTCCTCAATTTCTTCTTCTTCCACTAACATCTCTTCCTCTTCAGGTGG GGCTGCAGGAGGAGGGGGAACGCGGCGACGCCGGCGGCGCACAGGCAGACGGTCGATGAATCTTTCAATGACCTCTC CGCGGCGGCGGCGCATGGTCTCGGTGACGGCACGACCGTTCTCCCTGGGTCTCAGAGTGAAGACGCCTCCGCGCATC TCCCTGAAGTGGTGACTGGGAGGCTCTCCGTTGGGCAGGGACACCGCGCTGATTATGCATTTTATCAATTGCCCCGT AGGTACTCCGCGCAAGGACCTGATCGTCTCAAGATCCACGGGATCTGAAAACCTTTCGACGAAAGCGTCTAACCAGT CGCAATCGCAAGGTAGGCTGAGCACTGTTTCTTGCGGGGGGGGCGGCTAGACGCTCGGTCGGGGTTCTCTCTTTCT TCTCCTTCCTCCTCTTTGGAGGGTGAGACGATGCTGCTGGTGATGAAATTAAAATAGGCAGTTTTGAGACGGCGGAT GGTGGCGAGGAGCACCAGGTCTTTGGGTCCGGCTTGTTGGATGCGCAGGCGATGGGCCATTCCCCAAGCATTATCCT GACATCTGGCCAGATCTTTATAGTAGTCTTGCATGAGTCGTTCCACGGGCACTTCTTCTTCGCCCGCTCTGCCATGC ATGCGAGTGATCCCGAACCCGCGCATGGGCTGGACAAGTGCCAGGTCCGCTACAACCCTTTCTGCGAGGATGGCTTG CTGCACCTGGGTGAGGGTGGCTTGGAAGTCGTCAAAGTCCACGAAGCGGTGGTAAGCCCCGGTGTTGATTGTGTAGG AGCAGTTGGCCATGACTGACCAGTTGACTGTCTGGTGCCCCGGACGCACAATCTCGGTGTACTTGAGGCGCGAGTAG GCGCGGGTGTCAAAGATGTAATCGTTACAGGTGCGCACCAGGTACTGGTAGCCGATGAGAAAGTGAGGCGGCGGCTG GCGGTATAGGGGCCATCGCTCTGTAGCCGGGGCGCCAGGGGCGAGGTCTTCCAGCATGAGGCGGTGATAACCGTAGA TGTACCTGGACATCCAGGTGATACCGGAGGCGGTGGTGGATGCCCGCGGGAACTCGCGTACGCGGTTCCAGATGTTG CGCAGCGGCATGAAGTAGTTCATGGTAGGCACGGTTTGGCCCGTGAGACGCGCACAGTCGTTGATGCTCTAGACATA CGGGCAAAAACGAAAGCGGTCAGCGGCTCGTCTCCGTGGCCTGGAGGCTAAGCGAACGGGTTGGGCTGCGCGTGTAC CCCGGTTCGAATCTCGGATCAGGCTGGAGCCGCAGCTAACGTGGTACTGGCACTCCCGTCTCGACCCAGGCCTGCAC AAAACCTCCAGGATACGGAGGCGGGTCGTTTTTTTTTTGCTTTTTCCTGGATGGGAGCCAGTGCTGCGTCAAGCTTT AGAACACTCAGTTCTCGGGGCTGGGAGTGGCTCGCGCCCGTAGTCTGGAGAATCAATCGCCAGGGTTGCGTTGCGGT GTGCCCCGGTTCGAGTCTTAGCGCGCCGGATCGGCCGGTTTCCGCGACAAGCGAGGGTTTGGCAGCCTCGTCATTTC TAAGACCCCGCCAGCCGACTTCTCCAGTTTACGGGAGCGAGCCCTCTTTTTTTTGTTTTTTGTTGCCCAGATGCATC CCGTGCTGCGACAGATGCGCCCCCAGCAACAGCCCCCTTCTCAGCAGCAGCTACAACAACAGCCACAAAAGGCTCTT CCTGCTCCTGTAACTACTGCGGCTGCAGCCGTCAGCGGCGCGGGACAGCCCGCCTATGATCTGGACTTGGAAGAGGG CGAGGGATTGGCGCGCCTGGGGGCTCCATCGCCCGAGCGGCACCCGCGGGTGCAACTAAAAAAGGACTCTCGCGAGG CGTACGTGCCCCAACAGAACCTATTCAGGGACAGGAGCGGCGAGGAGCCAGAGGAGATGCGAGCATCTCGATTTAAC GCGGGTCGCGAGCTGCGCCACGGTCTGGATCGAAGACGGGTGCTGCAAGACGAGGATTTTGAGGTCGATGAAGTGAC AGGGATCAGCCCAGCTAGGGCACATGTGGCCGCGGCCAACCTAGTCTCGGCCTACGAGCAGACCGTGAAGGAGGAGC GCAACTTCCAAAAATCTTTTAACAACCATGTGCGCACCCTGATCGCCCGCGAGGAAGTGACCCTGGGTCTGATGCAC CTGTGGGACCTGATGGAGGCTATCACCCAGAACCCCACTAGCAAACCCCTGACAGCTCAGCTGTTTCTGGTGGTTCA ACATAGCAGGGACAACGAGGCATTCAGGGAGGCGTTGTTGAATATCACCGAGCCTGATGGGAGATGGCTGTATGATC TGATTAACATCCTGCAAAGTATTATAGTGCAGGAACGTAGCCTGGGTTTGGCTGAGAAAGTGGCAGCTATCAACTAC TCGGTCTTGAGCCTGGGCAAATACTACGCTCGCAAGATCTACAAGACCCCCTACGTACCCATTGACAAGGAGGTGAA GATAGATGGGTTTTACATGCGCATGACTCTCAAGGTGTTGACTTTAAGCGACGATCTGGGGGTGTATCGCAATGACA GGATGCACCGCGCGGTGAGCGCCAGCAGGAGGCGCGAGCTGAGCGACAGAGAACTTATGCACAGCTTGCAAAGGGCT CTAACGGGGGCCGGAACTGATGGGGAGAACTACTTTGACATGGGAGCGGACTTGCAATGGCAACCCAGTCGCAGGGC CATGGAGGCTGCAGGGTGTGAGCTTCCTTACATAGAAGAGGTGGATGAAGTCGAGGACGAGGAGGGCGAGTACTTGG AAGACTGATGGCGCGACCCGTATTTTTGCTAGATGGAACAACAGCAGGCACCGGACCCCGCAATGCGGGCGGCGCTA CAGAGCCAGCCGTCCGGCATTAACTCCTCGGACGATTGGACCCAGGCCATGCAACGTATAATGGCGCTGACGACCCG CAACCCCGAAGCCTTTAGACAGCAACCCCAGGCCAACCGCCTTTCGGCCATACTGGAGGCCGTAGTGCCCTCCCGCT CCAACCCCACCCACGAGAAGGTCCTGGCTATCGTGAACGCGCTGGTGGAGAACAAGGCCATCCGTCCCGATGAGGCC GGGCTGGTATACAATGCTCTTTTGGAGCGCGTGGCCCGTTACAACAGCAGCAACGTGCAGACCAACCTGGACCGGAT GGTGACCGATGTGCGCGAGGCTGTGTCTCAGCGCGAGCGGTTCCAGCGCGACGCCAACTTGGGGTCATTGGTAGCGC TAAACGCTTTCCTTAGCACCCAGCCCGCCAACGTGCCCCGTGGTCAGCAAGACTATACAAACTTTTTGAGTGCATTG AGACTCATGGTATCTGAGGTGCCCCAGAGCGAGGTGTACCAGTCCGGGCCAGATTACTTCTTCCAGACCAGCAGACA GGGCTTGCAGACAGTGAACCTGACCCAGGCTTTCAAGAACCTGAAGGGTCTGTGGGGAGTGCACGCCCCAGTAGGAG ATCGCGCGACCGTGTCTAGCTTGCTGACTCCCAACTCCCGCCTGCTGCTGCTGCTGGTATCCCCCTTCACTGACAGC GGTAGCATCGACCGCAACTCCTACTTGGGCTACCTGCTTAACCTGTATCGCGAGGCTATAGGACAGAGCCAGGTGGA CGAGCAGACCTATCAAGAAATCACCCAAGTGAGCCGCGCCCTGGGTCAGGAAGACACAGGCGGTTTGGAAGCCACCC TGAACTTCTTACTAACCAACCGGTCGCAGAAGATCCCTCCTCAGTATGCGCTTACCGCTGAGGAGGAGCGGATCCTA AGATACGTGCAACAGAGCGTTGGACTGTTTTTGATGCAGGAGGGGGCGACACCTACCGCCGCGCTGGATATGACAGC TCGAAACATGGAGCCCAGCATGTATGCTAGTAACAGGCCTTTCATTAACAAACTGCTGGACTACCTGCACAGGGCGG CCGCCATGAACTCTGATTATTTCACCAATGCTATTCTGAACCCACACTGGCTGCCCCCACCTGGTTTCTACACTGGC GAATACGACATGCCCGATCCCAATGACGGGTTCCTATGGGACGATGTGGACAGTAGCATATTTTCCCCGCCGCCAGG TTATACGGTTTGGAAGAAGGAAGGGGGCGATAGAAGGCACTCTTCCGTATCGTTGCCCGGAACGGCTGGTGCTGCCG CGGCCGTGCCCGAAGCTGCGAGTCCTTTCCCTAGCTTGTCCTTTTCACTAAACAGCGTTCGCAGCAGTGAACTGGGG AGAATAAACCGCCCGCGCTTGATGGGCGAGGATGAGTACTTGAATGACTCTTTGCTGAGGCCAGAGAGGGAAAAGAA CTTCCCTAACAATGGAATAGAGAGCCTGGTGGATAAGATGAGTAGATGGAAGACCTATGCGCAGGATCACAGAGACG AGCCCAGGATCTTGGGGGCTACAAGCAGACCGAGCCGTAGACGCCAGCGCCACGACAGGCAGATGGGTCTTGTGTGG GACGACGAGGACTCTGCCGATGACAGCAGCGTGTTGGACTTGGGTGGAAAAGGAGTTGGCAACCCGTTCGCTCATCT GCGTCCCCGTTTCGGTCGCATGTTGTAAAAGTGAAAGTAAAAATAAAAAGGCAACTCACCAAGGCCATGGCAACCGA GCGTGCGTTCGTTCTTTTTTTTGTTATCTGTATCTAGTACGATGAGGAGACGAGCCGTGCTAGGCGGAGCGGTGGTG TATCCGGAGGGTCCTCCTCCTTCTTACGAGAGCGTGATGCAGCAACAGGCGGCGATGATACAGCCCCCACTGGAGGC TCCCTTCGTACCCCCTCGGTACCTGGCGCCTACGGAAGGGAGAAATAGCATTCGTTACTCGGAGCTGTCACCCCAGT ACGATACCACCAAGTTGTATCTGGTGGACAACAAGTCGGCGGACATCGCCTCCCTGAACTATCAGAACGACCACAGC AACTTCCTGACCACAGTGGTGCAGAACAATGACTTTACCCCCACGGAGGCTAGCACCCAGACCATTAACTTTGACGA GCGGTCGCGGTGGGGCGGTCAGCTGAAGACCATTATGCACACCAACATGCCCAACGTGAACGAGTACATGTTCAGCA ACAAGTTTAAGGCGAGGGTGATGGTATCTAGGAAGGCTCCTGAAGGTGTTACAGTAAATGATCATAAAGATGATATT TTGAAATATGAGTGGTTTGAGTTCACTTTACCAGAAGGTAACTTCTCAGCTACCATGACCATCGACCTGATGAACAA TGCCATCATTGACAACTACCTGAAAATTGGCAGACAGAATGGAGTGCTGGAAAGTGACATTGGTGTTAAGTTTGACA CTAGAAACTTCAGGCTCGGGTGGGACCCCGAAACTAAGTTGATTATGCCAGGGGTCTACACTTATGAGGCATTCCAT CCTGACATTGTTTTGTTGCCTGGTTGCGGGGTAGATTTTACTGAAAGCCGACTTAGCAACTTGCTTGGCATCAGGAA GAGACATCCATTCCAGGAGGGTTTCAAAATCATGTATGAAGATCTTGAAGGGGGTAATATTCCTGCCCTTTTGGATG TCACTGCCTATGAGGAAAGCAAAAAGGATACCACTACTGAAACAGGCGAAAAGGCGGTGGTTAAAACAACCACAGTG GCTGTTGCAGAGGAAACCAGTGAAGATGATAATATAACTAGAGGAGATACTTATATAACTGAAAAACAAAAACGTGA AGCTGCAGCTGCAGAACTATTACTTATGTCTGAAGTTAAAAAAGAGTTAAAGATCCAACCTTTAGAAAAAGACAGCA AGAATAGAAGCTACAATGTCTTGGAAGACAAAATCAACACAGCCTACCGCAGCTGGTACCTGTCCTACAATTATGGT AACCCTGAGAAAGGAATAAGGTCCTGGACACTGCTCACCACTTCGGATGTCACCTGTGGAGCCGAGCAGGTCTACTG GTCGCTCCCCGACATGATGCAAGACCCCATCACCTTCCGCTCCTCGAGACAAGTCAACAACTACCCAGTAGTGGGTG CAGAGCTTATGCCGGTCTTCTCAAAGAGTTTCTACAATGAGCAAGCCGTGTACTCTCAGCAGCTCCGACAGTCCACC TCGCTCACGCACGTCTTCAACCGCTTCCCTGAGAACCAGATCCTCATCCGCCCGCCGGCGCCCACAATTACCACCAT CAGTGAAAACGTTCCTGCTCTCACAGATCACGGGACCCTGCCGTTACGCAGCAGTATCCGGGGAGTCCAGCGCGTGA CCGTTACTGACGCCAGACGTCGCACCTGTCCCTACGTTTACAAGGCCCTGGGCATAGTCGCGCCGCGCGTTCTTTCA AGCCGCACTTTCTAAAAAAAAAAAAAAATGTCCATTCTCATCTCGCCCAGTAATAATACCGGTTGGGGACTGCATGC GCCCACCAAGATGTACGGAGGCGCCCGCAAACGCTCTACCCAGCACCCCGTGCGCGTTCGCGGTCATTTCCGCGCTC CCTGGGGCGCCCTCAAGGGCCGTACCCGCACTCGGACCACGGTCGATGATGTGATCGACCAGGTGGTTGCCGATGCT CGTAATTATACTCCTACTGCGCCTACATCTACTGTGGATGCAGTTATTGACAGTGTAGTGGCAGACGCTCGCGCCTA TGCTCGCCGGAAGAGCCGAAGGAGGCGCATCGCCAGGCGCCACAGGGCTACTCCCGCTATGCGAGCTGCAAAAGCTA TTCTGCGGAGGGCCAAACGTGTGGGACGAAGAGCCATGCTTAGAGCGGCCAGACGCGCGGCTTCTGGTGCTAGCAGC GGCAGGTCCCGCAGGCGCGCGGCCACGGCGGCAGCAGCGGCCATTGCCAACATGGCCCAACCGCGAAGAGGCAATGT GTATTGGGTGCGCGATGCCACTACCGGCCAGCGCGTGCCCGTGCGCACCCGCCCCCCTCGCACTTAGAAGATACTGA GCAGTCTCCGATGTTGTGTCCCAGCGGCAAGTATGTCCAAGCGCAAATACAAGGAAGAGATGCTCCAGGTCATCGCG CCTGAAATCTACGGTCCGCCGATGAAGGATGAAAAAAAGCCCCGCAAAATCAAGCGGGTTAAAAAGGACAAAAAAGA AGAAGATGGCGATGATGGACTGGTGGAGTTTGTGCGCGAGTTCGCGCCAAGACGGCGCGTGCAGTGGCGCGGTCGAA AAGTACGCCAAGTGCTTAGACCCGGGACCACTGTGGTCTTTACACCTGGCGAGCGTTCCAGCACTACTTTTAAACGG TCCTATGATGAGGTGTATGGGGATGACGATATTATTGAGCAGGCGGCAGACCGCCTTGGCGAGTTTGCTTATGGCAA GCGCACAAGATCCAGTCCCAAAGAGGAGGCGGTATCTATTCCCTTGGATCATGGAAATCCCACCCCTAGCCTCAAAC CAGTCACCCTGCAGCAAGTGCTGCCCGTACCTGCGAGCAGAGGCGTAAAGCGCGAGGGTGAGGACCTATATCCCACC ATGCAGCTAATGGTGCCCAAGCGGCAGAGATTAGAAGACGTACTGGAGAAAATGAAAGTGGATGCCGATATCCAGCC TGAGGTGAAAGTGAGACCCATCAAGGAAGTGGCGCCAGGTTTGGGAGTACAAACCTTTGACATCAAGATTCCCACTG AGTCCATGGAAGTGCAGACCGAACCTGCAAAACCCACAGTCACCTCAATTGAGGTTCAGACGGAACCCTGGATGCCC GCGCCCGTTGCCGCCCCCAGCACCACTAGAAGATCACGTCGAAAGTATGGCCCAGCAAGTCTGCTAATGCCCAACTA TGCTCTGCACCCATCCATCATTCCCACTCCGGGTTACAGAGGCACTCGCTACTATCGAAGTCGGAGCAACACCTCAC GCCGCCGCAAACTACCTGCAAGTCGCACTCGCCGTCGCCGCCGCCGCACCACTGCCAGCAAATTAACTCCCGCCGCC CTGGTGCGGAGAGTGTACCGCGATGGTCGCGCTGAACCTCTGACGCTGCCGCGCGCGCGCTATCATCCAAGCATCAC CACTTAATGACTGTTGACGCTGCCTCCTTGCAGATATGGCTCTCACTTGCCGCCTTCGCGTCCCCATTACTGGCTAC CGAGGAAGAAACTCGCGCCGTAGAAGGATGTTGGGGCGAGGGATGCGCCGCCACAGACGAAGGCGCGCTATCAGCAA GCGATTAGGGGGTGGCTTTCTGCCAGCTCTTATACCCATCATCGCCGCGGCGATCGGGGCGATACCAGGCATAGCTT CCGTGGCGGTTCAGGCCTCGCAGCGCCACTAACAATGGAAAAATTTATAAATAAAAAATAGAATGGACTCTGACGCT CCTGGTCCTGTGACTATGTTTTTGTAGAGATGGAAGACATCAATTTTTCATCCCTGGCTCCGCGACACGGCACGAGG CCGTACATGGGCACCTGGAGCGACATCGGCACGAGCCAACTGAACGGGGGCGCCTTCAATTGGAGCAGTATCTGGAG CGGGCTTAAAAATTTTGGCTCGACCATAAAAACCTATGGGAACAAAGCTTGGAACAGCAGCACAGGGCAGGCCCTTA GAAATAAGCTTAAGGAGCAGAACTTCCAACAAAAGGTGGTCGATGGTATCGCCTCTGGTATTAACGGCGTAGTGGAT CTAGCCAACCAGGCTGTGCAGAAACAGATAAACAGCCGCCTGGACCCGCCGCCCGCAACTCCTGGTGAAATGGAAGT GGAGGAAGAGCTTCCTCCGCTGGAGAAGCGGGGCGACAAGCGACCGCGTCCCGAGCTGGAACAGACGTTGGTGACGC GCGCAGACGAGCCCCCTTCATACGAGGAGGCAGTAAAGCTCGGAATGCCCACTACCAGGCCTGTAGCTCACATGGCT ACCGGGGTGATGAAACCTTCTCAGTCGCATCGGCCTGCCACCTTGGACTTGCCTCCTCCCCCTGCTTCTGCGGCGCC TATTCCCAAACCTGTCGCTACCAGAAAGCCCACCGCCGTACAGCCCGTCGCCGTAGCCAGACCGCGTCCTGGGGCAC ACCGCGCCCGAAAGCAAACTGGCAGAGTACTCTGAACAGCATCGTGGGTCTGGGCGTGCAGAGTGTAAAGCGCCGTC GCTGCTATTAATTAAATATGGAGTAGCGCTTAACTTGCTTGTCTGTGTGTATGTATCATCACCATGCCGCCGCAGCA GAGGAGAAAGGAAGAGGTCGCGCGCCGAGGCTGAGTTGCTTTCAAGATGGCCACCCCATCGATGATGCCCCAATGGG CATACATGCACATCGCCGGACAGGATGCTTCGGAGTACCTGAGTCCGGGTCTGGTGCAGTTCGCCCGTGCAACAGAC ACCTACTTCAGTATGGGGAACAAGTTTAGAAACCCCACAGTGGCGCCCACCCACGATGTGACCACCGACCGTAGCCA GCGACTAATGCTGCGCTTCGTGCCCGTTGACCGGGAAGACAATACCTACTCTTACAAAGTTCGCTACACGCTGGCTG TAGGGGACAACAGAGTACTGGATATGGCCAGCACGTTCTTTGACATCCGCGGCGTGCTGGACCGGGGCCCTAGCTTC AAACCCTACTCCGGGACCGCCTACAACAGCCTGGCTCCCAAGGGAGCGCCCAACACCTGCCAGTGGAAGGATTCTGA CAGCAAAATGCATACCTTTGGGGTAGCTGCCATGCCCGGTGTTACTGGGAAAAAGATAGAAGCTGATGGGCTGCCTA TTGGAATAGATTCAACTTCTGGAACTGACACAGTAATTTATGCTGATAAAACTTTCCAACCAGAACCACAAGTTGGA AATGCCAGTTGGGTTGACGCCAATGGTACAGAGGAAAAATATGGAGGCAGAGCTCTGAAGGACACTACAAAGATGAA ACCCTGCTATGGTTCTTTCGCCAAGCCTACCAACAAAGAAGGTGGTCAGGCTAACTTAAAAGATTCAGAAACCGCCG CCACCACTCCTAACTATGATATAGATCTGGCTTTCTTTGACAACAAAAATATTGCTGCTAACTACGATCCAGATATT GTAATGTACACAGAAAATGTTGACTTGCAGACTCCAGATACTCATATTGTATACAAACCTGGAACAGAGGACACCAG CTCTGAATCCAATTTGGGTCAGCAAGCCATGCCTAACAGACCCAACTACATTGGCTTCAGAGACAATTTTATTGGGC TCATGTACTACAACAGCACTGGCAATATGGGGGTGCTGGCCGGTCAGGCCTCTCAGCTGAATGCTGTGGTTGACTTG CAAGACAGAAACACTGAACTGTCCTACCAGCTCTTGCTTGACTCTCTGGGTGACAGAACCCGGTATTTCAGTATGTG GAATCAGGCGGTGGACAGCTATGATCCTGATGTGCGTATTATTGAAAACCATGGTGTGGAGGACGAATTGCCAAACT ATTGCTTTCCGTTGAATGGTGTGGGATTTACAGACACTTACCAAGGTGTTAAAGTTAAAACAGATGCAGTTGCTGGA ACCAGTGGAACACAGTGGGACAAAGATGACACCACAGTTAGTACTGCTAATGAAATCCATGGAGGCAATCCTTTTGC CATGGAAATCAACATCCAAGCCAATCTATGGCGAAGTTTCCTTTATTCCAATGTGGCTTTGTATCTCCCAGACTCGT ATAAATACACCCCGTCCAATGTCACTCTCCCAGAAAACAAAAACACCTACGACTACATGAACGGGCGGGTGGTGCCG CCATCTCTAGTAGACACCTATGTGAACATTGGTGCCAGGTGGTCTCTGGATGCCATGGACAATGTCAACCCATTCAA CCACCACCGTAACGCTGGCTTGCGTTACCGATCCATGCTTCTGGGTAACGGACGTTATGTGCCTTTCCACATACAAG TGCCTCAAAAATTCTTCGCTGTTAAAAACCTGCTGCTTCTCCCAGGCTCCTACACTTATGAGTGGAACTTTAGGAAG GATGTAAACATGGTTCTACAGAGTTCCCTTGGTAACGACCTACGGGTAGATGGCGCCAGCATCAGTTTCACGAGCAT CAATCTTTATGCTACTTTTTTCCCCATGGCTCACAACACCGCTTCCACCCTTGAAGCCATGCTGCGGAATGACACCA ATGATCAGTCATTCAACGACTACCTATCTGCAGCTAACATGCTCTACCCCATACCTGCCAACGCAACCAATATTCCC ATTTCCATTCCTTCTCGCAACTGGGCGGCTTTCAGAGGCTGGTCATTTACCAGACTGAAAACCAAAGAAACTCCCTC TTTGGGGTCTGGATTTGACCCATACTTTGTCTATTCCGGTTCTATTCCCTACCTGGATGGTACCTTCTATCTAAATC ACACTTTTAAGAAGGTTTCCATCATGTTTGACTCTTCAGTGAGCTGGCCTGGAAATGACAGGTTACTATCTCCTAAC GAATTTGAAATAAAGCGCACTGTGGATGGCGAAGGCTACAACGTAGCCCAATGCAACATGACCAAAGACTGGTTCTT GGTACAGATGCTCGCCAACTACAACATTGGCTACCAGGGCTTTTACATCCCTGAGGGATACAAGGATCGCATGTACT CCTTTTTCAGAAACTTCCAGCCTATGAGCAGGCAGGTGGTTGATGAGGTTAATTACACTGACTACAAAGCCGTCACC TTACCATATCAACACAACAACTCTGGCTTTGTAGGATACCTTGCGCCTACTATGAGACAAGGGGAACCTTACCCAGC CAATTATCCATACCCGCTCATCGGAACTACTGCCGTTAAGAGTGTTACCCAAAAAAAGTTCCTGTGCGACAGGACCA TGTGGCGCATACCGTTCTCCAGCAACTTCATGTCCATGGGGGCCCTTACAGACCTGGGACAAAACCTGCTCTATGCC AACTCGGCCCATGCACTGGACATGACTTTTGAGGTGGATCCCATGGATGAGCCCACCCTGCTTTATCTTCTTTTCGA AGTCTTCGACGTGGTCAGAGTGCACCAGCCACACCGCGGCGTCATCGAGGCCGTCTACCTGCGCACACCGTTCTCGG CCGGCAACGCCACCACATAAGAAGCCTCTTGCTTCTTGCAAGCAGCAGCTGCAGCCATGTCATGCGGGTCCGGAAAC GGCTCCAGCGAGCAAGAGCTCAAAGCCATCGTCCGAGACCTGGGTTGCGGTCCCTATTTCCTGGGAACCTTTGACAA GCGTTTCCCGGGGTTCATGGCCCCCGACAAGCTCGCCTGCGCCATAGTCAACACTGCCGGACGCGAGACGGGGGGAG AGCACTGGCTGGCTTTTGGTTGGAACCCGCGCTCCAACACCTGCTACCTTTTTGATCCTTTTGGGTTCTCGGATGAG CGACTCAAACAGATTTACCAGTTTGAGTACGAGGGGCTCCTGCGCCGCAGTGCCCTTGCTACCAAAGACCGCTGCAT CACCCTGGAAAAGTCCACCCAGAGCGTGCAGGGCCCACGCTCAGCCGCCTGTGGACTTTTTTGCTGTATGTTCCTTC ATGCCTTTGTGCACTGGCCCGACCGTCCCATGAACGGAAACCCCACCATGAAGTTGCTGACTGGGGTGCCCAACAGC ATGCTCCAATCTCCCCAAGTCCAGCCCACCCTGCGCCGCAACCAGGAGGCACTATACCGCTTCCTAAACACCCACTC ATCTTACTTTCGTTCTCACCGCGCACGCATCGAAAGGGCCACCGCGTTTGACCGTATGGATATGCAATAAGTCATGT AAAACCGTGTTCAATAAAAAGCACTTTATTTTTACATGCACTAAGGCTCTGGTTTTTTGCTCATTCGTTTTCATCAT TCACTCAGAAATCAAATGGGTTCTGGCGGGAGTCATAGTGGCCCGCGGGCAGGGATACGTTGCGGAACTGTAACCTG TTCTGCCACTTGAACTCGGGGATCACCAGCTTGGGAACTGGAATCTCGGGAAAGGTGTCTTGCCACAACTTTCTGGT CAGTTGCAGGGCGCCAAGCAGGTCAGGAGCAGAGATCTTGAAATCACAGTTGGGGCCGGCATTCTGGACACGGGAGT TGCGGTACACTGGGTTGCAACACTGGAACACCATCAAGGCTGGGTGTCTCACGCTTGCCAGCACGGTCGGGTCACTG ATGGTAGTCACATCCAAGTCTTCAGCATTGGCCATCCCAAAGGGGGTCATCTTACAGGTCTGCCTGCCCATCACGGG AGCGCAGCCTGGCTTGTGGTTGCAATCGCAATGAATGGGAATCAGCATCATCCTGGCTTGGTCGGGGGTTATCCCTG GATATACGGCCTTCATGAAGGCTTCGTACTGCTTGAAAGCTTCCTGAGCCTTACTTCCCTCGGTGTAGAACATTCCA CAGGACTTGCTGGAAAATTGGTTAGTAGCACAGTTGGCATCATTTACACAGCAGCGGGCATCGTTGTTGGCCAACTG AACCACATTTCTGCCCCAGCGGTTCTGGGTGATCTTGGCTCTGTCTGGGTTCTCCTTCATAGCGCGCTGCCCGTTCT CGCTCGCCACATCCATCTCGATAATGTGGTCCTTCTGGATCATGATAGTGCCATGCAGGCATTTCACCTTGCCTTCG TAATCGGTGCATCCATGAGCCCACAGAGCGCACCCGGTGCACTCCCAATTATTGTGGGCGATCTCAGAATAAGAATG CACCAATCCCTGCATGAATCTTCCCATCATCGCTGTCAGGGTCTTCATGCTACTAAATGTCAGCGGAATGCCACGGT GCTCCTCGTTCACATACTGGTGGCAGATACGCTTGTACTGCTCGTGCTGCTCTGGCATCAGCTTGAAAGAGGTTCTC AGGTCATTATCCAGCCTATACCTCTCCATTAGCACAGCCATCACTTCCATGCCCTTCTCCCAGGCAGATACCAGGGG CAAGCTCAAAGGATTCCTAACAGCAATAGAAGTAGCTCCTTTAGCTATAGGGTCATTCTTGTCGATCTTCTCAACAC TTCTCTTGCCATCCTTCTCAATGATGCGCACCGGGGGGTAGCTGAAGCCCACGGCCACCAACTGAGCCTGTTCTCTT TCTTCTTCGCTGTCCTGGCTGATGTCTTGCAGAGGGACATGCTTGGTCTTCCTGGGCTTCTTCTTGGGAGGGATCGG GGGAGGACTGTTGCTCCGTTCCGGAGACAGGGATGACCGCGAAGTTTCGCTTACCAGTACCACCTGGCTCTCGATAG AAGAATCGGACCCCACGCGACGGTAGGTGTTCCTCTTCGGGGGCAGAGGTGGAGGCGACTGAGATGGGCTGCGGTCT GGCCTTGGAGGCGGATGGCTGGCAGAGCCCATTCCGCGTTCGGGGGTGTGCTCCCGTTGGCGGTCGCTTGACTGATT TCCTCCGCGGCTGGCCATTGTGTTCTCCTAGGCAGAGAAACAACAGACATGGAAACTCAGCCATCACTGCCAACATC GCTGCAAGCGCCATCACACCTCGCCCCCAGCAGCGACGAGGAGGAGAGCTTAACCACCCCACCACCCAGTCCCGCTA CCACCACCTCTACCCTCGATGATGAGGAGGAGGTCGACGCAGCCCAGGAGATGCAGGCGCAGGATAATGTGAAAGCG GAAGAGATTGAGGCAGATGTCGAGCAGGACCCGGGCTATGTGACACCGGCGGAGCACGAGGAGGAGCTGAAACGTTT TCTAGACAGAGAGGATGACGACCGCCCAGAGCATCAAGCAGATGGCGATCACCAGGAGGCTGGCCTCGGGGATCATG TTGCCGACTACCTCTCCGGGCGTGGGGGGGAGGACGTGCTCCTCAAACATCTAGCAAGGCAGTCGCTCATAGTTAAA GACGCACTACTCAACCTCACCGAAGTGCCCATCAGTGTGGAAGAGCTTAGCCGCGCCTACGAGCTGAACCTCTTTTC GCCTCAGATACCCCCCAAGCGGCAGCCAAACGGCACCTGCGAGGCCAACCCTCGACTCAACTTCTATCCAGCTTTTA CTGTCCCCGAAGTGCTGGCCACCTACCACATCTTTTTTAAGAACCAAAAGATTCCAGTCTCCTGCCGCGCCAACCGC ACCCGCGCAGATGCCCTTCTCAACTTGGGTCCGGGAGCTCGCTTACCTGATATAGCTTCCTTGGAAGAGGTTCCAAA GATCTTTGAGGGTCTGGGAAGTGATGAGACTCGGGCCGCAAATGCTCTGCAACAGGGAGAGAATGGCATGGATGAAC ATCACAGCGCTCTAGTGGAACTGGAGGGTGACAATGCCCGGCTTGCAGTGCTCAAGCGCAGTATCGTGGTCACCCAT TTTGCCTACCCCGCTGTTAACCTGCCGCCCAAAGTCATGAGCGCTGTCATGGACCATCTGCTCATCAAACGAGCAAG TCCACTTTCAGAAAACCAGAACATGCAGGATCCAGACGCCTCGGACGAGGGCAAGCCGGTAGTCAGTGACGAGCAGC TATCTCGCTGGCTGGGTACCAACTCCCCCCGAGATTTGGAAGAAAGACGCAAGCTTATGATGGCTGTAGTGCTAGTA ACTGTTGAGTTGGAGTGTCTGCGCCGCTTTTTTACCGACCCCGAGACCCTGCGCAAGCTAGAGGAGAACCTGCACTA CACCTTCAGACATGGCTTCGTGCGGCAGGCATGCAAGATCTCCAACGTGGAGCTCACCAACCTGGTTTCATACATGG GCATTTTGCATGAGAACCGGCTAGGGCAGAGCGTTCTGCACACCACCCTGAAGGGGGAGGCCCGCCGCGACTACATC CGAGACTGTGTCTACCTCTACCTCTGCCATACCTGGCAGACTGGTATGGGTGTGTGGCAACAGTGTTTGGAAGAGCA GAACCTTAAAGAGCTGGACAAGCTCTTGCAGAGATCCCTCAAAGCCCTGTGGACAGGTTTTGACGAGCGCACCGTCG CCTCGGACTTGGCGGACATCATCTTCCCCGAGCGTCTTACGGTTACTCTGCGAAACGGCCTGCCAGACTTCATGAGC CAGAGCATGCTTAACAACTTTCGCTCTTTCATCCTGGAACGCTCCGGTATCCTGCCTGCCACCTGCTGTGCGCTGCC CTCCGACTTTGTGCCTCTCACCTACCGCGAGTGCCCACCGCCGCTATGGAGCCACTGCTACCTATTCCGCCTGGCCA ACTACCTCTCCTACCACTCGGATGTGATAGAGGATGTGAGCGGAGACGGCCTGCTGGAATGCCACTGCCGATGCAAT TTATGCACACCCCACCGCTCCCTCGCCTGCAACCCCCAGTTGCTAAGCGAGACCCAGATCATCGGCACCTTCGAGTT GCAGGGTCCCAACAGTGAAGGCGAGGGGTCTTCTCCGGGGCAGAGTCTGAAACTGACACCGGGGCTGTGGACCTCCG CCTACCTGCGCAAGTTTCATCCCGAGGACTATCATCCCTATGAGATCAGGTTCTATGAGGACCAGTCACATCCTCCC AAAGTCGAGCTCTCAGCCTGCGTCATCACCCAGGGGGCAATTCTGGCCCAATTGCAAGCCATCCAAAAATCCCGCCA AGAATTTCTGCTGAAAAAGGGAAGCGGGGTCTACCTTGACCCCCAGACCGGTGAGGAGCTCAACACAAGGTTCCCCC AGGATGTCCCATCGCCGAGGAAGCAAGAAGCTGAAGGTGCAGCTGTCACCCCCAGAGGATATGGAGGAAGACTGGGA CAGTCAGGCAGAGGAGGAGATGGAAGATTGGGACAGCCAGGCAGAGGAGGTGGACAGCCTGGAGGAAGACAGTTTGG AGGAGGAAGACGAGGAGGCAGAGGAGGTGGAAGAAGCAACCGCCGCCAAACAGTTGTCATCGGCGGCGGAGACAAGC AAGTCCCCAGACAGCAGCACGGCTACCATCTCCGCTCCGGGTCGGGGGGCCCAGCGGCGGCCCAACAGTAGATGGGA CGAGACCGGGCGATTCCCAAACCCGACCACCGCTTCCAAGACCGGTAAGAAGGAGCGACAGGGATACAAGTCCTGGC GTGGACATAAAAACGCTATCATCTCCTGCTTGCATGAATGCGGGGGCAACATATCCTTCACCCGGCGATACCTGCTT TTCCACCACGGTGTGAACTTCCCCCGCAATATCTTGCATTACTACCGTCACCTCCACAGCCCCTACTGCAGTCAGCA AGTCCCGGCAACCCCGACAGAAAAAGACAGCAGCGACAACGGTGACCAGAAAACCAGCAGTTAGAAAATCCACAACA AGTGCAGCAGGAGGAGGACTGAGGATCACAGCGAACGAGCCAGCGCAGACCAGAGAGCTGAGGAACCGGATCTTTCC AACCCTCTATGCCATCTTCCAGCAGAGTCGGGGGCAAGAGCAGGAATTAAAAGTAAAAAACCGATCTCTGCGCTCGC TCACCAGAAGTTGTTTGTATCACAAGAGCGAAGACCAACTTCAGCGCACTCTCGAGGACGCCGAGGCTCTCTTCAAC AAGTACTGCGCGCTGACTCTTAAAGAGTAGCCCTTGCCCGCGCTCATTCGAAAACGGCGGGAATCACGTCACCCTTG GCAGCTGTCCTTTGCCCTCGTCATGAGTAAAGAGATTCCCACGCCTTACATGTGGAGCTATCAGCCCCAAATGGGGT TGGCAGCAGGTGCTTCCCAGGACTACTCCACCCGCATGAATTGGCTTAGCGCCGGGCCCTCAATGATATCACGGGTT AATGATATACGAGCTTATCGAAACCAGTTACTCCTAGAACAGTCAGCTCTCACCACCACACCCCGCCAACACCTTAA TCCCCGAAATTGGCCCGCCGCCCTGGTGTACCAGGAAAATCCCGCTCCCACCACCGTACTACTTCCTCGAGACGCCC AGGCCGAAGTTCAGATGACTAACGCAGGTGTACAGCTGGGGGGGGTTCCGCCCTATGTCGTCACCGACCTCAACAG AGTATAAAACGCCTGGTGATCAGAGGCCGAGGTATCCAGCTCAACGACGAGTCGGTTAGCTCTTCGCTTGGTCTGCG ACCAGACGGAGTCTTCCAGATCGCCGGCTGTGGGAGATCTTCCTTCACTCCTCGTCAGGCTGTGCTGACTTTGGAGA GTTCGTCCTCGCAGCCCCGCTCGGGCGGCATCGGAACTCTCCAGTTTGTGGAGGAGTTTACTCCCTCTGTCTACTTC AACCCCTTCTCCGGCTCTCCTGGCCAGTACCCGGACGAGTTCATACCGAACTTCGACGCAATCAGCGAGTCAGTGGA TGGCTATGATTGATGTCTAATGGTGGCGCGGCTGAGCTAGCTCGACTGCGACACCTAGACCACTGCCGCCGCTTTCG CTGTTTCGCCCGGGAACTCACCGAGTTCATCTACTTCGAACTCTCCGAGGAGCACCCTCAGGGTCCGGCCCACGGAG TGCGGATTACCATCGAAGGGGGAATAGACTCTCGCCTGCATCGCATCTTCTCCCAGCGGCCCGTGCTGATTGAGCGC GACCAGGGAAATACAACCATCTCCATCTACTGCATTTGTAACCACCCCGGATTGCATGAAAGCCTTTGCTGTCTTGT TTGTGCTGAGTTTAATAAAAACTGAGTTAAGACCCTCCTACGGACTACCGCTTCTTCAATCAGGACTTTACAACACC AACCAGATCTTCCAGAAGACCCAGACCCTTCCTCCTCTGATCCAGGACTCTAACTCTACCTTACCAGCACCCTCCAC TACTAACCTTCCCGAAACTAACAAGCTTGGATCTCATCTGCAACACCGCCTTTCACGAAGCCTTCTTTCTGCCAATA CTACCACTCCCAAAACCGGAGGTGAGCTCCGCGGTCTTCCTACTGACGACCCCTGGGTGGTAGCGGGTTTTGTAACG TTAGGAGTAGTTGCGGGTGGGCTTGTGCTAATCCTTTGCTACCTATACACACCTTGCTGTGCATATTTAGTCATATT GTGCTGTTGGTTTAAGAAATGGGGGCCATACTAGTCGTGCTTGCTTTACTTTCGCTTTTGGGTCTGGGCTCTGCTAA TCTCAATCCTCTTGATCACGATCCATGTCTAGACTTCGACCCAGAAAACTGCACACTTACTTTTGCACCCGACACAA GCCGTCTCTGTGGAGTTCTTATTAAGTGCGGATGGGACTGCAGGTCCGTTGAAATTACACATAATAACAAAACATGG AACAATACCTTATCCACCACATGGGAGCCAGGAGTTCCCGAGTGGTATACTGTCTCTGTCCGAGGTCCTGACGGTTC CATTCGCATTAGTAACAACACTTTCATTTTTTCTGAAATGTGCGATCTGGCCATGTTTATGAGCAAACAGTATGACC TATGGCCTCCTAGCAAAGAGAACATTGTGGCATTTTCCATTGCTTATTGCTTGGTAACATGCATCATCACTGCTATC ATTTGTGTGTGCATACACTTGCTTATAGTTATTCGCCCTAGACAAAGCAATGAGGAAAAAGAGAAAATGCCTTAACC TTTTTCCTCATACCTTTTCTTTACAGCATGGCTTCTGTTACAGCTCTAATTATTGCCAGCATTGTCACTGTCGCTCA CGGGCAAACAATTGTCCATATTACCTTAGGACATAATCACACTCTTGTAGGGCCCCCAATTACTTCAGAGGTTATTT GGACCAAACTTGGAAGTGTTGATTATTTTGATATAATTTGCAACAAAACTAAACCAATATTTGTAATCTGCAACAGA CAAAATCTCACGTTAATTAATGTCAGCAAAATTTATAACGGTTACTATTATGGTTATGATAGATCCAGTAGTCAATA TAAAAATTACTTAGTTCGCATAACTCAACCCAAATCAACAGTGCCAACTATGACAATAATTAAAATGGCTAATAAAG CATTAGAAAATTTTACATTACCAACAACGCCCAATGAAAAAAACATTCCAAATTCAATGATTGCAATTATTGCGGCG GTGGCATTGGGAATGGCACTAATAATAATATGCATGTTCCTATATGCTTGTTGCTATAAAAAGTTTAAACATAAACA GGATCCACTACTAAATTTTAACATTTAATTTTTTATACAGATGATTTCCACTACAATTTTTATCATTACTAGCCTTG CAGCTGTAACTTATGGCCGTTCACACCTAACTGTACCTGTTGGCTCAACATGTACACTACAAGGACCCCAAGAAGGC CATGTCACTTGGTGGAGAATATATGATAATGGAGGGTTCGCTAGACCATGTGATCAGCCTGGTACAAAATTTTCATG CAACGGAAGAGACTTGACCATTATTAACATAACATTAAATGAGCAAGGCTTCTATTATGGAACCAACTATAAAAATA GTTTAGATTACAACATTATTGTAGTGCCAGCCACCACTTCTGCTCCCCGCAAATCCACTTTCTCTAGCAGCAGTGCC AAAGCAAGCACAATTCCTAAAACAGCTTCTGCTATGTTAAAGCTTCGAAAAATCGCTTTAAGTAATTCCACAGCCGC TCCCAATACAATTCCTAAATCAACAATTGGCATCATTACTGCCGTGGTAGTGGGATTAATAATTATATTTTTGTGCA TAATGTACTACGCCTGCTGCTATAGAAAACATGAACAAAAAGGTGATGCATTACTAAATTTTGATATTTAATTTTTT ATAGAATTATGATATTGTTTCAATCAAATACCACTAACACTATCAATGTGCAGACTACTTTAAATCATGACATGGAA AACCACACTACCTCCTATGCATACACAAACATTCAGCCTAAATACGCTATGCAACTAAGAAATCACCATACTAATTG TAATTGGAATTCTTATACTATCTGTTATTCTTTATTTTATATTCTGCCGTCAAATACCCAATGTTCATAGAAATTCT AAAAGACGACCCATCTATTCTCCTATGATTAGTCGTCCCCATATGGCTCTGAATGAAATCTAAGATCTTTTTTTTTC TCTTACAGTATGGTGAACATCAATCATGATTCCTAGAAATTTCTTCTTCACCATACTCATCTGTGCTTTCAATGTCT GTGCTACTTTCACAGCAGTAGCCACTGCAAGCCCAGACTGTATAGGACCATTTGCTTCCTATGCACTTTTTGCCTTC GTTACTTGCATCTGCGTGTGTAGCATAGTCTGCCTGGTTATTAATTTTTTCCAACTGGTAGACTGGATCTTTGTGCG AATTGCCTACCTACGTCACCATCCCGAATACCGCAATCAAAATGTTGCGGCACTTTTTAGGCTTATTTAAAACCATG CAGGCTATGCTGCCAGTCATTTTAATTCTGCTCCTACCCTGCATTGCCCTAGCTTCCACCGCCACTCGCGCTACACC TGAACAACTTAGAAAATGCAAATTTCAACAACCATGGTCATTTCTTGATTGCTACCATGAAAAATCTGATTTTCCCA CATACTGGATAGTGATTGTTGGAATAATTAACATACTTTCATGTACCTTTTTCTCAATCACAATATACCCCACATTT AATTTTGGGTGGAATTCTCCCAATGCACTGGGTTACCCACAAGAACCACATGAACATATCCCACTACAACACATACA ACAACCACTAGCACTGGTAGAGTATGAAAATGAGCCACAACCTTCACTGCCTCCTGCCATTAGTTACTTCAACCTAA CCGGCGGAGATGACTGAAATACTCACCACCTCCAATTCCGCCGAGGATCTGCTTGATATGGACGGCCGCGCCTCAGA ACAGCGACTCGCCCAACTACGCATACGCCAGCAGCAGGAACGTGCCGCCAAGGAGCTCAGGGATGCTATTGAAATTC ACCAATGCAAAAAAGGCATATTTTGTTTGGTAAAACAAGCCAAGATATCCTACGAGATTACCAATACTGACCATCGC CTCTCATACGAGCTCGGACCGCAGCGACAAAAATTCACTTGTATGGTGGGAATCAACCCCATAATCATCACCCAGCA AGCTGGAGATACCAAGGGTTGCATCCACTGTTCCTGCAGTTCCGCCGAGTGCATCTACACCCTGCTGAAGACCCTCT GCGGCCTTCGAGACCTCCTACCCATGAACTAATCAACCCAGCCCCTCACTTACCAATTACATAAAGCCAATTAATAA AAACACTTACTTGAAATCAGAAATAAGGTTTCTGTCTACGTTGTTTCCAAGCAGCACCTCACTTCCTTCTTCCCAAC TCTGGTACTCTAAGCCTCGGCGGGTGGCATACTTCCTCCACACTTTGAAAGGGATGTCAAATTTTAGTTCCTCTTCT TTGCCCACAATCTTCATTTCTTTATCCCCAGATGGCCAAACGAGCTCGGCTAAGCAGCTCCTTCAATCCGGTCTACC CCTATGAAGATGAAAGCAGCTCACAACACCCCTTTATAAACCCTGGTTTCATTTCCTCAAATGGTTTTGCACAAAGC CCAGATGGAGTTCTAACTCTTAAATGTGTTAATCCACTCACTACCGCCAGCGGACCCCTCCAACTTAAAGTTGGAAG CAGTCTTACAGTAGATACTATCGATGGGTCTTTGGAGGAAAATATAACTGCCGCAGCGCCACTCACTAAAACTAACC ACTCCATAGGTTTATTAATAGGATCTGGCTTGCAAACAAAGGATGATAAACTTTGTTTATCGCTGGGAGATGGGTTG GTAACAAAGGATGATAAACTATGTTTATCGCTGGGAGATGGGTTAATAACAAAAAATGATGTACTATGTGCCAAACT AGGACATGGCCTTGTGTTTGACTCTTCCAATGCTATCACCATAGAAAACAACACCTTGTGGACAGGCGCAAAACCAA GCGCCAACTGTGTAATTAAAGAGGGAGAAGATTCCCCAGACTGTAAGCTCACTTTAGTTCTAGTGAAGAATGGAGGA CTGATAAATGGATACATAACATTAATGGGAGCCTCAGAATATACTAACACCTTGTTTAAAAACAATCAAGTTACAAT CGATGTAAACCTCGCATTTGATAATACTGGCCAAATTATTACTTACCTATCATCCCTTAAAAGTAACCTGAACTTTA AAGACAACCAAAACATGGCTACTGGAACCATAACCAGTGCCAAAGGCTTCATGCCCAGCACCACCGCCTATCCATTT ATAACATACGCCACTGAGACCCTAAATGAAGATTACATTTATGGAGAGTGTTACTACAAATCTACCAATGGAACTCT CTTTCCACTAAAAGTTACTGTCACACTAAACAGACGTATGTTAGCTTCTGGAATGGCCTATGCTATGAATTTTTCAT GGTCTCTAAATGCAGAGGAAGCCCCGGAAACTACCGAAGTCACTCTCATTACCTCCCCCTTCTTTTTTTCTTATATC AGAGAAGATGACTGACAACAAAAAAAATAAAGATCAACTTTTTTATTGAAAATCAGTTTACAAGATTCGAGTAGTTA TTTTGCCCCCCTCTTCCCATTTTATAGAATACACAATTCTCTCCCCACGCACAGCTTTGAACATTTGAATTCCATTA GAGATAGACATAGTTTTAGATTCCACATTCCACACAGTTTCAGAGCGGGCCAATCTTGGATCAGTGATAGATATAAA TCCATCGGAACAGTCTTTCAAGGTGGTTTCACAGTCCAACTGCTGCGGCTGCGGCTCCGGGGTTTGGATTAGGGTCA TCTGGAAGAAGAACGATGGGAGTCATAATCCGAGAACGGGATCGGGCGGTTGTGTCTTAAACCTCGAAGCAATCGCT GTCTGCGCCGCTCCGTGCGACTGCTGCTGATGGGATCAGGATCCACAGTCTCTCGAAGCATAATTTTAATAGCCCTC AACATTAACATCCTGGTGCGATGGGCACAACAACGCATTCTAATTTCGCTTAGCTCACTGCAGTAGGTACAACACAT TACCACAATGTTGTTTAACAGGCCATAATTAAAGGTGCTCCAGCCAAAACTCATCTCAGGGATAATCATACCCGCGT GACCATCGTACCAAATCTTAATGTAAATTAGATGACGCCCCCTCCAGAACACACTGCCCACATACATAATTTCCTTG GGCATATGCATGTTCACAATTTCTCTGTACCATGGACAGCGCTGGTTAATCATACAGCCCCTAATAACCTTCCGGAA CCACATAGCTAGCACTGCTCCCCCAGCAATACATTGAAGAGAACCCGGCTGTTTACAGTGACAATGGAGAACCCACT TCTCTCGCCCATGGATCACTTGAGAATTAAATATATCTATAGTGGCACAACACAAACATAAATGCATGCATCTTTTC ATAACCCTCAACTCTTCGGGGGTTAAAAACATATCCCAGGGAATAGGAAGCTCTTGCAAAACAGTAAAGCTGGCAGA ACAAGGAAGACCACGAACACAACTTACACTATGCATAGTCATAGTATCACAATCTGGCAACAGCGGGTGGTCTTCAG TCATAGAAGCTCGGGTTTCATTTTCCTCACATCGTGGTAACTGGGCTCTGGTGTAAGGGTGATGTCTGGCGCATGAT GTCGAGCGTGCGCGCAACCTTGTCATAATGGAGTTGCTTCCTGACATTCTCGTATTTTGTATAGCAAAATGCGGCCC TGGCACAACACACTTTTCTTCGTCTTCTATCCTGCCGCTTAGTGTGTTCCGTCTGATAATTCAAGTACAGCCACACT CTTAAGTTGGTCAAAAGAATGCTGGCTTCAGTTGTAATCAAAACTCCATCATATTTAATTGTTCTAAGGAAATCATC CACGGTAGCATATGCAAATCCCAACCAAGCAATGCAACTGGATTGCGTTTCAAGCAGCAGAGGAGAGGGAAGAGACG GAAGAATCATGTTAATTTTTATTCCAAACGATCTCGCAGTACTTCAAATTGTAGATCGCGCAGATGGCATCTATCGC CCCCACTGTGTTGGTGAAAAAGCACAGCTAAATCAAAAGAAATGCGATTTTCAAGGTGCTCAACGGTGGCTTCCAAC AAAGCCTCCACGCGCACATCCAAAAACAAAAGAATACCAAAAGAAGGAGCATTTTCTAACTCCTCAAACATCATATT ACATTCCTGCACCATTCCCAGATAATTTTCAGCTTTCCAGCCTTGAATTATTCGTGTCAGTTCTTGTGGTAAATCCA AACCACACATTACAAACAGGTCCCGGAGGGCGCCCTCCACCACCATTCTTAAACACACCCTCATAATGACAAAATAT CTTGCTCCTGTGTCACCTGTAGCAAATTAAGAATGGCATCATCAATTGACATGCCCTTGGCTCTAAGTTCTTCTCTA AGTTCTAGTTGTAAATACTCTCTCATATTATCACCAAACTGCTTAGCCAGAAGCCCCCCGGGAACAATAGCAGGGGA CGCTACAGTGCAGTACAAGCGCAGACCTCCCCAATTGGCTCCAGCAAAAACAAGATTAGAATAAGCATACTGGGAAC CACCAGTAATATCATCAAAGTTGCTGGAAATATAATCAGGCAGAGTTTCTTGTAAAAATTGAATAAAAGAAAAATTT TCCAAAGAAACATTCAAAACCTCTGGGATGCAAATGCAATAGGTTACCGCGCTGCGCTCCAACATTGTTAGTTTTGA ATTAGTCTGTAAAATAAAAGAAACAAGCGTCATATCATAGTAGCCTGTCGAACAGGTGGATAAATCAGTCTTTCCAT CACAAGACAAGCCACAGGGTCTCCAGCTTGACCCTCGTAAAACCTGTCATCGTGATTAAACAACAGCACCGAAAGTT CCTCGCGGTGGCCAGCATGAATAATTCTTGATGAAGCATATAATCCAGACATGTTAGCATCAGTTAAAGAGAAAAAA CAGCCAACATAGCCTCTGGGTATAATTATGCTTAATCTTAAGTATAGCAAAGCCACCCCTCGCGGATACAAAGTAAA AGGCACAGGAGAATAAAAAATATAATTATTTCTCTGCTGCTGTTCAGGCAACGTCGCCCCCGGTCCCTCTAAATACA CATACAAAGCCTCATCAGCCATGGCTTACCAGACAAAGTACAGCGGGCGCACAAAGCACAAGCTCTAAAGAAGCTCT AAAGACACTCTCCAACCTCTCCACAATATATACACAAGCCCTAAACTGACGTAATGGGAGTAAAGTGTAAAAAATCC CGCCAAGCCCAACACACACCCCGAAACTGCGTCAGCAGGGAAAAGTACAGTTTCACTTCCGCAAACCCAACAAGCGT AACTTCCTCTTTCTCACGGTACGTCACATCCGATTAACTTGCAACGTCATTTTCCCACGGCCGCACCGCCCCTTTTA GCCGTTCACCCCGCAGCCAATCACCACACAGCGCGCACTTTTTTAAATTACCTCATTTACATGTTGGCACCATTCCA TCTATAAGGTATATTATTGATAATG

[0618] GenBank Accession No. AAW33461 MAKRARLSSSFNPVYPYEDESSSQHPFINPGFISSNGFAQSPDGVLTLKCVNPLTTASGPLQLKVGSSLTVDTIDGS LEENITAAAPLTKTNHSIGLLIGSGLQTKDDKLCLSLGDGLVTKDDKLCLSLGDGLITKNDVLCAKLGHGLVFDSSN AITIENNTLWTGAKPSANCVIKEGEDSPDCKLTLVLVKNGGLINGYITLMGASEYTNTLFKNNQVTIDVNLAFDNTG QIITYLSSLKSNLNFKDNONMATGTITSAKGFMPSTTAYPFITYATETLNEDYIYGECYYKSTNGTLFPLKVTVTLN RRMLASGMAYAMNFSWSLNAEEAPETTEVTLITSPFFFSYIREDD

[0619] GenBank Accession No. AAW33439 MRRRAVLGGAVVYPEGPPPSYESVMQQQAAMIOPPLEAPFVPPRYLAPTEGRNSIRYSELSPQYDTTKLYLVDNKSA DIASLNYQNDHSNFLTTVVONNDFTPTEASTQTINFDERSRWGGQLKTIMHTNMPNVNEYMFSNKFKARVMVSRKAP EGVTVNDHKDDILKYEWFEFTLPEGNFSATMTIDLMNNAIIDNYLKIGRONGVLESDIGVKFDTRNFRLGWDPETKL IMPGVYTYEAFHPDIVLLPGCGVDFTESRLSNLLGIRKRHPFQEGFKIMYEDLEGGNIPALLDVTAYEESKKDTTTE TGEKAVVKTTTVAVAEETSEDDNITRGDTYITEKQKREAAAAELLLMSEVKKELKIQPLEKDSKNRSYNVLEDKINT AYRSWYLSYNYGNPEKGIRSWTLLTTSDVTCGAEQVYWSLPDMMQDPITFRSSRQVNNYPVVGAELMPVFSKSFYNE QAVYSQQLRQSTSLTHVENREPENQILIRPPAPTITTISENVPALTDHGTLPLRSSIRGVQRVTVTDARRRTCPYVY KALGIVAPRVLSSRTF

[0620] GenBank Accession No. AAW33444 MATPSMMPQWAYMHIAGQDASEYLSPGLVQFARATDTYFSMGNKFRNPTVAPTHDVTTDRSQRLMLRFVPVDREDNT YSYKVRYTLAVGDNRVLDMASTFFDIRGVLDRGPSFKPYSGTAYNSLAPKGAPNTCQWKDSDSKMHTFGVAAMPGVT GKKIEADGLPIGIDSTSGTDTVIYADKTFQPEPQVGNASWVDANGTEEKYGGRALKDTTKMKPCYGSFAKPTNKEGG QANLKDSETAATTPNYDIDLAFFDNKNIAANYDPDIVMYTENVDLQTPDTHIVYKPGTEDTSSESNLGQQAMPNRPN YIGFRDNFIGLMYYNSTGNMGVLAGQASQLNAVVDLQDRNTELSYQLLLDSLGDRTRYFSMWNQAVDSYDPDVRIIE NHGVEDELPNYCFPLNGVGFTDTYQGVKVKTDAVAGTSGTQWDKDDTTVSTANEIHGGNPFAMEINIQANLWRSFLY SNVALYLPDSYKYTPSNVTLPENKNTYDYMNGRVVPPSLVDTYVNIGARWSLDAMDNVNPFNHHRNAGLRYRSMLLG NGRYVPFHIQVPQKFFAVKNLLLLPGSYTYEWNFRKDVNMVLQSSLGNDLRVDGASISFTSINLYATFFPMAHNTAS TLEAMLRNDTNDQSENDYLSAANMLYPIPANATNIPISIPSRNWAAFRGWSFTRLKTKETPSLGSGFDPYFVYSGSI PYLDGTFYLNHTFKKVSIMFDSSVSWPGNDRLLSPNEFEIKRTVDGEGYNVAQCNMTKDWFLVOMLANYNIGYQGFY IPEGYKDRMYSFERNFQPMSRQVVDEVNYTDYKAVTLPYQHNNSGFVGYLAPTMROGEPYPANYPYPLIGTTAVKSV TOKKFLCDRTMWRIPFSSNFMSMGALTDLGONLLYANSAHALDMTFEVDPMDEPTLLYLLFEVFDVVRVHQPHRGVI EAVYLRTPFSAGNATT

[0621] GenBank Accession No. AY601633 (SEQ ID NO: 214) CTATCTATATAATATACCTTATAGATGGAATGGTGCCAATATGCAAATGAGGTAATTTAAAAAAGTGCGCGCTGTGT GGTGATTGGCTGCGGGGTGAACGGCTAAAAGGGGGGGGCAATGCTGGGAGGTGACGTAACTTATGTAGGAGGAGTTA TGTTGCAAGTTATCGCGGTAAAGGTGACGTAAAACGAGGTGTGGTTTGGACACGGAAGTAGACAGTTTTCCCACGCT TACTGACAGGATATGAGGTAGTTTTGGGCGGATGCAAGTGAAAATTCTCCATTTTCGCGCGAAAACTGAATGAGGAA GTGAATTTCTGAGTCATTTCGCGGTTATGACAGGGTGGAGTATTTGCCGAGGGCCGAGTAGACTTTGACCGTTTACG TGGAGGTTTCGATTACCGTGTTTTTCACCTAAATTTCCGCGTACGGTGTCAAAGTCCTGTGTTTTTACGTAGGTGTC AGCTGATCACTAGGGTATTTAAACCTGTCGAGTTCCGTCAAGAGGCCACTCTTGAGTGCCAGCGAGAAGAGTTTTCT CCTCCGCGCTGCGAGTCAGTTTTGCGCTTTGAAAATGAGACACCTGCGATTCCTGCCACAGGAGATTATCTCCAGCG AGACCGGGATCGAAATACTGGAGTTTGTGGTAAATACCCTGATGGGAGATGACCCGGAACCGCCAGTGCAGCCTTTC GATCCACCTACGCTGCACGATCTGTATGATTTAGAGGTAGACGGGCCTGATGATCCCAATGAGGAAGCTGTAAATGG GTTTTTTACTGATTCTATGCTGCTAGCTGCCGATGAAGGATTGGACATAAACCCTCCTCCTGGGACCCTTGATACCC CAGGGGTGGTTGTGGAAAGCGGCAGAGGTGGGAAAAAATTGCCTGATCTGGGAGCAGCTGAAATGGACTTGCGTTGT TATGAAGAGGGTTTTCCTCCGAGTGATGATGAAGATGGGGAAACTGAACAGTCCATCCATACCGCAGTGAATGAGGG AGTAAAAGCTGCCAGCGATGTTTTTAAGTTGGACTGTCCGGAGCTGCCTGGACATGGCTGTAAGTCTTGTGAATTTC ACAGGAATAACACTGGAATGAAAGAACTATTGTGCTCGCTTTGCTATATGAGAATGCACTGCCACTTTATTTACAGT AAGTGTATTTAAGTGAAATTTAAAGGAATAGTGTAGCTGTTTAATAACTGTTGAATGGTAGATTTATGTTTTTACTT GCGATTTTTTGTAGGTCCTGTGTCTGATGATGAGGCGCCTTCTCCTGATTCAACTACCTCACCTCCTGAAATTCAGG CGCCCGTACCTGCAAACGTATGCAAGCCCATTCCTGTGAAGCCTAAGTGTGGGAAACGCCCTGCTGTGGATAAGCTT GAGGACTTGTTGGAGGGTGGGGATGGACCTTTGGACCTTAGTACCCGGAAACTGCCAAGACAATGAGTGCCCTGCAG CTGTGTTTATTTAATGTGACGTCATGTAATAAAATTATGTCAGCTGCTGAGTGTTTTATTGCTTCTTGGGTGGGGAC TTGGATATATAAGTAGGAGCAGATCTGTGTGGTTAGCTCATAGCAACCTGCTGCCATCCATGGAGGTTTGGGCTATC TTGGAAGACCTGAGACAGACTAGGCTACTGCTAGAAAACGCCTCGGACGGAGTCTCTGGCTTTTGGAGATTCTGGTT CGGTGGTGATCTAGCTAGGCTAGTGTTTAGGATAAAACAGGACTACAGGGAAGAATTTGAAAAGTTATTGGACGACA GTCCAGGACTTTTTGAAGCTCTTAACTTGGGCCACCAGGCTCATTTTAAGGAGAAGGTTTTATCAGTTTTAGATTTT TCTACTCCTGGTAGAACTGCTGCTGCTGTAGCTTTTCTTACTTTTATATTGGATAAATGGATCCGCCAAACCCACTT CAGCAAGGGATACGTTTTGGATTTCATAGCAGCAGCTTTGTGGAGAACATGGAAGGCTCGCAGGATGAGGACAATCT TAGATTACTGGCCAGTGCAGCCTCTGGGAGTAGCAGGGATACTGAGACACCCACCGGCCATGCCAGCGGTTCTGGAG GAGGAGCAGCAGGAGGACAATCCGAGAGCCGGCCTGGACCCTCCGGTGGAGGAGTAGCTGACCTGTTTCCTGAACTG CGACGGGTGCTTACTAGGTCTACGTCCAGTGGACAGGACAGGGGCATTAAGAGGGAGAGGAATCCTAGTGGGAATAA TTCAAGAACCGAGTTGGCTTTAAGTTTAATGAGCCGTAGGCGTCCTGAAACTGTTTGGTGGCATGAGGTTCAGAGCG AAGGCAGGGATGAAGTTTCAATATTGCAGGAGAAATATTCACTAGAACAACTTAAGACCTGTTGGTTGGAACCTGAG GATGATTGGGAGGTGGCCATTAGGAATTATGCTAAGATATCTCTGAGGCCTGATAAACAGTATAGAATTACTAAGAA GATTAATATTAGAAATGCATGCTACATATCAGGGAATGGGGCAGAGGTTATAATAGATACCCAAGATAAAGCAGCTT TTAGATGTTGTATGATGGGTATGTGGCCAGGGGTTGTCGGCATGGAAGCAGTAACATTTATGAATATTAGGTTTAAA GGGGATGGGTATAATGGCATTGTATTTATGGCTAACACTAAGCTGATTCTACATGGTTGTAGCTTTTTTGGGTTTAA TAATACTTGTGTAGAAGCTTGGGGGCAAGTTGGTGTGAGGGGTTGTAGTTTTTATGCATGCTGGATTGCAACATCAG GTAGGGTCAAGAGTCAGTTGTCTGTGAAGAAATGCATGTTTGAGAGATGTAATCTTGGCATACTGAATGAAGGTGAA GCAAGGGTCCGCCACTGCGCAGCTACAGAAACTGGCTGCTTCATTCTAATAAAGGGAAATGCCAGTGTGAAGCATAA TATGATCTGTGGACATTCGAATGAGAGGCCTTATCAGATGCTGACCTGCGCTGGTGGACATTGCAATATTCTTGCTA CCGTGCATATCGTTTCCCATGCACGCAAGAAATGGCCTGTATTTGAACATAATGTGATTACCAAGTGCACCATGCAC ATAGGTGGTCGCAGGGGAATGTTTATGCCTTACCAGTGTAACATGAATCATGTGAAGGTGATGTTGGAACCAGATGC CTTTTCCAGAGTGAGCTTAACAGGAATCTTTGATATGAATATTCAACTATGGAAGATCCTGAGATATGATGACACTA AACCGAGGGTGCGCGCATGCGAATGCGGAGGCAAGCATGCTAGATTCCAGCCGGTGTGCGTGGATGTGACTGAAGAC CTGAGACCCGATCATTTGGTGCTTGCCTGCACTGGAGCGGAGTTCGGTTCTAGTGGTGAAGAAACTGACTAAAGTGA GTAGTGGGGCAATATGTGGATGGGGACTTTCAGGTTGGTAAGGTGGACAGATTGGGTAAATTTTGTTAATTTCTGTC TTGCAGCTGCCATGAGTGGAAGCGCTTCTTTTGAGGGGGGAGTATTTAGCCCTTATCTGACGGGCAGGCTCCCATCA TGGGCAGGAGTTCGTCAGAATGTCATGGGATCCACTGTGGATGGGAGACCCGTCCAGCCCGCCAATTCCTCAACGCT GACCTATGCCACTTTGAGTTCGTCATCATTGGATGCAGCTGCAGCCGCCGCCGCTACTGCTGCCGCCAACACCATCC TTGGAATGGGCTATTACGGAAGCATCGTTGCCAATTCCAGTTCCTCTAATAACCCTTCAACCCTGGCTGAGGACAAG CTGCTTGTTCTCTTGGCTCAGCTCGAGGCCTTAACCCAACGCTTAGGCGAACTGTCTAAGCAGGTGGCCCAGTTGCG TGAGCAAACTGAGTCTGCTGTTGCCACAGCAAAGTCTAAATAAAGATCTCAAATCAATAAATAAAGAAATACTTGTT ATAAAAACAAATGAATGTTTATTTGATTTTTCGCGCGCGGTATGCCCTGGACCATCGGTCTCGATCATTGAGAACTC GGTGGATCTTTTCCAGTACCCTGTAAAGGTGGGATTGAATGTTTAGATACATGGGCATTAGTCCGTCTCGGGGGTGG AGATAGCTCCATTGAAGAGCCTCTTGCTCCGGGGTAGTGTTATAAATCACCCAGTCATAGCAAGGTCGGAGTGCATG GTGTTGCACAATATCTTTTAGGAGCAGACTAATTGCAACGGGGAGGCCCTTAGTGTAGGTGTTTACAAATCTGTTGA GCTGGGACGGGTGCATCCTGGGTGAAATTATATGCATTTTGGACTGGATCTTGAGGTTGGCAATGTTGCCGCCTAGA TCCCGTCTCGGATTCATATTGTGCAGAACCACCAAGACAGTGTATCCGGTGCACTTGGGAAATTTATCATGCAGCTT AGAGGGAAAAGCATGAAAAAATTTGGAGACGCCTTTGTGACCCCCCAGATTCTCCATGCACTCATCCATAATGATAG CGATGGGGCCGTGGGCAGCGGCACGGGCGAACACGTTCCGGGGGTCTGAAACATCATAGTTATGCTCCTGAGTCAGG TCATCATAAGCCATTTTAATAAACTTTGGGCGGAGGGTGCCAGATTGGGGGATGAAAGTTCCCTCTGGCCCGGGAGC ATAGTTTCCCTCACATATTTGCATTTCCCAGGCTTTCAGTTCCGAGGGGGGGATCATGTCCACCTGCGGGGCTATAA AAAATACCGTTTCTGGAGCCGGGGTGATTAACTGGGATGAGAGCAAATTCCTAAGCAGCTGAGACTTGCCGCACCCA GTGGGACCGTAAATGACCCCAATTACGGGTTGCAGATGGTAGTTTAGGGAGCGACAGCTGCCGTCCTCCCGGAGCAG GGGGGCCACTTCGTTCATCATTTCCCTTACATGGATATTTTCCCGCACCAAGTCCGTTAGGAGGCGCTCTCCCCCAA GGGATAGAAGCTCCTGGAGCGAGGAGAAGTTTTTCAGCGGCTTCAGCCCGTCAGCCATGGGCATTTTGGAAAGAGTC TGTTGCAAGAGCTCGAGCCGGTCCCAGAGCTCGGTGATGTGCTCTATGGCATCTCGATCCAACAGACCTCCTCGTTT CGCGGGTTGGGACGGCTCCTGGAGTAGGGAATCAGACGATGGGCGTCCAGCGCTGCTAGGGTCCGATCCTTCCATGG TCGCAGCGTCCGAGTCAGGGTTGTTTCCGTCACGGTGAAGGGGTGCGCGCCTGGTTGGGCGCTTGCGAGGGTGCGCT TCAGACTCATCCTGCTGGTCGAGAACCGCTGCCGATCGGCGCCCTGCAGGTCGGCCAGGTAGCAGTTTACCATGAGT TCGTAGTTGAGCGCCTCGGCCGCGTGGCCTTTGGCACGGAGCTTACCTTTGGAAGTTTTATGGCAGGCGGGGCAGTA GATACATTTGAGGGCATACAGCTTGGGCGCGAGGAAAATGGATTCGGGGGAGTATGCATCCGCACCGCAGGAGGCGC AGACGGTTTCGCACTCCACGAGCCAGGTCAGATCCGGCTCATCGGGGTCAAAAACAAGTTTTCCGCCATGTTTTTTG ATGCGTTTCTTACCTTTGGTTTCCATGAGTTCGTGTCCCCGCTGGGTGACAAAGAGGCTGTCCGTGTCCCCGTAGAC CGACTTTATGGGCCTGTCCTCGAGCGGAGTGCCTCGGTCCTCTTCGTAGAGGAACCCAGCCCACTCTGATACAAAAG CGCGTGTCCAGGCCAGCACAAAGGAGGCCACGTGGGAGGGGTAGCGGTCGTTGTCAACCAGTGGGTCCACCTTCTCT ACGGTATGTAAACACATGTCCCCCTCCTCCACATCCAAGAATGTGATTGGCTTGTAAGTGTAGGCCACGTGACCAGG GGTCCCCGCCGGGGGGGTATAAAAGGGGGCGGGCCTCTGTTCGTCCTCACTGTCTTCAGGATCGCTGTCCAGGAGCG CCAGCTGTTGGGGTAGGTATTCCCTCTCGAAGGCGGGCATGACCTCTGCACTCAGGTTGTCAGTTTCTAGGAACGAG GAGGATTTGATATTGACAGTACCAGCAGAGACGCCTTTCATAAGACTCTCGTCCATCTGGTCAGAAAACACAATCTT CTTGTTGTCCAGCTTGGTGGCAAATGATCCATAAAGGGCATTGGACAGAAGCTTGGCGATGGAGCGCATGGTTTGGT TCTTTTCCTTGTCCGCGCGCTCCTTGGCGGCGATGTTAAGCTGGACGTACTCGCGCGCCACACATTTCCATTCAGGG AAGATGGTTGTCAGTTCATCCGGAACTATTCTGACTCGCCATCCCCTATTGTGCAGGGTTATCAGATCCACACTGGT GGCCACCTCGCCTCGGAGGGGCTCATTGGTCCAGCAGAGTCGACCTCCTTTTCTTGAACAGAAAGGTGGGAGGGGGT CTAGCATGAACTCATCAGGGGGGTCCGCATCTATGGTAAATATTCCCGGTAGCAAATCTTTGTCAAAATAGCTGATG GTGGCGGGATCATCCAAGGTCATCTGCCATTCTCGAACTGCCAGCGCGCGCTCATAGGGGTTAAGAGGGGTGCCCCA GGGCATGGGGTGGGTGAGCGCGGAGGCATACATGCCACAGATATCGTAGACATAGAGGGGCTCTTCGAGGATGCCGA TGTAAGTGGGATAACAGCGCCCCCCTCTGATGCTTGCTCGCACATAGTCATAGAGTTCATGTGAGGGGGCGAGAAGA CCCGGGCCCAGATTGGTGCGGTTGGGTTTTTCCGCCCTGTAAACGATCTGGCGAAAGATGGCATGGGAATTGGAAGA GATAGTAGGTCTCTGGAATATGTTAAAATGGGCATGAGGTAGGCCTACAGAGTCCCTTATGAAGTGGGCATATGACT CTTGCAGCTTGGCTACCAGCTCGGCGGTGACGAGTACATCCAGGGCACAGTAGTCGAGAGTTTCCTGGATGATGTCA TAACGCGGTTGGCTTTTCTTTTCCCACAGCTCGCGGTTGAGAAGGTATTCTTCGCGATCCTTCCAGTACTCTTCGAG GGGAAACCCGTCTTTTTCTGCACGGTAAGAGCCCAACATGTAGAACTGATTGACTGCCTTGTAGGGACAGCATCCCT TCTCCACTGGAAGAGAGTATGCTTGGGCTGCATTGCGCAGCGAGGTATGAGTGAGGGCAAAAGTGTCCCTGACCATG ACTTTGAGGAATTGATACTTGAAGTCAATGTCATCACAGGCCCCCTGTTCCCAGAGTTGGAAGTCCACCCGCTTCTT GTAGGCGGGGTTGGGCAAAGCGAAAGTAACATCATTGAAGAGGATCTTGCCGGCCCTGGGCATGAAATTTCGGGTGA TTTTGAAAGGCTGAGGGACCTCTGCTCGGTTATTGATAACCTGAGCGGCCAAGACGATCTCATCAAAGCCATTGATG TTGTGCCCCACTATGTACAGTTCTAAGAATCGAGGGGTGCCCCTGACATGAGGCAGCTTCTTGAGTTCTTCAAAAGT GAGATCTGTAGGGTCAGTGAGAGCATAGTGTTCGAGGGCCCATTCGTGCACGTGAGGGTTCGCTTTGAGGAAGGAGG ACCAGAGGTCCACTGCCAGTGCTGTTTGTAACTGGTCCCGGTACTGACGAAAATGCTGCCCGACTGCCATCTTTTCT GGGGTGACGCAATAGAAGGTTTGGGGGTCCTGCCGCCAGCGATCCCACTTGAGTTTCATGGCGAGGTCATAGGCGAT GTTGACGAGCCGCTGGTCTCCAGAGAGTTTCATGACCAGCATGAAGGGGATTAGCTGCTTGCCAAAGGACCCCATCC AGGTGTAGGTTTCCACATCGTAGGTGAGGAAGAGCCTTTCTGTGCGAGGATGAGAGCCAATCGGGAAGAACTGGATC TCCTGCCACCAGTTGGAGGAATGGCTGTTGATGTGATGGAAGTAGAACTCCCTGCGACGCGCCGAGCATTCATGCTT GTGCTTGTACAGACGGCCGCAGTACTCGCAGCGATTCACGGGATGCACCTCATGAATGAGTTGTACCTGACTTCCTT TGACGAGAAATTTCAGTGGAAAATTGAGGCCTGGCGTTTGTACCTCGCGCTCTACTATGTTGTCTGCATCGGCATGA CCATCTTCTGTCTCGATGGTGGTCATGCTGACGAGCCCTCGCGGGAGGCAAGTCCAGACCTCGGCGCGGCAGGGGCG GAGCTCGAGGACGAGAGCGCGCAGGCCGGAGCTGTCCAGGGTCCTGAGACGCTGCGGAGTCAGGTTAGTAGGCAGTG TCAGGAGATTGACTTGCATGATCTTTTCGAGGGCGTGAGGGAGGTTCAGATGGTACTTGATCTCCACGGGTCCGTTG GTGGAGATGTCGATGGCTTGCAGGGTTCCGTGCCCCTTGGGTGCTACCACCGTGCCCTTGTTTTTCCTTTTGGGCGG CGGTGGCTCTGTTGCTTCTTGCATGTTTAGAAGCGGTGTCGAGGGCGCGCACCGGGCGGCAGGGGCGGTTCGGGACC CGGCGGCATGGCTGGCAGTGGTACGTCGGCGCCGCGCGCGGGTAGGTTCTGGTACTGTGCTCTGAGAAGACTCGCAT GCGCGACGACGCGGCGGTTGACATCCTGGATCTGACGCCTCTGGGTGAAAGCTACCGGCCCCGTGAGCTTGAACCTG AAAGAGAGTTCAACAGAATCAATCTCGGTATCGTTGACGGCGGCTTGCCTAAGGATTTCTTGCACGTCGCCAGAGTT GTCCTGGTAGGCGATCTCGGCCATGAACTGCTCGATCTCTTCCTCTTGAAGATCTCCGCGGCCCGCTCTCTCGACGG TGGCCGCCAGGTCGTTGGAGATGCGCCCAATGAGTTGAGAGAATGCATTCATGCCCGCCTCGTTCCAGACGCGGCTG TAGACCACAGCCCCCACGGGATCTCTCGCGCGCATGACCACCTGGGCGAGGTTGAGCTCCACGTGGCGGGTGAAGAC CGCATAGTTGCATAGACGCTGGAAAAGGTAGTTGAGTGTGGTGGCGATGTGCTCGGTGACGAAGAAATACATGATCC ATCGTCTCAGCGGCATCTCGCTGACATCGCCCAGCGCTTCCAAGCGCTCCATGGCCTCGTAGAAGTCCACGGCAAAG TTGAAAAACTGGGAGTTACGCGCGGACACGGTCAACTCCTCTTCCAGAAGACGGATGAGTTCGGCGACGGTGGTGCG CACCTCGCGCTCGAAAGCCCCTGGGATTTCTTCCTCAATCTCTTCTTCTTCCACTAACATCTCTTCCTCTTCAGGTG GGGCTGCAGGAGGAGGGGGAACGCGGCGACGCCGGCGGCGCACGGGCAGACGGTCGATGAATCTTTCAATGACCTCT CCGCGGCGGCGGCGCATGGTCTCGGTGACGGCACGACCGTTCTCCCTGGGTCTCAGAGTGAAGACGCCTCCGCGCAT CTCCCTGAAGTGGTGACTGGGAGGCTCTCCGTTGGGCAGGGACACCGCGCTGATTATGCATTTTATCAATTGCCCCG TAGGTACTCCGCGCAAGGACCTGATCGTCTCAAGATCCACGGGATCTGAAAACCTTTCGACGAAAGCGTCTAACCAG TCGCAATCGCAAGGTAGGCTGAGCACTGTTTCTTGCGGGGGGGGCGGCTAGACGCTCGGTCGGGGTTCTCTCTTTC TTCTCCTTCCTCCTCTTTGGAGGGTGAGACGATGCTGCTGGTGATGAAATTAAAATAGGCAGTTTTGAGACGGCGGA TGGTGGCGAGGAGCACCAGGTCTTTGGGTCCGGCTTGTTGGATGCGCAGGCGATGGGCCATTCCCCAAGCATTATCC TGACATCTGGCCAGATCTTTATAGTAGTCTTGCATGAGTCGTTCCACGGGCACTTCTTCTTCGCCCGCTCTGCCATG CATGCGAGTGATCCCGAACCCGCGCATGGGCTGGACAAGTGCCAGGTCCGCTACAACCCTTTCTGCGAGGATGGCTT GCTGCACCTGGGTGAGGGTGGCTTGGAAGTCGTCAAAGTCCACGAAGCGGTGGTAAGCCCCGGTGTTGATTGTGTAG GAGCAGTTGGCCATGACTGACCAGTTGACTGTCTGGTGCCCCGGACGCACAATCTCGGTGTACTTGAGGCGCGAGTA GGCGCGGGTGTCAAAGATGTAATCGTTACAGGTGCGCACCAGGTACTGGTAGCCGATAAGAAAGTGCGGCGGCGGCT GGCGGTATAGGGGCCATCGCTCTGTAGCCGGGGCGCCAGGGGCGAGGTCTTCCAGCATGAGGCGGTGATAACCGTAG ATGTACCTGGACATCCAGGTGATACCGGAGGCGGTGGTGGATGCCCGCGGGAACTCGCGTACGCGGTTCCAGATGTT GCGCAGCGGCATGAAGTAGTTCATGGTAGGCACGGTTTGGCCCGTGAGACGTGCACAGTCGTTGATGCTCTAGACAT ACGGGCAAAAACGAAAGCGGTCAGCGGCTCGTCTCCGTGGCCTGGAGGCTAAGCGAACGGGTTGGGCTGCGCGTGTA CCCCGGTTCGAATCTCGGATCAGGCTGGAGCCGCAGCTAACGTGGTACTGGCACTCCCGTCTCGACCCAGGCCTGCA CAAAACCTCCAGGATACGGAGGCGGGTCGTTTTTTTTTTTTTTTGCTTTTTCCTGGATGGGAGCCAGTGCTGCGTCA AGCTTTAGAACACTCAGTTCTCGGGGCTGGGAGTGGCTCGCGCCCGTAGTCTGGAGAATCAATCGCCAGGGTTGCGT TGCGGTGTGCCCCGGTTCGAGTCTTAGCGCGCCGGATCGGCCGGTTTCCGCGACAAGCGAGGGTTTGGCAGCCCCGT CATTTCTAAGACCCCGCCAGCCGACTTCTCCAGTTTACGGGAGCGAGCCCTCTTTTTTTGTTTTTTTGTTGCCCAGA TGCATCCCGTGCTGCGACAGATGCGCCCCCAGCAACAGCCCCCTTCTCAGCAGCAGCTACAACAACAGCCACAAAAG GCTCTTCCTGCTCCTGTAACTACTGCGGCTGCAGCCGTCAGCGGCGCGGGGCAGCCCGCCTATGATCTGGACTTGGA AGAGGGCGAGGGACTGGCGCGCCTGGGCGCACCATCGCCCGAGCGGCACCCGCGGGTGCAACTGAAAAAGGACTCTC GCGAGGCGTACGTGCCCCAGCAGAACCTGTTCAGGGACAGGAGCGGCGAGGAGCCTGAGGAAATGCGAGCTTCCCGC TTTAACGCGGGTCGCGAACTGCGTCACGGTCTGGACCGAAGACGGGTGCTGCGTGATGATGATTTTGAAGTCGATGA AGTGACAGGAATAAGTCCTGCTAGGGCACATGTGGCCGCGGCCAACCTAGTATCAGCTTACGAGCAGACCGTGAAGG AGGAGCGCAACTTTCAAAAATCTTTCAACAACCATGTGCGCACCCTGATTGCCCGCGAGGAAGTGACACTGGGACTG ATGCACCTGTGGGACCTGATGGAAGCCATTACCCAGAACCCCACCAGCAAACCTCTAACCGCTCAGCTGTTTCTGGT GGTGCAACATAGTAGAGACAATGAGGCATTTAGGGAGGCGCTGTTGAACATTACTGAGCCCGAGGGGAGATGGTTGT ATGATCTTATCAATATTCTGCAAAGTATAATAGTGCAAGAACGTAGCCTGGGTCTAGCTGAGAAGGTGGCTGCTATT AACTACTCGGTCTTGAGCCTGGGCAAGCACTACGCTCGCAAGATCTACAAAACCCCATACGTACCTATAGACAAGGA GGTGAAGATAGATGGGTTTTATATGCGCATGACTCTCAAGGTGCTGACCTTGAGTGACGATCTGGGAGTGTACCGCA ACGACAGGATGCACCGCGCAGTGAGCGCCAGCAGAAGGCGTGAGCTGAGCGACAGAGAACTTATGCACAGCTTGCAA AGAGCTCTGACTGGGGCTGGAACCGAGGGGGAGAACTACTTTGACATGGGAGCGGACTTGCAATGGCAGCCCAGTCG CAGGGCCCTGGACGCAGCAGGGTATGAGCTTCCTTACATAGAAGAGGTGGATGAAGGCCAGGATGAGGAGGGCGAGT ACCTGGAAGACTGATGGCGCGACCATCCATATTTTTGCTAGATGGAACAGCAGGCACCGGACCCCGCAAAACGGGCG GCGCTACAGAGCCAGCCGTCCGGCATTAACTCCTCGGACGATTGGAGCCAGGCCATGCAACGCATCATGGCGCTGAC GACCCGCAACCCCGAAGCCTTTAGGCAGCAACCCCAGGCCAACCGCCTTTCTGCTATCCTGGAGGCCGTAGTGCCCT CCCGCTCCAACCCCACACACGAGAAGGTCCTGGCCATCGTGAACGCGCTGGTGGAGAACAAAGCCATACGTCCCGAT GAGGCTGGGCTGGTATACAATGCCCTATTGGAGCGCGTAGCCCGCTACAACAGCAGCAACGTGCAGACCAACCTGGA CCGGATGGTGACCGATGTGCGCGAGGCCGTGTCTCAGCGCGAGCGGTTCCAGCGAGACGCCAATTTAGGGTCGCTGG TGGCTTTGAACGCCTTCCTCAGCACTCAGCCTGCCAACGTGCCTCGCGGTCAGCAAGACTACACAAACTTTCTAAGT GCATTGAGACTCATGGTGGCCGAAGTCCCTCAAAGCGAAGTGTACCAGTCCGGGCCAGACTACTTTTTCCAGACCAG CAGACAGGGCTTGCAGACAGTGAACCTGAGCCAGGCTTTTAAGAACCTGAATGGTCTGTGGGGAGTGCGCGCCCCAG TGGGAGATCGGGCGACCGTGTCTAGCTTGCTGACCCCCAACTCCCGCCTACTACTGCTCTTGGTAGCCCCATTCACT GACAGCGGTAGCATCGACCGTAATTCGTACTTGGGCTATCTGTTGAACCTGTATCGCGAGGCCATAGGGCAAACTCA GGTAGATGAGCAAACCTATCAAGAAATTACCCAAGTGAGCCGCGCTCTGGGTCGGGAGGACACTGGCAGCTTGGAAG CCACCTTAAACTTCTTGCTGACCAACCGGTCGCAGAAGATCCCTCCTCAGTATGCGCTTACCGCGGAGGAGGAACGG ATCCTGAGATACGTGCAGCAGAGCGTGGGACTGTTCCTAATGCAGGAGGGGGCGACTCCTACTGCTGCGCTCGATAT GACAGCCCGAAACATGGAGCCCAGCATGTATGCCAGTAACCGGCCTTTTATCAATAAACTGCTAGACTACTTACACA GGGCGGCTGCTATGAACTCTGATTATTTCACCAATGCTATCCTGAACCCCCATTGGCTGCCCCCACCTGGGTTCTAT ACGGGCGAGTATGACATTGCCCGACCCAATGACGGGTTTTTATGGGACGATGTGGACAGTAGTGTTTTCTCCCCGCC TCCTGGTTATAACACTTGGAAGAAGGAAGGTGGCGATAGAAGGCACTCTTCCGTGTCACTGTCCGGGGCAACGGGTG CTGCCGCAGCGGCTCCCGAGGCCGCAAGTCCTTTCCCTAGTTTGCCATTTTCGCTAAACAGTGTACGCAGCAGTGAG CTGGGAAGAATAACCCGTCCTCGCTTGATCGGCGAGGAGGAGTATTTGAACGACTCCCTGTTGAGACCCGAGAGGGA GAAGAATTTCCCCAACAACGGGATAGAAAGCTTGGTTGACAAAATGAACCGCTGGAAGACGTACGCGCACGATCCCC GGGCGCTGGGGGATAGCCGGGGCAGCGCTACCCGTAAACGCCAGTGGCACGACAGGCAGCGGGGCCTGGTGTGGGCC GATGATGATTCCGCCGACGACAGCAGCGTGTTGGACTTGGGTGGGAGTGGTGGTAACCCGTTCGCTCACCTGCGCCC CCGCGTCGGGCGCCTGATGTAAGAAACCGAAAATAAATACTCACCAAGGCCATGGCGACCAGCGTGCGTTCGTTTCT TCTCTGTTATATCTAGTATGATGAGGCGAACCGTGCTAGGCGGAGCGGTGGTGTATCCGGAGGGTCCTCCTCCTTCG TACGAGAGCGTGATGCAGCAGGCGGCGGCGGCGACGATGCAGCCACCACTGGAGGCTCCCTTTGTACCCCCTCGGTA CCTGGCACCTACGGAGGGGAGAAACAGCATTCGTTACTCGGAGCTGGCACCATTGTATGATACCACCCGGTTGTATT TGGTGGACAACAAGTCCGCGGACATCGCCTCACTGAACTATCAGAACGACCACAGCAACTTCCTCACCACGGTGGTG CAAAACAATGACTTTACCCCCACGGAGGCCAGCACCCAGACCATCAACTTTGACGAGCGGTCGCGATGGGGCGGTCA GCTGAAGACTATCATGCACACCAACATGCCCAACGTGAACGAGTACATGTTTAGCAACAAGTTCAAAGCTCGGGTGA TGGTGTCTAGAAAGGCTCCTGAAGGTGTCACAGTAGATGACAATTATGATCACAAGCAGGATATTTTGGAATATGAG TGGTTTGAGTTTACTCTACCGGAAGGGAATTTCTCAGCCACAATGACCATTGACCTAATGAACAATGCCATCATTGA TAATTACCTTGAAGTGGGCAGACAGAATGGAGTGTTAGAGAGTGACATTGGTGTTAAATTTGACACCAGGAACTTTA GACTGGGTTGGGATCCGGAAACTAAGTTGATTATGCCTGGGGTTTACACCTATGAGGCATTCCATCCTGACATTGTA TTGTTGCCTGGTTGCGGAGTTGACTTTACTGAAAGTCGCCTTAGTAACTTGCTTGGTATCAGGAAAAGACACCCATT CCAGGAGGGTTTTAAGATCTTGTATGAGGATCTTGAAGGGGGTAATATCCCGGCCCTGTTGGATGTAGAAGCCTATG AGAACAGTAAGAAAGAACAAGAAGCCAAAACAGAAGCCGCTAAAGCTGCTGCTATTGCTAAAGCCAACATAGTTGTC AGCGACCCTGTAAGGGTGGCTAATGCAGAAGAAGTCAGAGGAGACAACTATACAGCTTCATCTGTTGCAACTGACGA ATCGCTATTGGCTGCTGTGGCCGAAACTACAGAGACAAAACTCACTATTAAACCTGTAGAAAAAGACAGCAAGAGTA GAAGTTACAATGTCTTGGAAGATAAAGTGAATACAGCCTACCGCAGCTGGTACCTGTCCTACAACTATGGTGACCCT GAAAAAGGAGTCCGTTCCTGGACACTGCTCACCACCTCGGATGTCACCTGTGGAGCAGAGCAGGTGTACTGGTCGCT CCCAGACATGATGCAGGACCCTGTCACATTCCGTTCCACGAGACAAGTCAGCAACTATCCAGTGGTAGGTGCAGAGC TCATGCCGGTCTTCTCAAAGAGTTTCTACAACGAGCAAGCCGTGTACTCCCAGCAGCTTCGCCAGTCCACCTCGCTC ACGCACGTCTTCAACCGCTTCCCTGAGAACCAGATCCTCATCCGCCCGCCAGCGCCCACCATTACCACCGTCAGTGA AAACGTTCCTGCTCTCACAGATCACGGGACCCTGCCGTTGCGCAGCAGTATCCGGGGAGTCCAGCGCGTGACCGTTA CTGACGCCAGACGCCGCACCTGCCCCTACGTCTACAAGGCCCTGGGCATAGTCGCGCCGCGCGTCCTTTCAAGCCGC ACTTTCTAAAAAAAAAAATGTCCATTCTTATCTCACCTAGTAATAACACCGGTTGGGGCCTGCGCGCGCCAAGCAAG ATGTACGGAGGTGCTCGCAAACGCTCTACACAGCACCCTGTGCGCGTGCGCGGGCACTTCCGCGCTCCATGGGGCGC CCTCAAGGGTCGTGCCCGCACTAGAACCACCGTCGATGATGTGATCGACCAGGTGGTGGCCGATGCTCGTAATTATA CTCCTACTGCACCTACATCTACTGTGGATGCAGTTATTGACAGCGTAGTGGCTGACGCCCGCGCCTATGCTCGCCGG AAGAGCAGGCGGAGACGCATCGCCAGGCGCCACCGGGCTACTCCCGCTATGCGAGCGGCAAGAGCTCTGCTACGGAG GGCCAAACGCGTGGGGCGAAGAGCTATGCTTAGAGCGGCCAGACGCGCGGCTTCAGGTGCCAGTGCCGGCAGGTCCC GCAGGCGCGCAGCCACGGCGGCAGCAGCGGCCATTGCCAACATGGCCCAACCGCGAAGAGGCAATGTGTACTGGGTG CGCGACGCCACCACCGGCCAGCGCGTGCCCGTGCGCACCCGCCCCCCTCGCTCTTAGAAGATACTGAGCAGTCTCCG ATGTTGTGTCCCAGCGAGGATGTCCAAGCGCAAATACAAGGAAGAGATGCTCCAGGTCATCGCGCCTGAAATCTACG GTCCGCCGGTGAAGGATGAAAAAAAGCCCCGCAAAATCAAGCGGGTCAAAAAGGACAAAAAGGAAGAAGATGGCAAT GATGGTCTGGCGGAGTTTGTACGCGAGTTCGCCCCAAGGCGGCGTGTGCAGTGGCGTGGACGCAAAGTGCGGCCTGT GCTGAGACCTGGAACCACGGTGGTCTTTACGCCCGGCGAGCGCTCCAGCACTGCTTTTAAGCGGTCCTATGATGAGG TGTATGGGGATGATGATATTCTGGAGCAGGCGGCCGACCGCCTGGGCGAGTTTGCTTATGGCAAGCGCTCCCGCTCG AGCCCCAAGGAGGAGGCGGTGTCCATTCCCTTGGACAATGGGAATCCCACCCCTAGTCTCAAGCCAGTCACCCTGCA GCAAGTGCTGCCCGTGCCTCCACGCAGAGGCAACAAGCGAGAGGGTGAGGATCTGTATCCCACTATGCAATTGATGG TGCCCAAGCGCCAGCGGCTGGAGGACGTGCTGGAGAAAATGAAAGTGGATCCCGATATACAACCTGAGGTCAAAGTG AGACCCATCAAGCAGGTGGCGCCAGGTTTGGGAGTACAAACCGTAGACATCAAGATTCCCACCGAGTCCATGGAAGT CCAAACCGAACCTGCAAAGCCCACAACCACCTCCATTGAGGTGCAAACGGATCCCTGGATGACCGCACCCGTTACAA CTCCAGCTGCTGTCAACACCACTCGAAGATCCCGGCGAAAGTACGGTCCAGCAAGTTTGCTGATGCCAAATTATGCT CTGCACCCATCCATTATTCCAACTCCGGGTTACCGAGGCACTCGCTACTACCGCAGCAGGAGCAGCACTTCCCGCCG TCGCCGCAAAACACCTGCAAGTCGTAGTCACCGTCGTCGCCGCCGCCCCACCAGCAATCTGACTCCCGCTGCTCTGG TGCGGAGAGTGTATCGCGATGGCCGCGCGGATCCCCTGACGTTGCCGCGCGTACGCTACCATCCAAGCATCACAACT TAACAACTGTTGCCGCTGCCTCCTTGCAGATATGGCCCTCACTTGCCGCCTTCGTGTCCCCATTACTGGCTACCGAG GAAGAAACTCGCGCCGTAGAAGAGGGATGTTGGGGCGCGGAATGCGACGCCACAGGCGGCGGCGCGCTATCAGCAAG AGGCTGGGGGGTGGCTTTCTGCCTGCTCTGATCCCCATCATAGCCGCGGCGATCGGGGCGATACCAGGCATAGCTTC CGTGGCGGTTCAGGCCTCGCAGCGCCACTGACATTGGAAAAACTTATAAATAAAACAGAATGGACTCTGATGCTCCT GGTCCTGTGACTATGTTTTTGTAGAGATGGAAGACATCAATTTTTCATCCCTGGCTCCGCGACACGGCACGAGGCCG TACATGGGCACCTGGAGCGACATCGGCACCAGCCAACTGAACGGGGGCGCCTTCAATTGGAGCAGTATCTGGAGCGG GCTTAAAAATTTTGGCTCTACCATAAAAACCTATGGGAACAAAGCTTGGAACAGCAGCACAGGGCAGGCATTGAGAA ATAAGCTTAAAGAGCAAAACTTCCAACAGAAGGTGGTTGATGGAATCGCCTCTGGTATCAATGGGGTGGTGGATCTG GCCAACCAGGCCGTGCAGAAACAGATAAACAGCCGCATTGACCCGCCGCCGTCAGCCCCGGGTGAAATGGAAGTGGA GGAAGATCTCCCTCCCCTTGAAAAGCGGGGCGACAAGCGTCCGCGCCCCGATCTGGAGGAGACACTAGTCACACGCT CAGACGACCCGCCCTCCTACGAGGAGGCAGTGAAGCTTGGAATGCCCACCACCAGACCTGTAGCCCCCATGGCTACC GGGGTAATGAAACCTTCTCAGTCACACCGACCCGCTACCTTGGACTTGCCTCCCCCTGCTGTTGCAGCGCCTGCTCG CAAGCCTGTCGCTACCCCGAAGCCCACCACCGTACAGCCCGTCGCCGTAGCCAGACCGCGTCCTGGGGGCACTCCAC GTCCGAATGCAAACTGGCAGAGTACTCTGAACAGCATCGTGGGTCTGGGCGTGCAAAGTGTAAAGCGCCGTCGCTGC TTTTAAATTAATATGGAGTAGCGCTTAACTTGCCTGTCTGTGTGTATGTGTCATCATCACGCCGCCGCCGCAGCAAC AGCAGAGGAGCAAGGAAGAGGTCGCGCGCCGAGGCTGAGTTGATTTCAAGATGGCCACCCCATCGATGCTGCCCCAG TGGGCATACATGCACATCGCCGGACAGGATGCTTCGGAGTACCTGAGTCCGGGTCTGGTGCAGTTCGCCCGCGCCAC AGACACCTACTTCAATCTGGGGAACAAGTTTAGGAACCCCACCGTGGCGCCCACCCATGATGTGACCACCGACCGCA GTCAGCGGCTGATGCTGCGCTTTGTGCCCGTTGACCGGGAAGACAATACCTACGCATACAAAGTTCGATACACCTTG GCTGTGGGCGACAACAGAGTGCTGGATATGGCCAGCACTTTCTTTGACATTCGGGGTGTGTTGGATAGAGGCCCTAG CTTCAAGCCATACTCTGGCACTGCTTACAACTCGTTGGCCCCTAAGGGCGCTCCCAATACATCTCAGTGGATTGCTG AAGGCGTAAAAAAAGAAGATGGGGGATCTGACGAAGAGGAAGAGAAAAATCTCACCACTTACACTTTTGGAAATGCC CCAGTGAAAGCAGAAGGTGGTGATATCACTAAAGACAAAGGTCTTCCAATTGGTTCAGAAATTACAGACGGCGAAGC CAAACCAATTTATGCAGATAAACTATACCAACCAGAACCTCAGGTGGGAGATGAAACTTGGACTGACACAGATGGAA CAACTGAGAAGTATGGTGGTAGAGCTCTAAAGCCAGAAACTAAAATGAAACCCTGCTATGGGTCTTTTGCTAAACCC ACTAACGTCAAAGGCGGACAGGCAAAACAAAAAACTACTGAACAACCGCAAAACCAGCAGGTTGAATATGATATTGA CATGAACTTTTTTGATGAAGCGTCACAGAAAGCAAACTTCAGTCCAAAAATTGTGATGTATGCAGAAAATGTAGACT TGGAAACCCCAGACACTCATGTGGTGTACAAACCTGGTACTTCAGAAGAAAGTTCTCATGCTAATCTGGGTCAACAA TCTATGCCCAACAGACCCAACTACATTGGCTTTAGAGATAACTTTATTGGACTTATGTACTACAACAGTACTGGCAA CATGGGAGTGCTGGCAGGTCAAGCATCCCAATTGAATGCGGTGGTTGACTTGCAGGACAGAAACACAGAACTATCAT ATCAACTACTGCTTGACTCTCTGGGTGACAGAACCAGATACTTCAGCATGTGGAATCAAGCAGTCGATAGCTATGAT CCTGATGTGCGCATTATTGAAAATCATGGGGTGGAAGATGAGCTTCCCAACTACTGCTTTCCATTGGATGGAGTAGG GGTACCAATAAGTAGTTACAAAATAATTGAACCAAACGGACAGGGTGCAGATTGGAAAGAGCCTGACATAAATGGAA CAAGTGAAATTGGACAAGGAAATCTCTTTGCCATGGAAATTAACCTCCAAGCTAATCTCTGGAGAAGTTTTCTTTAT TCCAATGTGGCTCTGTATCTCCCAGACTCCTACAAATACACCCCAGCCAATGTCACTCTTCCAACTAACACCAACAC TTATGACTACATGAATGGGCGGGTGGTTCCCCCATCCCTGGTGGATACCTACGTAAACATTGGCGCCAGATGGTCTT TGGATGCCATGGACAATGTCAACCCCTTTAACCATCACCGCAACGCTGGCCTGCGATACCGGTCCATGCTTTTGGGC AATGGTCGTTACGTGCCTTTCCACATTCAAGTGCCTCAGAAATTCTTTGCTGTGAAGAACCTGCTGCTTCTACCCGG TTCTTACACCTACGAGTGGAACTTCAGAAAGGATGTGAACATGGTCCTGCAGAGTTCCCTTGGTAATGATCTCCGGG TCGATGGTGCCAGCATAAGTTTTACCAGCATCAATCTCTATGCCACCTTCTTCCCCATGGCCCACAACACTGCCTCC ACCCTTGAAGCCATGCTGCGCAATGACACCAATGATCAATCATTCAATGACTACCTTTCTGCTGCCAACATGCTCTA CCCCATCCCGGCCAACGCTACCAACGTTCCCATCTCCATTCCCTCTCGCAACTGGGCCGCCTTCAGAGGCTGGTCCT TCACCAGACTCAAAACCAAGGAGACTCCCTCTTTGGGATCAGGGTTCGATCCCTACTTTGTTTACTCTGGTTCTATA CCCTACCTGGATGGTACCTTCTACCTTAACCACACTTTCAAGAAAGTCTCCATCATGTTTGACTCTTCAGTGAGCTG GCCTGGTAATGACAGATTGCTAAGTCCAAATGAGTTCGAAATCAAGCGCACAGTTGATGGGGAAGGCTACAATGTGG CCCAATGTAACATGACCAAAGACTGGTTCCTGGTCCAGATGCTTGCCAACTACAACATTGGATACCAGGGCTTCTAC GTTCCTGAGGGTTACAAGGATCGCATGTACTCCTTCTTCAGAAACTTCCAGCCCATGAGTAGACAGGTGGTTGATGA GATTAACTACAAAGACTATAAAGCTGTCGCCGTACCCTACCAGCATAATAACTCTGGCTTTGTGGGTTACATGGCTC CTACCATGCGTCAGGGTCAAGCGTACCCTGCTAACTACCCATACCCCCTAATTGGAACCACTGCAGTAACCAGTGTC ACCCAGAAAAAATTCCTGTGCGACAGGACCATGTGGCGCATCCCATTCTCTAGCAACTTCATGTCCATGGGTGCCCT TACAGACCTGGGACAGAACTTGCTGTATGCCAACTCGGCCCATGCGCTGGACATGACTTTTGAGGTGGATCCCATGG ATGAGCCCACCCTGCTTTATCTTCTTTTCGAAGTCTTCGACGTGGTCAGAGTGCACCAGCCACACCGCGGCGTCATC GAGGCCGTCTACCTGCGCACACCGTTCTCGGCCGGCAACGCCACCACATAAGAAGCCTCTTGCTTCTTGCAAGCAGC AGCTGCAGCCATGTCATGCGGGTCCGGAAACGGCTCCAGCGAGCAAGAGCTCAAAGCCATCGTCCGAGACCTGGGCT GCGGACCCTATTTCCTGGGAACCTTTGACAAGCGTTTCCCGGGGTTCATGGCCCCCGACAAGCTCGCCTGCGCCATA GTCAACACTGCCGGACGCGAGACGGGGGGAGAGCACTGGCTGGCTTTTGGTTGGAACCCGCGCTCCAACACCTGCTA CCTTTTTGATCCTTTTGGGTTCTCGGATGAGCGACTCAAACAGATTTACCAGTTTGAGTACGAGGGGCTCCTGCGCC GCAGTGCCCTTGCTACCAAAGACCGCTGCATCACCCTGGAAAAGTCCACCCAGAGCGTGCAGGGCCCGCGCTCAGCC GCCTGTGGACTTTTTTGCTGTATGTTCCTTCATGCCTTTGTGCACTGGCCCGACCGCCCCATGAACGGAAACCCCAC CATGAAGTTGCTGACTGGGGTGTCAAACAGCATGCTCCAATCACCCCAAGTCCAGCCCACCCTGCGTCGCAACCAGG AGGCGCTATATCGCTTCCTAAACACCCACTCATCTTACTTTCGTTCTCACCGCGCACGCATCGAAAGGGCCACCGCG TTTGACCGTATGGATATGCAATAAGTCATGTAAAACCGTGTTCAATAAAAAGCACTTTATTTTTACATGCACTAAGG CTCTGGTTTTTTGCTCATTCGTTTTCATCATTCACTCAGAAATCAAATGGGTTCTGGCGTGAGTCAGAGTGACCCGT GGGCAGGGAGACGTTGCGGAACTGTAACCTGTTCTGCCACTTGAACTCGGGGATCACCAGCTTGGGAACTGGAATTT CGGGAAAGGTGTCTTGCCACAACTTTCTGGTCAGTTGCAGGGCGCCAAGCAGGTCAGGAGCAGAGATCTTGAAATCA CAGTTGGGGCCGGCATTCTGGACACGGGAGTTGCGGTACACTGGGTTGCAACACTGGAACACCATCAAGGCTGGGTG TCTCACGCTTGCCAGCACGGTCGGGTCACTGATGGTAGTCACATCCAAGTCTTCAGCATTGGCCATTCCAAAGGGGG TCATCTTACAGGTCTGCCTGCCCATCACGGGAGCGCAGCCTGGCTTGTGGTTGCAATCGCAATGAATGGGGATCAGC ATCATCCTGGCTTGGTCGGGGGTTATCCCTGGGTACACGGCCTTCATGAAGGCTTCGTACTGCTTGAAAGCTTCCTG AGCCTTACTTCCCTCGGTGTAAAACATCCCACAGGACTTGCTGGAAAATTGGTTAGTAGCACAGTTGGCATCATTCA CACAGCAGCGGGCATCGTTGTTGGCCAACTGGACCACATTTCTGCCCCAGCGGTTCTGGGTGATCTTGGCTCTGTCT GGGTTCTCCTTCATAGCGCGCTGCCCGTTTTCGCTCGCCACATCCATCTCGATAATGTGGTCCTTCTGGATCATAAT AGTGCCATGCAGGCATTTCACCTTGCCTTCGTAATCGGTGCATCCATGAGCCCACAGAGCGCACCCGGTGCACTCCC AATTATTGTGGGCGATCTCAGAATAAGAATGCACCAATCCCTGCATGAATCTTCCCATCATCGCTGTCAGGGTCTTC ATGCTACTAAATGTCAGCGGGATGCCACGGTGCTCCTCGTTCACATACTGGTGGCAGATACGCTTGTACTGCTCGTG CTGCTCTGGCATCAGCTTGAAAGAGGTTCTCAGGTCATTATCCAGCCTATACCTCTCCATTAGCACAGCCATCACTT CCATGCCCTTCTCCCAGGCAGATACCAGGGGCAAGCTCAAAGGATTCCTAACAGCAATAGAAGTAGCTCCTTTAGCT ATAGGGTCATTCTTGTCGATCTTCTCAACACTTCTCTTGCCATCCTTCTCAATGATGCGCACCGGGGGGTAGCTGAA GCCCACGGCCACCAACTGAGCCTGTTCTCTTTCTTCTTCGCTGTCCTGGCTGATGTCTTGCAGAGGGACATGCTTGG TCTTCCTGGGCTTCTTCTTGGGAGGGATCGGGGGAGGACTGTTGCTCCGTTCCGGAGACAGGGATGACCGCGAAGTT TCGCTTACCAGTACCACCTGGCTCTCGATAGAAGAATCGGACCCCACGCGACGGTAGGTGTTCCTCTTCGGGGGCAG AGGTGGAGGCGACTGAGATGGGCTGCGGTCCGGCCTTGGAGGCGGATGGCTGGCAGAGCCCATTCCGCGTTCGGGGG TGTGCTCCCGTTGGCGGTCGCTTGACTGATTTCCTCCGCGGCTGGCCATTGTGTTCTCCTAGGCAGAGAAACAACAG ACATGGAAACTCAGCCATCACTGCCAACATCGCTGCAAGCGCCATCACACCTCGCCCCCAGCAGCGACGAGGAGGAG AGCTTAACCACCCCACCACCCAGTCCCGCTACCACCACCTCTACCCTCGATGATGAGGAGGAGGTCGACGCAGCCCA GGAGATGCAGGCGCAGGATAATGTGAAAGCGGAAGAGATTGAGGCAGATGTCGAGCAGGACCCGGGCTATGTGACAC CGGCGGAGCACGAGGAGGAGCTGAAACGTTTTCTAGACAGAGAGGATGACGACCGCCCAGAGCATCACCAGGAGGCT GGCCTCGGGGATCATGTTGCCGACTACCTCTCCGGGCTTGGGGGGGAGGACGTGCTCCTCAAACATCTAGCAAGGCA GTCGATCATAGTTAAAGACGCACTACTCAACCTCACCGAAGTGCCCATCAGTGTGGAAGAGCTTAGCCGCGCCTACG AGCTGAACCTCTTTTCGCCTCAGATACCCCCCAAGCGGCAGCGAAACGGCACCTGCGAGGCCAACCCTCGACTCAAC TTCTATCCAGCTTTTACTGTCCCCGAAGTGCTGGCCACCTACCACATCTTTTTTAAGAACCAAAAGATTCCAGTCTC CTGCCGCGCCAACCGCACCCGCGCAGATGCCCTTCTCAACTTGGGTCCGGGAGCTCGTTTACCTGATATAGCTTCCT TGGAAGAGGTTCCAAAGATCTTTGAGGGTCTGGGAAGTGATGAGACTCGGGCCGCAAATGCTCTGCAACAGGGAGAG AATGGCATGGATGAACATCACAGCGCTCTAGTGGAACTGGAGGGTGACAATGCCCGGCTTGCAGTGCTCAAGCGCAG TATCGTGGTCACCCATTTTGCCTACCCCGCTGTTAACCTGCCGCCCAAAGTCATGAGCGCTGTCATGGACCATCTGC TCATCAAACGAGCAAGTCCACTTTCAGAAAACCAGAACATGCAGGATCCAGACGCCTCGGACGAGGGCAAGCCGGTA GTCAGTGACGAGCAGCTATCTCGCTGGCTGGGTACCAACTCCCCCCGAGATTTGGAAGAAAGACGCAAGCTTATGAT GGCTGTAGTGCTAGTAACTGTTGAGTTGGAGTGTCTGCGCCGCTTTTTTACCGACCCCGAGACCCTGCGCAAGCTAG AGGAGAACCTGCACTACACCTTCAGACATGGCTTCGTGCGCCAGGCATGCAAGATCTCCAACGTGGAGCTCACCAAC CTGGTTTCATACATGGGCATTTTGCATGAGAACCGGCTAGGGCAGAGCGTTCTGCACACCACCCTGAAGGGGGAGGC CCGCCGCGACTACATCCGAGACTGTGTCTACCTCTACCTCTGCCATACCTGGCAGACTGGTATGGGTGTGTGGCAAC AGTGTTTGGAAGAGCAGAACCTTAAAGAGCTGGACAAGCTCTTGCAGAGATCCCTCAAAGCCCTGTGGACAGGTTTT GACGAGCGCACCGTCGCCTCGGACCTGGCGGACATCATCTTCCCCGAGCGTCTTAGGGTTACTCTGCGAAACGGCCT GCCAGACTTCATGAGCCAGAGCATGCTTAACAACTTTCGCTCTTTCATCCTGGAACGCTCCGGTATCCTGCCTGCCA CCTGCTGTGCGCTGCCCTCCGACTTTGTGCCTCTCACCTACCGCGAGTGCCCACCGCCGCTATGGAGCCACTGCTAC CTATTCCGCCTGGCCAACTACCTCTCCTACCACTCGGATGTGATAGAGGATGTGAGCGGAGACGGCCTGCTGGAATG CCACTGCCGATGCAATTTATGCACACCCCACCGCTCCCTCGCCTGCAACCCCCAGTTGCTAAGCGAGACCCAGATCA TCGGCACCTTCGAGTTGCAGGGTCCCAACAGTGAAGGCGAGGGGTCTTCTCCGGGGCAGAGTCTGAAACTGACACCG GGGCTGTGGACCTCCGCCTACCTGCGCAAGTTTTATCCCGAGGACTATCATCCCTATGAGATCAGGTTCTATGAGGA CCAGTCACATCCTCCCAAAGTCGAGCTCTCAGCCTGCGTCATCACCCAGGGGGCAATTCTGGCCCAATTGCAAGCCA TCCAAAAATCCCGCCAAGAATTTCTGCTGAAAAAGGGAAGCGGGGTCTACCTTGACCCCCAGACCGGTGAGGAGCTC AACACAAGGTTCCCCCAGGATGTCCCATCGCCGAGGAAGCAAGAAGCTGAAGGTGCAGCTGTCACCCCCAGAGGATA TGGAGGAAGACTGGGACAGTCAGGCAGAGGAGGAGATGGAAGATTGGGACAGCCAGGCAGAGGAGGTGGACAGCCTG GAGGAAGACAGTTTGGAGGAGGAAGACGAGGAGGCAGAGGAGGTGGAAGAAGCAACCGCCGCCAAACAGTTGTCATC GGCGGCGGAGACAAGCAAGTCCCCAGACAGCAGCACGGCTACCATCTCCGCTCCGGGTCGGGGGGCCCAGCGGCGGC CCAACAGTAGATGGGACGAGACCGGGCGATTTCCAAACCCGACCACCGCTTCCAAGACCGGTAAGAAGGAGCGACAG GGATACAAGTCCTGGCGTGGACATAAAAACGCTATCATCTCCTGCTTGCATGAATGCGGGGGCAACATATCCTTCAC CCGGCGATACCTGCTTTTCCACCACGGTGTGAACTTCCCCCGCAATATCTTGCATTACTACCGTCACCTCCACAGCC CCTACTGCAGTCAGCAAGTCCCGGCAACCCCGACAGAAAAAGACAGCAGCGACAACGGTGACCAGAAAACCAGCAGT TAGAAAATCCACAACAAGTGCAGCAGGAGGAGGACTGAGGATCACAGCGAACGAGCCAGCGCAGACCAGAGAGCTGA GGAACCGGATCTTTCCAACCCTCTATGCCATCTTCCAGCAGAGTCGGGGGCAAGAGCAGGAATTGAAAGTAAAAAAC CGATCTCTGCGCTCGCTCACCAGAAGTTGTTTGTATCACAAGAGCGAAGACCAACTTCAGCGCACTCTCGAGGACGC CGAGGCTCTCTTCAACAAGTACTGCGCGCTGACTCTTAAAGAGTAGCCCTTGCCCGCGCTCATTCGAAAACGGCGGG AATCACGTCACCCTTGGCAGCTGTCCTTTGCCCTCGTCATGAGTAAAGACATTCCCACGCCTTACATGTGGAGCTAT CAGCCCCAAATGGGGTTGGCAGCAGGTGCTTCCCAGGACTACTCCACCCGCATGAATTGGCTTAGCGCCGGGCCCTC AATGATATCACGGGTTAATGATATACGAGCTTATCGAAACCAGTTACTCCTAGAACAGTCAGCTCTTACCACCACAC CCCGCCAACACCTTAATCCCCGAAATTGGCCCGCCGCCCTGGTGTACCAGGAAAATCCCGCTCCCACCACCGTACTA CTTCCTCGAGACGCCCAGGCCGAAGTTCAGATGACTAACGCAGGTGTACAGCTGGCGGGCGGTTCCGCCCTATGTCG TCACCGGCCTCAACAGAGTATAAAACGCCTGGTGATCAGAGGCCGAGGTATCCAGCTCAACGACGAGTCGGTTAGCT CTTCGCTTGGTCTGCGACCAGACGGAGTCTTCCAGATCGCCGGCTGTGGGAGATCTTCCTTCACTCCTCGTCAGGCT GTGCTGACTTTGGAGAGTTCGTCCTCGCAGCCCCGCTCGGGCGGCATCGGAACTCTCCAGTTTGTGGAGGAGTTTAC TCCCTCTGTCTACTTCAACCCCTTCTCCGGCTCTCCTGGCCAGTACCCGGACGAGTTCATACCGAACTTCGACGCAA TCAGCGAGTCAGTGGATGGCTATGATTGATGTCTAATGGTGGCGCGGCTGAGCTAGCTCGACTGCGACACCTAGACC ACTGCCGCCGCTTTCGCTGTTTCGCCCGGGAACTCACCGAGTTCATTTACTTCGAACTCTCCGAGGAGCACCCTCAG GGTCCGGCCCACGGAGTGCGGATTACCATCGAAGGGGGAATAGACTCTCGCCTGCATCGCATCTTCTCCCAGCGGCC CGTGCTGATTGAGCGCGACCAGGGAAATACAACCATCTCCATCTACTGCATCTGTAACCACCCCGGATTGCATGAAA GCCTTTGCTGTCTTGTTTGTGCTGAGTTTAATAAAAACTGAGTTAAGACCCTCCTACGGACTACCGCTTCTTCAATC AGGACTTTACAACACCAACCAGATCTTCCAGAAGACCCAGACCCTTCCTCCTCTGATCCAGGACTCTAACTCTACCT TACCAGCACCCTCCACTACTAACCTTCCCGAAACTAACAAGCTTGGATCTCATCTGCAACACCGCCTTTCACGAAGC CTTCTTTCTGCCAATACTACCACTCCCAAAACCGGAGGTGAGCTCCGCGGTCTTCCTACTGACGACCCCTGGGTGGT AGCGGGTTTTGTAACGTTAGGATTAGTTGCGGGTGGGCTTGTGCTAATCCTTTGCTACCTATACACACCTTGCTGTG CATATTTAGTCATATTGTGCTGTTGGTTTAAGAAATGGGGGCCATACTAGTCGTGCTTGCTTTACTTTCGCTTTTGG GTCTGGGCTCTGCTAATCTCAATCCTCTTGATCACGATCCATGTCTAGACTTCGACCCAGAAAATTGCACACTTACT TTTGCACCCGACACAAGCCGTCTCTGTGGAGTTCTTATTAAGTGCGGATGGGACTGCAGGTCCGTTGAAATTACACA TAATAACAAAACATGGAACAATACATTATCCACCACATGGGAACCAGGAGTTCCCGAGTGGTATACTGTCTCTGTCC GAGGTCCTGACGGTTCCATTCGCATTAGTAACAACACTTTCATTTTTTCTGAAATGTGCGATCTGGCCATGTTTATG AGCAAACAGTATGACCTATGGCCTCCTAGCAAAGAGAACATTGTGGCATTTTCCATTGCTTATTGCTTGGTAACATG CATCATCACTGCTATCATTTGTGTGTGCATACACTTGCTTATAGTTATTCGCCCTAGACAAAGCAATGAGGAAAAAG AGAAAATGCCTTAACCTTTTTCCTCATACCTTTTCTTTACAGCATGGCTTCTGTTACAGCTCTAATTATTGCCAGCA TTGTCACTGTCGCTCACGGGCAAACAATTGTCCATATTACCTTAGGACATAATCACACTCTTGTAGGGCCCCCAATT ACTTCAGAGGTTATTTGGACCAAACTTGGAAGTGTTGATTATTTTGATATAATTTGCAACAAAACTGAACCAATATT TGTAATCTGTAACAGACAAAATCTCACGTTAATTAATGTTAGCAAAATTTATAACGGTTACTATTATGGTTATGATA GATCCAGTAGTCAATATAAAAATTACTTAGTTCGCATAACTCAGCCCAAATCAACAGTGCCAACTATGACAATAATT AAAATGGCTAATAAAGCATTAGAAAATTTTACATTACCAACAACGCCCAATGAAAAAAACATTCCAAATTCAATGAT TGCAATTATTGCGGCGGTGGCATTGGGAATGGCACTAATAATAATATGCATGTTCCTATATGCTTGTTGCTATAAAA AGTTTCAACATAAACAGGATCCACTACTAAATTTTAACATTTAATTTTTTATACAGATGATTTCCACTACAATTTTT ATCATTACTAGCCTTGCAGCTGTAACTTATGGCCGTTCACACCTAACTGTACCTGTTGGCTCAACATGTACACTACA AGGACCCCAAGAAGGCTATGTCACTTGGTGGAGAATATATGATAATGGAGGGTTCGCTAGACCATGTGATCAGCCTG GTACAAAATTTTCATGCAACGGAAGAGACTTGACCATTATTAACATAACATTAAATGAGCAAGGCTTCTATTATGGA ACCAACTATAAAAATAGTTTAGATTACAACATTATTGTAGTGCCAGCCACCACTTCTGCTCCCCGCAAATCCACTTT CTCTAGCAGCAGTGCCAAAGCAAGCACAATTCCTAAAACAGCTTCTGCTATGTTAAAGCTTCGAAAAATCGCTTTAA GTAATTCCACAGCAGCTCCCAATACAATTCCTAAATCAACAATTGGCATCATTACTGCCGTGGTAGTGGGATTAATG ATTATATTTTTGTGCATAATGTACTACGCCTGCTGCTATAGAAAACATGAACAAAAAGGTGATGCATTACTAAATTT TGATATTGTTTCAATCAAATGCCACTAACACTCTCAATGTGCAGACTACTTTAAAACATGACATGGAAAACCACACT ACCTCCTATGCATACACAAATATTCAGCCTAAATACGCTATGCAACTTAGAAATCACCATACTAATTGTAATTGGAA TTCTTACACTATCTGTTATTCTTTATTTTATATTCTGCCGTCAAATACCCAATGTTCATAGAAATTCTAAAAGACGT CCCATCTATTCTCCTATGATTAGTCGTCCCCATATGGCTCTGAATGAAATCTAAGATCTTTTTTTTTCTTTTACAGT ATGGTGAACATCAATCATGATTCCTAGAAATTTCTTCTTCACCATACTCATCTGTGCTTTCAATGTCTGTGCTACTT TCACAGCAGTAGCCACTGCAAGCCCAGACTGTATAGGACCATTTGCTTCCTATGCACTTTTTGCCTTTGTTACTTGC ATCTGCGTGTGTAGCATAGTCTGCCTGGTTATTAATTTTTTCCAACTGGTAGACTGGATCTTTGTGCGAATTGCCTA CCTACGTCACCATCCCGAATACCGCAATCAAAATGTTGCGGCACTTCTTAGGCTTATTTAAAACCATGCAGGCTATG CTACCAGTTATTTTAATTCTGCTACTACCCTGCATTGCCCTACCTTCCACCGCCACTCGCGCTACACCTGAACAACT TAGAAAATGCAAATTTCAACAACCATGGTCATTTCTTGATTGCTACCATGAAAAATCTGATTTTCCCACATACTGGA TAGTGATTGTTGGAATAATTAACATACTTTCATGTACCGTTTTCTCAATCACAATATACCCCACATTTAATTTTGGG TGGAATTCTCCCAATGCACTGGGTTACCCACAAGAACTAGATGAACATATCCCACTACAACACATACAACAACCACT AGCATTGGTAGAGTATGAAAATGAGCCACAACCTTCACTGCCTCCTGCTATTAGTTACTTCAACCTAACCGGCGGAG ATGACTGAAATACTCACCACCTCCAATTCCGCCGAGGATCTGCTTGATATGGACGGCCGCGCCTCAGAACAGCGACT CGCCCAACTACGCATCCGCCAGCAGCAGGAACGCGTGACCAAAGAGCTCAGAGATGTCATCCAAATTCACCAATGCA AAAAAGGCATATTTTGTTTGGTAAAACAAGCCAAGATATCCTACGAGATCACCGCTACTGACCATCGCCTTTCTTAC GAACTTGGCCCCCAACGACAAAAATTTACATGCATGGTGGGAATCAACCCTATAGTTATCACCCAGCAAAGTGGAGA TACTAAGGGTTGCATTCACTGCTCTTGCGATTCCACCGAGTGCACCTACACCCTGCTGAAGACCCTATGCGGCCTAA GAGACCTGCTACCCATGAATTAAAAATTAATAAAAAATTACTTACTTGAAATCAGCAATAAGGTCTCTGTTGAAATT TTTTCCCAGCAGCACCTCGCTTCCCTCTTCCCAACTCTGGTATTCTAAACCCCGTTCAGCGGCATACTTTCTCCATA CTTTAAATGGGATGTCAAATTTTAGCTCCTCTCCTGTACCCACGATCTTCATGTCTTTCTTCCCAGATGACCAAGAG AGTCCGGCTCAGTGATTCCTTCAACCCTGTCTACCCCTATGAAGATGAAAGCACCTCCCAACACCCCTTTATAAACC CAGGGTTTATTTCCCCAAATGGCTTTACACAAAGCCCAGACGGAGTTCTTACTTTAAATTGTTTAACCCCACTAACA ACCACAGGCGGGCCTTTACAGTTAAAAGTGGGAGGGGGACTTATAGTGGATGACACTGATGGGACCTTACAAGAAAA CATACGTGCTACAGCACCCATTACTAAAAATAATCATTCTGTAGAACTATCCATTGGAAATGGATTAGAAACACAAA ACAATAAACTATGTGCCAAATTGGGAAATGGGTTAAAATTTAACAACGGTGACATTTGTATAAAGGATAGTATTAAC ACCTTATGGACTGGAATAAAGCCTCCACCTAACTGTCAAATTGTGGAAAACACTGATACAAACGATGGCAAACTTAC TTTAGTATTAGTAAAAAACGGAGGGCTTGTTAATGGCTACGTATCTCTAGTTGGTGTATCAGACACTGTGAACCAAA TGTTCACACAAAAGTCAGCAACCATACAATTAAGATTATATTTCGACTCTTCTGGAAATCTATTAACTGATGAATCA AACTTAAAAATTCCACTTAAAAATAAATCTTCTACAGCAACCAGTGAAGCTGCAACCAGCAGCAAAGCCTTTATGCC AAGTACTACAGCTTATCCCTTTAACACCACTACTAGGGATAGTGAAAACTATATTCATGGAATATGTTACTATATGA CTAGTTATGATAGAAGTCTAGTTCCCTTAAACATTTCTATAATGCTAAACAGCCGTACGATTTCTTCCAATGTTGCC TATGCCATACAATTTGAATGGAATCTAAATGCAAAAGAATCTCCAGAAAGCAACATAGCTACGCTGACCACATCCCC CTTTTTCTTTTCTTATATTAGAGAAGACGACAACTAAAAAATAAAGTTTAAGTGTTTTTATTTAAAAATCACAAAAT TCGAGTAGTTATTTTGCCTCCCCCTTCCCATTTAACAGAATACACCAATCTCTCCCCACGCACAGCTTTAAACATTT GGATACCATTAGAGATAGACATAGTTTTAGTTTCCACATTCCAAACAGTTTCAGAGCGAGCCAATCTGGGGTCAGTG ATACATAAAAATGCATCGGGATAGTCTTTTAAAGCGCTTTCACAGTCCAACTGCTGCGGATGCGACTCCGGAGTCTG GATCACAGTCATCTGGAAGAAGAACGATGGGAATCATAATCCGAAAACGGAATCGGGCGATTGTGTCTCATCAAACC CACAAGCAGCCGCTGTCTGCGTCGCTCCGTGCGACTGCTGTTTATGGGATCGGGGTCTGCAGTGTCCTGAAGCATGA TTTTAATAGCCCTTAACATTAACTTTCTGGTGCGATGCGCGCAGCAACGCATTCTGATTTCACTTAGATTACTACAG TATGTACAGCACATTATCACAATATTGTTTAATAAACCATAATTAAAAGCGCTCCAGCCAAAACTCATATCTGATAC AATCGCCCCTGCATGACCATCATACCAAATTTTAATATAAATTAAATGTCGTTCCCTCAAAAACACACTACCCACAT ACATGATCTCTTTTGGCATGTGCATATTAACAATCTGTCTGTACCATGGACAACGTTGGTTAATCATGCAACCCAAT ATAACCTTCCGGAACCACACTGCCAACACCGCTCCCCCAGCCATGCATTGAAGTGAACCCTGCTGATTACAATGACA ATGAAGAACCCAATTCTCTCGACCATGAATCACTTGAGACTGAAAAATATCTATAGTAGCACAACAAAGACATAAAT GCATGCATCTTCTCATAATTTTTAACTCATCTGGATTTAAAAACATATCCCAAGGAATGGGAAACTCTTGCAAAACA GTAAAGCTGGCAGAACAAGGAAGACCACGAACACAACTTACACTATGCATAGTCATAGTATCACAATCTGGCAACAG CGGGTGGTCTTCAGTCATAGAAGCTCGGGTTTCATTTTCCTCACATCGTGGTAACTGGGCTCTGGTGTAAGGGTGAT GTCTGGCGCATGATGTCGAGCGTGCGCGCAACCTTGTCATAATGGAGTTGTTTCCTGACATTCTCGTATTTTGTATA GCAAAATGCGGCCCTGGCACAACACACTCTTCTTCGTCTTCTATCCTGCCGCTTAGTGTGTTCCGTCTGATAATTCA AGTACAGCCACACTCTTAAGTTGGTCAAAAGAATGCTGGCTTCAGTTGTAATCAAAACTCCATCATATTTAATTGTT CTAAGGAAATCATCCACGGTAGCATATGCAAATCCCAACCAAGCAATGCAACTGGATTGTGTTTCAAGCAGCAGAGG AGAGGGAAGAGACGGAAGAATCATGTTAATTTTTATTCCAAACGATCTCGCAGTACTTCAAATTGTAGATCGCGCAG ATGGCATCTATCGCCCCCACTGTGTTGGTGAAAAAGCACAGCTAAATCAAAAGAAATGCGATTTTCAAGGTGCTCAA CGGTGGCTTCCAACAAAGCCTCCACGCGCACATCCAAAAACAAAAGAATACCAAAAGAAGGAGCATTTTCTAACTCC TCAAACATCATATTACATTCCTGCACCATTCCCAGATAATTTTCAGCTTTCCAGCCTTGAATTATTCGTGTCAGTTC TTGTGGTAAATCCAAACCACACATTACAAACAGGTCACGGAGGGCGCCCTCCACCACCATTCTTAAACACACCCTCA TAATGACAAAATATCTTGCTCCTGTGTCACCTGTAGCAAATTAAGAATGGCATCATCAATTGACATGCCCTTGGCTC TAAGTTCTTCTCTAAGTTCTAGTTGTAAATACTCTCTCATATTATCACCAAACTGCTTAGCCAAAAGCCCCCCGGGA ACAATAGCAGGGGACGCTACAGTGCAGTACAAGCGCAGACCTCCCCAATTGGCTCCAGCAAAAACAAGATTAGAATA AGCATACTGGGAACCACCAGTAATATCATCAAAGTTGCTGGAAATATAATCAGGCAGAGTTTCTTGTAAAAATTGAA TAAAAGAAAAATTTTCCAAAGAAACATTCAAAATCTCTGGGATGCAAATGCAATAGGTTACCGCGCTGCGCTCCAAC ATTGTTAGTTTTGAATTAGTCTGCAAAATAAAAGAAACAAGCGTCATATCATAGTAGCCTGTCGAACAGGTGGATAA ATCAGTCTTTCCATCACAAGACAAGCCACAGGGTCTCCAGCTCGACCCTCGTAAAACCTGTCATCGTGATTAAACAA CAGCACCGAAAGTTCCTCGCGGTGGCCAGCATGAATAATTCTTGATGAAGCATATAATCCAGACATGTTAGCATCAG TTAAAGAGAAAAAACAGCCAACATAGCCTCTGGGTATAATTATGCTTAATCTTAAGTATAGCAAAGCCACCCCTCGC GGATACAAAGTAAAAGGCACAGGAGAATAAAAAATATAATTATTTCTCTGCCGCTGTTCAGGCAACGTCGCCCCCGG TCCATCTAAATACACATACAAAGCCTCATCAGCCATGGCTTACCAGACAAAGAACAGCGGGCGCACAAAGCACAAGC TCTAAAGAAGCTCTAAAGACACTCTCCAACCTCTCCACAATATATACACAAGCCCTAAACTGACGTAATGGGAGTAA AGTATAAAAAATCCCGCCAAGCCCAACACACACCCCGAAACTGCGTCAGCAGGGAAAAATACAGTTTCACTTCCGCA TTCCCAACAAGCGTAAGTTCCTCTTTCTCATGGTACGTCACATCCGATTAACTTGCAACGTCATTTTCCCACGGTCG CACCGCCCCTTTTAGCCGTTCACCCCGCAGCCAATCACCACACAGCGCGCACTTTTTTAAATTACCTCATTTGCATA TTGGCACCATTCCATCTATAAGGTATATTATATAGATAG

[0622] GenBank Accession No. AAW33370 MTKRVRLSDSFNPVYPYEDESTSQHPFINPGFISPNGFTQSPDGVLTLNCLTPLTTTGGPLQLKVGGGLIVDDTDGT LQENIRATAPITKNNHSVELSIGNGLETQNNKLCAKLGNGLKFNNGDICIKDSINTLWTGIKPPPNCQIVENTDTND GKLTLVLVKNGGLVNGYVSLVGVSDTVNOMFTQKSATIQLRLYFDSSGNLLTDESNLKIPLKNKSSTATSEAATSSK AFMPSTTAYPFNTTTRDSENYIHGICYYMTSYDRSLVPLNISIMLNSRTISSNVAYAIQFEWNLNAKESPESNIATL TTSPFFFSYIREDDN

[0623] GenBank Accession No. AAW33349 MMRRTVLGGAVVYPEGPPPSYESVMQQAAAATMQPPLEAPFVPPRYLAPTEGRNSIRYSELAPLYDTTRLYLVDNKS ADIASLNYQNDHSNFLTTVVONNDFTPTEASTQTINFDERSRWGGOLKTIMHTNMPNVNEYMESNKFKARVMVSRKA PEGVTVDDNYDHKQDILEYEWFEFTLPEGNFSATMTIDLMNNAIIDNYLEVGRONGVLESDIGVKEDTRNFRLGWDP ETKLIMPGVYTYEAFHPDIVLLPGCGVDFTESRLSNLLGIRKRHPFQEGFKILYEDLEGGNIPALLDVEAYENSKKE QEAKTEAAKAAAIAKANIVVSDPVRVANAEEVRGDNYTASSVATDESLLAAVAETTETKLTIKPVEKDSKSRSYNVL EDKVNTAYRSWYLSYNYGDPEKGVRSWTLLTTSDVTCGAEQVYWSLPDMMQDPVTFRSTRQVSNYPVVGAELMPVFS KSFYNEQAVYSQQLRQSTSLTHVENRFPENQILIRPPAPTITTVSENVPALTDHGTLPLRSSIRGVQRVTVTDARRR TCPYVYKALGIVAPRVLSSRTF

[0624] GenBank Accession No. AAW33354 MATPSMLPQWAYMHIAGQDASEYLSPGLVQFARATDTYFNLGNKFRNPTVAPTHDVTTDRSQRLMLRFVPVDREDNT YAYKVRYTLAVGDNRVLDMASTFFDIRGVLDRGPSFKPYSGTAYNSLAPKGAPNTSQWIAEGVKKEDGGSDEEEEKN LTTYTFGNAPVKAEGGDITKDKGLPIGSEITDGEAKPIYADKLYQPEPQVGDETWTDTDGTTEKYGGRALKPETKMK PCYGSFAKPTNVKGGQAKOKTTEQPONQQVEYDIDMNFFDEASQKANFSPKIVMYAENVDLETPDTHVVYKPGTSEE SSHANLGQQSMPNRPNYIGFRDNFIGLMYYNSTGNMGVLAGQASQLNAVVDLQDRNTELSYQLLLDSLGDRTRYFSM WNQAVDSYDPDVRIIENHGVEDELPNYCFPLDGVGVPISSYKIIEPNGQGADWKEPDINGTSEIGOGNLFAMEINLQ ANLWRSFLYSNVALYLPDSYKYTPANVTLPTNTNTYDYMNGRVVPPSLVDTYVNIGARWSLDAMDNVNPFNHHRNAG LRYRSMLLGNGRYVPFHIQVPQKFFAVKNLLLLPGSYTYEWNFRKDVNMVLQSSLGNDLRVDGASISFTSINLYATF FPMAHNTASTLEAMLRNDTNDQSFNDYLSAANMLYPIPANATNVPISIPSRNWAAFRGWSFTRLKTKETPSLGSGFD PYFVYSGSIPYLDGTFYLNHTFKKVSIMFDSSVSWPGNDRLLSPNEFEIKRTVDGEGYNVAQCNMTKDWFLVQMLAN YNIGYQGFYVPEGYKDRMYSFFRNFQPMSRQVVDEINYKDYKAVAVPYQHNNSGFVGYMAPTMRQGQAYPANYPYPL IGTTAVTSVTQKKFLCDRTMWRIPFSSNFMSMGALTDLGQNLLYANSAHALDMTFEVDPMDEPTLLYLLFEVFDVVR VHQPHRGVIEAVYLRTPFSAGNATT

[0625] GenBank Accession No. AY737797 (SEQ ID NO: 215) CATCATCAATAATATACCTTATAGATGGAATGGTGCCAATATGTAAATGAGGTGATTTTAAAAATTGTGGGGTGTGT GGTGATTGGCTGTGGGGTTAACGGCTAAACGGGGCGGCGCGGCCGTGGGAAAATGACGTTTTGTGGGGGTGGAGTTT TTTTGCAAGTTGTCGCGGGAAATGTGACGCATAAAAAGGCTTTTTTTCTCACGGAACTACTGACTTTTCCCACGGTA TTTAACAGGAAATGAGGTAGTTTTGACCGGATGCAAGTGAAAATTGCTGATTTGCGCGCGAAAACTGAATGAGGAAG TGTTTTTCTGAATAATGTGGTATTTATGGCAGGGTGGAGTATTTGTTCAGGGCCAGGTAGACTTTGACCCATTACGT GGAGGTTTCGATTACCGTGTTTTTTACCTGAATTTCCGCGTACCGTGTCAAAGTCTTCTGTTTTTACGTAGGTGTCA GCTGATCGCTACGGTATTTATACCTCAGGGTTTGTGTCAAGAGGCCACTCTTGAGTGCCAGCGAGAAGAGTTTTCTC CTCTGCGCCGGCAGTTTAATAATAAAAAAATGAGAGATTTGCGATTTCTGCCTCAGGAAATAATTTCTGCTGAGACT GGAAATGAAATACTGGAGCTTGTGGTGCACGCCCTGATGGGAGACGATCCGGAGCCACCTGTGCAGCTTTTTGAGCC TCCTACGCTTCAGGAACTGTATGATTTAGAGGTAGAGGGATCGGAGGATTCTAATGAGGAAGCTGTGAATGGCTTTT TTACCGATTCTATGCTTTTAGCTGCTAATGAAGGATTAGAATTAGATCCGCCTTTGGACACTTTCGATACTCCAGGG GTGATTGTGGAAAGCGGTACAGGTGTAAGAAAATTACCTGATTTGGGTTCCGTGGACTGTGATTTGCACTGCTATGA AGACGGGTTTCCTCCGAGTGATGAGGAGGACCATGAAAAGGAGCAGTCTATGCAGACTGCAGCGGGTGAGGGAGTGA AGGCTGCCAGTGTTGGTTTTCAGTTGGATTGCCCGGAGCTTCCTGGACATGGCTGTAAGTCTTGTGAATTTCACAGG AAAAATACTGGAGTAAAGGAACTGTTATGTTCGCTTTGTTATATGAGAGCGCACTGCCACTTTATTTACAGTAAGTG TGTTTAAGTTAAAATTTAAAGGAATATGCTGTTTTTCACATGTATATTGAGTGGGAGTTTTGTGCTTCTTATTATAG GTCCTGTGTCTGATGCTGATGAGTCACCATCTCCTGATTCTACTACCTCACCTCCTGAGATTCAAGCACCTGTTCCT GTGGACGTGCGCAAGCCCATTCCTGTGAAGCTTAAGCCTGGGAAACGTCCAGCAGTGGAAAAACTTGAGGACTTGTT ACAGGGTGGGGACGGACCTTTGGACTTGAGTACACGGAAACGGCCAAGACAATAAGTGTTCCATATCCGTGTTTACT TAAGGTGACGTCAATATTTGTGTGAGAGTGCAATGTAATAAAAATATGTTAACTGTTCACTGGTTTTTATTGCTTTT TGGGCGGGGACTCAGGTATATAAGTAGAAGCAGACCTGTATGGTTAGCTCATAGGAGCTGGCTTTCATCCATGGAGG TTTGGGCCATTTTGGAAGACCTTAGAAAGACTAGGCAACTGTTAGAGGACGCTTCGGACGGAGTCTCCGGTTTTTGG AGATTCTGGTTCGCTAGTGAATTAGCTAGGGTAGTTTTTAGGATAAAACAGGACTATAAAGAAGAATTTGAAAAGTT GTTGGTAGATTGCCCAGGACTTTTTGAAGCTCTTAATTTGGGCCATCAAGTTCACTTTAAAGAAAAAGTTTTATCAG TTTTAGACTTTTCAACCCCAGGTAGAACTGCCGCTGCTGTGGCTTTTCTTACTTTTATATTAGATAAATGGATCCCG CAGACTCATTTCAGCAGGGGATACGTTTTGGATTTCGTAGCCACAGCATTGTGGAGAACATGGAAGGTTCGCAAGAT GAGGACAATCTTAGGTTACTGGCCAGTGCAGCCTTTGGGTGTAGCGGGAATCCTGAGGCATCCACCGGTCATGCCAG CGGTTCTGGAGGAGGAACAGCAAGAGGACAACCCGAGAGCCGGCCTGGACCCTCCAGTGGAGGAGGCGGAGTAGCTG ACTTGTCTCCTGAACTGCAACGGGTGCTTACTGGATCTACGTCCACTGGACGGGATAGGGGCGTTAAGAGGGAGAGG GCATCTAGTGGTACTGATGCTAGATCTGAGTTGGCTTTAAGTTTAATGAGTCGCAGACGTCCTGAAACCATTTGGTG GCATGAGGTCCAGAAAGAGGGAAGGGATGAAGTTTCTGTATTGCAGGAGAAATATTCACTGGAACAGGTGAAAACAT GTTGGTTGGAGCCTGAGGATGATTGGGAGGTGGCCATTAAAAATTATGCCAAGATAGCTTTGAGGCCTGATAAACAG TATAAGATTACTAGACGGATTAATATCCGGAATGCTTGTTACATATCTGGAAATGGGGCTGAGGTGGTAATAGATAC TCAAGACAAGGCAGTTATTAGATGCTGCATGATGGATATGTGGCCTGGAGTAGTCGGTATGGAAGCAGTAACTTTTG TAAATGTTAAGTTTAGGGGAGATGGTTATAATGGAATAGTGTTTATGGCCAATACCAAACTTATATTGCATGGTTGT AGCTTTTTTGGTTTCAACAATACCTGTGTAGATGCCTGGGGACAGGTTAGTGTACGGGGATGTAGTTTCTATGCGTG TTGGATTGCCACAGCTGGCAGAACCAAGAGTCAATTGTCTCTGAAGAAATGCATATTCCAAAGATGTAACCTGGGCA TTCTGAATGAAGGCGAAGCAAGGGTCCGCCACTGCGCTTCTACAGATACTGGATGTTTTATTTTAATTAAGGGCAAT GCCAGCGTAAAGCATAACATGATTTGCGGTGCTTCCGATGAGAGGCCTTATCAAATGCTCACTTGTGCCGGTGGGCA TTGTAATATGCTGGCTACTGTGCATATTGTTTCCCATCAACGCAAAAAATGGCCTGTTTTTGATCACAATGTGTTGA CCAAGTGTACCATGCATGCAGGTGGGCGTAGAGGAATGTTTATGCCTTACCAGTGTAACATGAATCATGTGAAAGTG TTGTTGGAACCAGATGCCTTTTCCAGAATGAGCCTAACAGGAATCTTTGACATGAACATGCAAATCTGGAAGATCCT GAGGTATGATGATACGAGATCGAGGGTGCGCGCATGCGAATGCGGAGGCAAGCATGCCAGGTTCCAGCCGGTGTGTG TAGATGTGACTGAAGATCTGAGACCGGATCATTTGGTTATTGCCCGCACTGGAGCAGAGTTCGGATCCAGTGGAGAA GAAACTGACTAAGGTGAGTATTGGGAAAACTTGGGGTGGGGTTTTCAGATGGACAGATTGAGTAAAAATTTGTTTTT TCTGTCTTTCAGCTGTCATGAGTGGAAACGCTTCTTTTAAGGGGGGAGTCTTCAGCCCTTATCTGACAGGGCGTCTC CCATCCTGGGCAGGAGTTCGTCAGAATGTTATGGGATCTACTGTGGATGGAAGACCCGTCCAACCCGCCAATTCTTC AACGCTGACCTATGCTACTTTAAGTTCTTCACCTTTGGACGCAGCTGCAGCCGCCGCCGCCGCCTCTGTTGCCGCTA ACACTGTGCTTGGAATGGGTTACTATGGAAGTATCGTGGCTAATTCCACTTCCTCTAATAACCCTTCTACCCTGACT CAGGACAAGTTACTTGTCCTTTTGGCCCAGCTGGAGGCTTTGACCCAACGTCTGGGTGAACTTTATCAGCAGGTGGC CGAGTTGCGAGTACAAACTGAGTCTGCTGTCGGCACGGCAAAGTCTAAATAAAAAAAAATTCCACAATCAATGAATA AATAAACGAGCTTGTTGTTGATTTAAAATCAAGTGTTTTTATTTCATTTTTCGCGCACGGTATGCCCTAGACCACCG ATCTCGATCATTGAGAACACGGTGGATTTTTTCCAGAATCCTATAGAGGTGGGATTGAATGTTTAGATACATGGGCA TTAGGCCATCTTTGGGGTGGAGATAGCTCCATTGAAGGGATTCATGCTCCGGGGTAGTGTTGTAAATCACCCAGTCA TAACAAGGTCGCAGTGCATGGTGTTGCACAATATCTTTTAGAAGTAGGCTGATTGCCACAGATAAGCCCTTGGTGTA GGTGTTTACAAACCGGTTGAGCTGGGAGGGGTGCATTCGGGGTGAAATTATGTGCATTTTGGATTGGATTTTTAAGT TGGCAATATTGCCGCCAAGATCTCGTCTTGGGTTCATGTTATGAAGGACCACCAAGACGGTGTATCCGGTACATTTA GGAAATTTATCGTGTAGCTTGGATGGAAAAGCGTGGAAAAATTTGGAGACACCCTTGTGTCCTCCGAGATTTTCCAT GCACTCATCCATGATAATAGCAATGGGGCCGTGGGCAGCAGCGCGGGCAAACACGTTCCGTGGGTCTGACACATCAT AGTTATGTTCCTGAGTTAAATCATCATAAGCCATTTTAATGAATTTGGGGCGGAGAGTACCCGATTGGGGTATGAAT GTTCCTTCGGGCCCCGGAGCATAGTTCCCCTCACAGATTTGCATTTCCCAAGCTTTCAGTTCCGATGGTGGAATCAT GTCCACCTGGGGGGCTATGAAGAACACCGTTTCTGGGGCGGGGGTGATTAGTTGGGATGATAGCAAGTTTCTGAGCA ATTGAGATTTGCCACATCCGGTGGGGCCATAAATGATTCCGATTACAGGTTGCAGGTGGTAGTTTAGGGAACGGCAA CTGCCGTCTTCTCGAAGCAAGGGGGCCACCTCGTTCATCATTTCCCTTACATGCATATTTTCCCGCACCAAATCCAT TAGGAGGCGCTCTCCTCCTAGTGATAGAAGTTCTTGTAGTGAGGAAAAGTTTTTCAGCGGTTTTAGACCGTCAGCCA TGGGCATTTTGGAGAGAGTTTGCTGCAAAAGTTCTAGTCTGTTCCACAGTTCAGTGATGTGTTCTATGGCATCTCGA TCCAGCAGACCTCCTCGTTTCGCGGGTTTGGACGGCTCCTGGAGTAGGGTATGAGACGATGGGCGTCCAGCGCTGCC AGGGTTCGGTCCTTCCAGGGTCTCAGTGTTCGAGTCAGGGTTGTTTCCGTCACAGTGAAGGGGTGTGCGCCTGCTTG GGCGCTTGCCAGGGTGCGCTTCAGACTCATTCTGCTGGTGGAGAACTTCTGTCGCTTGGCGCCCTGTATGTCGGCCA AGTAGCAGTTTACCATGAGTTCGTAGTTGAGCGCCTCGGCTGCGTGGCCTTTGGCGCGGAGCTTACCTTTGGAAGTT TTCTTGCATACCGGGCAGTATAGGCATTTCAGCGCATACAGCTTGGGCGCAAGGAAAATGGATTCTGGGGAGTATGC ATCTGCGCCGCAGGAGGCGCAAACAGTTTCACATTCCACCAGCCAGGTTAAATCCGGTTCATTGGGGTCAAAAACAA GTTTTCCGCCATATTTTTTGATGCGTTTCTTACCTTTGGTCTCCATGAGTTCGTGTCCTCGTTGAGTGACAAACAGG CTGTCCGTATCCCCGTAGACTGATTTTACAGGCCTCTTCTCCAGTGGAGTGCCTCGGTCTTCTTCGTACAGGAACTC TGACCACTCTGATACAAAGGCGCGCGTCCAGGCCAGCACAAAGGAGGCTATGTGGGAGGGGTAGCGATCGTTGTCAA CCAGGGGGTCCACCTTTTCCAAAGTATGCAAACACATGTCACCCTCTTCAACATCCAGGAATGTGATTGGCTTGTAG GTGTATTTCACGTGACCTGGGGTCCCCGCTGGGGGGGTATAAAAGGGGGCGGTTCTTTGCTCTTCCTCACTGTCTTC CGGATCGCTGTCCAGGAACGTCAGCTGTTGGGGTAGGTATTCCCTCTCGAAGGCGGGCATGACCTCTGCACTCAGGT TGTCAGTTTCTAAGAACGAGGAGGATTTGATATTGACAGTGCCGGTTGAGATGCCTTTCATGAGGTTTTCGTCCATT TGGTCAGAAAACACAATTTTTTTATTGTCAAGTTTGGTGGCAAATGATCCATACAGGGCGTTGGATAAAAGTTTGGC AATGGATCGCATGGTTTGGTTCTTTTCCTTGTCCGCGCGCTCTTTGGCAGCGATGTTGAGTTGGACATACTCGCGTG CTAGGCACTTCCATTCGGGGAAGATAGTTGTCAATTCATCTGGCACGATTCTCACTTGCCACCCTCGATTATGCAAG GTAATTAAATCCACACTGGTGGCCACCTCGCCTCGAAGGGGTTCGTTGGTCCAACAGAGCCTACCTCCTTTCCTAGA ACAGAAAGGGGGAAGTGGGTCTAGCATAAGTTCATCGGGAGGGTCTGCATCCATGGTAAAGATTCCCGGAAGTAAAT CCTTATCAAAATAGCTGATGGGAGTGGGGTCATCTAAGGCCATTTGCCATTCTCGAGCTGCCAGTGCACGCTCATAT GGGTTAAGGGGACTGCCCCAGGGCATGGGATGGGTGAGTGCAGAGGCATACATGCCACAGATGTCATAGACGTAGAT GGGATCCTCAAAGATGCCTATATAGGTTGGATAGCATCGCCCCCCTCTGATACTTGCTCGCACATAGTCATATAGTT CATGTGATGGCGCTAGCAACCCCGGACCCAAGTTGGTGCGATTGGGTTTTTCTGTTCTGTAGACAATCTGGCGAAAG ATGGCGTGAGAATTGGAAGAGATGGTGGGTCTTTGAAAAATGTTGAAATGGGCATGAGGTAGACCTACAGAGTCTCT GACAAAGTGGGCATAAGATTCTTGAAGCTTGGTTACCAGTTCGGCGGTGACAAGTACGTCTAGGGCGCAGTAGTCAA GTGTTTCTTGAATGATGTCATAACCTGGTTGGTTTTTCTTTTCCCACAGTTCGCGGTTGAGAAGGTATTCTTCGCGA TCCTTCCAGTACTCTTCTAGCGGAAACCCGTCTTTGTCTGCACGGTAAGATCCTAGCATGTAGAACTGATTAACTGC CTTGTAAGGGCAGCAGCCCTTCTCTACGGGTAGAGAGTATGCTTGAGCAGCTTTTCGCAGCGAAGCGTGAGTAAGGG CGAAGGTGTCTCTGACCATGACTTTGAGAAATTGGTATTTGAAGTCCATGTCGTCACAGGCTCCCTGTTCCCAGAGT TGGAAGTCTACCCGTTTCTTGTAGGCGGGGTTGGGCAAAGCGAAAGTAACATCGTTGAAGAGAATCTTACCGGCTCT GGGCATAAAATTGCGAGTGATGCGGAAAGGCTGTGGTACTTCCGCTCGATTGTTGATCACCTGGGCAGCTAGGACGA TCTCGTCGAAACCGTTGATGTTGTGTCCTACGATGTATAATTCTATGAAACGCGGCGTGCCTTTGACGTGAGGTAGC TTATTGAGCTCATCAAAGGTTAGGTCTGTAGGGTCAGATAAGGCGTAGTGTTCGAGAGCCCATTCGTGCAGGTGAGG ATTTGCATGTAGGAATGATGACCAAAGATCCACCGCCAGTGCTGTTTGTAACTGGTCCCGATACTGACGAAAATGCT GGCCAATTGCCATTTTTTCTGGAGTGACACAGTAGAAGGTTCTGGGGTCTTGTTGCCATCGATCCCACTTTAGTTTA ATGGCTAGATCGTGGGCCATGTTGACGAGACGCTCTTCTCCTGAGAGTTTCATGACCAGCATGAAAGGAACTAGTTG TTTGCCAAAGGACCCCATCCAGGTGTAAGTTTCCACATCGTAGGTCAGGAAGAGTCTTTCTGTGCGAGGATGAGAGC CGATCGGGAAGAACTGGATTTCCTGCCACCAGTTGGAGGATTGGCTGTTGATGTGATGGAAGTAGAAGTTTCTGCGG CGCGCCGAGCATTCGTGTTTGTGCTTGTACAGACGGCCGCAGTAGTCGCAGCGTTGCACGGGTTGTATCTCGTGAAT GAGCTGTACCTGGCTTCCCTTGACGAGAAATTTCAGTGGGAAGCCGAGGCCTGGCGATTGTATCTCGTGCTCTTCTA TATTCGCTGTATCGGCCTGTTCATCTTCTGTTTCGGTGGTGGTCATGCTGACGAGCCCCCGCGGGAGGCAAGTCCAG ACCTCGGCGCGGGAGGGGCGGAGCTGAAGGACCAGAGCGCGCAGGCTGGAGCTGTCCAGAGTCCTGAGACGCTGCGG ACTCAGGTTAGTAGGTAGGGACAGAAGATTAACTTGCATGATCTTTTCCAGGGCGTGCGGGAGGTTCAGATGGTACT TGATTTCCACAGGTTCGTTTGTAGAGATGTCAATGGCTTGCAGGGTTCCGTGTCCTTTGGGCGCCACTACCGTACCT TTGTTTTTTCTTTTGATCGGTGGTGGCTCTCTTGCTTCTTGCATGCTCAGAAGCGATGACGGGGACGCGCGCCGGGC GGAAGCGGTTGTTCCGGACCCGGAGGCATGGCTGGTAGTGGCACGTCGGCGCCGCGCACGGGCAGGTTCTGGTACTG CGCTCTGAGAAGACTTGCGTGCGCCACCACGCGTCGATTGACGTCTTGTATCTGACGTCTCTGGGTGAAAGCTACCG GCCCCGTGAGCTTGAACCTGAAAGAGAGTTCAACAGAATCAATTTCGGTATCGTTAACGGCAGCTTGTCTCAGTATT TCTTGTACGTCACCAGAGTTGTCCTGGTAGGCGATCTCCGCCATGAACTGCTCGATTTCTTCCTCCTGAAGATCTCC GCGACCCGCTCTCTCGACGGTGGCCGCGAGGTCATTGGAGATACGGCCCATGAGTTGGGAGAATGCAGTCATGCCCG CCTCGTTCCAGACGCGGCTGTAAACCACGGCCCCCTCGGAGTCTCTTGCGCGCATCACCACCTGAGCGAGGTTAAGC TCCACGTGTCTGGTGAAGACCGCATAGTTGCATAGGCGCTGAAAAAGGTAGTTGAGTGTGGTGGCAATGTGTTCGGC GACGAAGAAATACATGATCCATCGTCTCAGCGGCATTTCGCTGACATCGCCCAGAGCTTCCAAGCGCTCCATGGCCT CGTAGAAGTCCACGGCAAAATTAAAAAACTGGGAGTTTCGCGCGGACACGGTCAATTCCTCCTCGAGAAGACGGATG AGTTCGGCTATGGTGGCCCGTACTTCGCGTTCGAAGGCTCCCGGGATCTCTTCTTCCTCTTCTATCTCTTCTTCCAC TAACATCTCTTCTTCGTCTTCAGGCGGGGGCGGAGGGGGCACACGGCGACGTCGACGGCGCACGGGCAAACGGTCGA TGAATCGTTCAATGACCTCTCCGCGGCGGCGGCGCATGGTTTCAGTGACGGCGCGGCCGTTCTCGCGCGGTCGCAGA GTAAAAACACCGCCGCGCATCTCCTTAAAGTGGTGACTGGGAGGTTCTCCGTTTGGGAGGGAGAGGGCGCTGATTAT CGACGAAAGCGTCTAACCAGTCACAGTCACAAGGTAGGCTGAGTACGGCTTCTTGTGGGCGGGGGTGGTTATGTGTT CGGTCTGGGTCTTCTGTTTCTTCTTCATCTCGGGAAGGTGAGACGATGCTGCTGGTGATGAAATTAAAGTAGGCAGT TCTAAGACGGCGGATGGTGGCGAGGAGCACCAGGTCTTTGGGTCCGGCTTGCTGGATACGCAGGCGATTGGCCATTC CCCAAGCATTATCCTGACATCTAGCAAGATCTTTGTAGTAGTCTTGCATGAGCCGTTCTACGGGCACTTCTTCCTCA CCCGTTCTGCCATGCATACGTGTGAGTCCAAACCCGCGCATTGGTTGTACCAGTGCCAAGTCAGCTACGACTCTTTC GGCGAGGATGGCTTGCTGTACTTGGGTGAGGGTGGCTTGAAAGTCATCAAAATCCACAAAGCGGTGGTAAGCCCCGG TATTAATGGTGTAAGCACAGTTGGCCATGACTGACCAGTTAACTGTCTGGTGACCAGGGCGCACGAGCTCGGTGTAT TTAAGGCGCGAATAGGCGCGGGTGTCAAAGATGTAATCGTTGCAGGTGCGCACCAGATACTGGTAACCTATAAGAAA ATGCGGCGGTGGTTGGCGGTAGAGAGGCCATCGTTCTGTAGCTGGAGCGCCGGGGGCGAGGTCTTCCAACATAAGGC GGTGATAGCCGTAGATGTACCTGGACATCCAGGTGATTCCTGCGGCGGTAGTAGAAGCCCGAGGAAACTCGCGTACG CGGTTCCAAATGTTGCGTAGCGGCATGAAGTAGTTCATTGTAGGCACGGTTTGACCAGTGAGGCGCGCGCAGTCATT GATGCTCTATAGACACGGAGAAAATGAAAGCGTTCAGCGACTCGACTCCGTAGCCTGGAGGAACGTGAACGGGTTGG GTCGCGGTGTACCCCGGTTCGAGACTTGTACTCGAGCCGGCCGGAGCCGCGGCTAACGTGGTATTGGCACTCCCGTC TCGACCCAGCCTACAAAAATCCAGGATACGGAATCGAGTCGTTTTGCTGGTTGCCGAATGGCAGGGAAGTGAGTCCT ATTTTTTTTTTTTGCCGCTCAGATGCATCCCGTGCTGCGACAGATGCGTCCCCAACAACAGCCCCCCTCGCAGCAGC AGCAACCACAAAAGGCTGTCCCTGCAACTACTGCAACTGCCGCTGTGAGCGGTGCGGGACAGCCCGCCTATGATCTG GACTTGGAAGAGGGCGAAGGACTGGCACGTCTAGGTGCGCCTTCGCCCGAGCGGCATCCGCGAGTTCAACTGAAAAA AGATTCTCGCGAGGCGTATGTGCCCCAACAGAACCTATTTAGAGACAGAAGCGGCGAGGAGCCGGAGGAGATGCGAG CTTCCCGCTTTAACGCGGGTCGTGAGCTGCGTCACGGTTTGGACAGAAGACGAGTGTTGCGGGACGAGGATTTCGAA GTTGATGAAGTGACAGGGATCAGTCCTGCCAGGGCACACGTGGCTGCAGCCAACCTTGTATCGGCTTACGAACAGAC AGTAAAGGAAGAGCGTAATTTCCAAAAGTCTTTTAATAATCATGTGCGAACCCTCATTGCCCGCGAAGAAGTCACCC TTGGTTTGATGCATTTGTGGGATTTGATGGAAGCTATCATTCAGAACCCTACTAGCAAACCTCTGACCGCACAGCTG TTTCTGGTGGTGCAACACAGCAGAGACAATGAGGCTTTCAGAGAGGCGCTGCTCAACATCACCGAACCCGAGGGGAG ATGGTTGTATGATCTTATCAACATTCTACAGAGTATCATAGTGCAGGAGCGGAGCCTGGGCCTGGCCGAGAAGGTGG CTGCCATCAATTACTCGGTTTTGAGCTTGGGAAAGTATTACGCTCGCAAGATCTACAAGACTCCATACGTTCCCATA GACAAGGAGGTGAAGATAGATGGGTTCTACATGCGCATGACGCTGAAGGTGTTGACCCTGAGCGATGATCTTGGGGT GTACCGCAATGACAGAATGCATCGCGCGGTGAGCGCCAGCAGGAGGCGCGAGTTAAGCGACAGGGAACTGATGCACA GTTTGCAAAGAGCTCTAACTGGAGCTGGAACCGAGGGTGAGAATTACTTTGATATGGGAGCTGACTTGCAGTGGCAG CCTAGTCGCAGGGCTCTGAACGCCGCGACGGCAGGATGTGAGCTTCCTTACATAGAAGAGGCGGATGAAGGCGAGGA GGAAGAGGGCGAGTACTTGGAAGACTGATGGCACAACCCGTGTTTTTTGCTAGATGGAACAGCAAGCACCGGATCCC GCAATGCGGGCGGCGCTGCAGAGCCAGCCGTCCGGCATTAACTCCTCGGACGATTGGACCCAGGCCATGCAACGTAT CATGGCGTTGACGACTCGCAACCCCGAAGCCTTTAGACAGCAACCCCAGGCCAACCGTCTATCGGCCATCATGGAAG CTGTAGTGCCTTCCCGCTCTAATCCCACTCATGAGAAGGTCCTGGCCATCGTGAACGCGTTGGTGGAGAACAAAGCT ATTCGTCCAGATGAGGCCGGACTGGTATACAACGCTCTCTTAGAACGCGTGGCTCGCTACAACAGTAGCAATGTGCA AACCAATTTGGACCGTATGATAACAGATGTACGCGAAGCCGTGTCTCAGCGCGAAAGGTTCCAGCGCGATGCCAACC TGGGTTCGCTGGTGGCGTTAAATGCTTTCTTGAGTACTCAGCCTGCTAATGTGCCGCGTGGTCAACAGGATTATACT AACTTTTTAAGTGCTTTGAGACTGATGGTATCAGAAGTACCTCAGAGCGAAGTATATCAGTCCGGTCCTGATTACTT CTTTCAGACTAGCAGACAGGGCTTGCAGACGGTAAATCTGAGCCAAGCTTTTAAAAACCTTAAAGGTTTGTGGGGAG TGCATGCCCCGGTAGGAGAAAGAGCAACCGTGTCTAGCTTGTTAACTCCGAACTCCCGCCTATTATTACTGTTGGTA GCTCCTTTCACCGACAGCGGTAGCATCGACCGTAATTCCTATTTGGGTTACCTACTAAACCTGTATCGCGAAGCCAT AGGGCAAAGTCAGGTGGACGAGCAGACCTATCAAGAAATTACCCAAGTCAGTCGCGCTTTGGGACAGGAAGACACTG GCAGTTTGGAAGCCACTCTGAACTTCTTGCTTACCAATCGGTCTCAAAAGATCCCTCCTCAATATGCTCTTACTGCG GAGGAGGAGAGGATCCTTAGATATGTGCAGCAGAGCGTGGGATTGTTTCTGATGCAAGAGGGGGCAACTCCGACTGC AGCACTGGACATGACAGCGCGAAATATGGAGCCCAGCATGTATGCCAGTAACCGACCTTTCATTAACAAACTGCTGG ACTACTTGCACAGAGCTGCCGCTATGAACTCTGATTATTTCACCAATGCCATCTTAAACCCGCACTGGCTGCCCCCA CCTGGTTTCTACACGGGCGAATATGACATGCCCGACCCTAATGACGGATTTCTGTGGGACGACGTGGACAGCGATGT TTTTTCACCTCTTTCTGATCATCGCACGTGGAAAAAGGAAGGCGGCGATAGAATGCATTCTTCTGCATCGCTGTCCG GGGTCATTGGTGCTACCGCGGCTGAGCCCGAGTCTGCAAGTCCTTTTCCTAGTCTACCCTTTTCTCTACACAGTGTA CGTAGCAGCGAAGTGGGTAGAATAAGTCGCCCGAGTTTAATGGGCGAAGAGGAGTACCTAAACGATTCCTTGCTCAG ACCGGCAAGAGAAAAAAATTTCCCAAACAATGGAATAGAAAGTTTGGTGGATAAAATGAGTAGATGGAAGACTTATG CTCAGGATCACAGAGACGAGCCTGGGATCATGGGGACTACAAGTAGAGCGAGCCGTAGACGCCAGCGCCATGACAGA CAGAGGGGTCTTGTGTGGGACGATGAGGATTCGGCCGATGATAGCAGCGTATTGGACTTGGGTGGGAGAGGAAGGGG CAACCCGTTTGCTCATTTGCGCCCTCGCTTGGGTGGTATGTTGTAAAAAAAAATAAAAAAGAAAAAACTCACCAAGG CCATGGCGACGAGCGTACGTTCGTTCTTCTTTATTATCTGTGTCTAGTATAATGAGGCGAGTCGTGCTAGGCGGAGC GGTGGTGTATCCGGAGGGTCCTCCTCCTTCGTACGAGAGCGTGATGCAGCAGCAGCAGGCGACGGCGGTGATGCAAT CCCCACTGGAGGCTCCCTTTGTGCCTCCGCGATACCTGGCACCTACGGAGGGCAGAAACAGCATTCGTTACTCGGAA CTGGCACCTCAGTACGATACCACCAGGTTGTATCTGGTGGACAACAAGTCGGCGGACATTGCTTCTCTGAACTATCA GAATGACCACAGCAACTTCTTGACCACGGTGGTGCAAAACAATGACTTTACCCCTACGGAAGCCAGCACCCAGACCA TTAACTTTGATGAACGATCGCGGTGGGGCGGTCAGCTAAAAACCATCATGCATACTAACATGCCCAACGTGAACGAG TATATGTTTAGTAACAAGTTCAAAGCGCGTGTGATGGTGTCCAGAAAACCTCCTGAGGGTGTTAGAGTAGACGATAA TTATGATCATAAGCAAGATATTCTAAAATACGAGTGGTTCGAGTTTACTTTGCCAGAAGGCAACTTTTCGGTCACTA TGACTATCGACTTGATGAACAATGCCATCATAGACAATTACTTGAAAGTGGGCAGACAGAATGGAGTGTTGGAAAGT GACATTGGTGTTAAGTTCGACACTAGGAACTTCAAGTTGGGATGGGATCCAGAAACTAAGTTGATCATGCCTGGGGT TTACACCTATGAGGCCTTCCATCCTGACATCGTATTGCTGCCTGGCTGCGGAGTGGACTTTACCGAAAGCCGTCTGA GCAACCTTCTTGGCATTAGAAAGAAACACCCATTCCAAGAGGGTTTTAAGATCTTGTATGAGGATTTAGAAGGAGGA AATATTCCAGCCCTTTTGGATGTAGATGCTTATGAGAACAGCAAGAAAGATCAAAAAGCCAAAATAGAAGCTGCTGC AGAAGCTAAAGCAAACATAGTTGCCAACGATCCGGTAAGGGTGGCTAACGCTAGTGAAATCAGGGGAGACAGTTTTG CCGCAACATCCGTTCCGACTAAAGAATCATTATTGGATGATGTGTCTCAAAACATAGAGTTAAAACTCACTATTAAG CCTGTGGAAAAAGATGGCAAAAACAGAAGTTACAATGTGTTGGAAGATAAAATCAACACGGCCTATCGCAGTTGGTA CCTTTCGTACAATTATGGCGACCCCGAAAAAGGAGTGCGTTCCTGGACATTGCTCACCACCTCAGATGTCACCTGCG GAGCGGAGCAGGTCTACTGGTCGCTTCCAGACATGATGCAGGATCCTGTCACTTTCCGCTCCACTAGACAAGTCAGT AACTACCCTGTGGTGGGTGCAGAGCTTATGCCCGTCTTTTCAAAGAGCTTCTACAACGAACAAGCTGTGTACTCCCA GCAGCTCCGCCAGTCCACCTCGCTTACGCACGTCTTCAACCGCTTTCCTGAGAACCAGATTTTAATCCGTCCGCCGG CGCCCACAATTACCACCGTCAGTGAAAACGTTCCTGCTCTCACAGATCACGGGACCCTGCCGTTGCGCAGCAGTATC CGGGGAGTCCAACGTGTGACCGTTACTGACGCCAGACGCCGCACCTGTCCCTACGTGTACAAGGCACTGGGCATAGT CGCACCGCGCGTCCTTTCAAGCCGCACTTTCTAAAAAAAAAAAAAAAATGTCCGTTCTTATCTCGCCCAGTAATAAC ACCGGTTGGGGTCTGCGCGCTCCCAGCAAGATGTACGGAGGCGCACGCAAACGTTCTACCCAACATCCCGTGCGTGT TCGCGGGCATTTTCGCGCTCCATGGGGTGCCCTCAAGGGCCGCACTCGCGTTCGAACCACCGTCGATGATGTAATCG ATCAGGTGGTTGCCGACGCCCGTAATTATACTCCTACTGCGCCTACATCTACTGTGGACGCAGTTATTGACAGTGTA GTGGCTGACGCTCGCAACTATGCTCGACGTAAGAGCCGGCGAAGGCGCATTGCCAGACGTCACCGAGCTACCACTGC CATGCGAGCAGCAAGAGCTCTGCTACGAAGAGCTAGACGCGTGGGGCGAAGAGCCATGCTTAGGGCGGCCAGACGTG CAGCTTCGGGCGCCAGCGCCGGCAGGTCCCGCAGGCAAGCAGCCGCTGTCGCAGCGGCGACTATTGCCGACATGGCC CAATCGCGAAGAGGCAATGTATACTGGGTGCGTGACGCTGCCACCGGTCAACGTGTACCCGTGCGCACCCGTCCCCC TCGCACTTAGAAGATACTGAGCAGTCTCCGATGTTGTGTCCCAGCGGCGAGGATGTCCAAGCGCAAATACAAGGAAG AAATGCTGCAGGTTATCGCACCTGAAGTCTACGGCCAACCGTTGAAGGATGAAAAAAAACCCCGCAAAATCAAGCGG GTAAAAAAGGACAAAAAAGAAGAGGAAGATGGCGATGATGGGCTGGCGGAGTTTGTGCGCGAGTTTGCCCCACGGCG ACGCGTGCAATGGCGTGGGCGCAAAGTTCGACATGTGTTGAGACCTGGAACTTCGGTGGTCTTTACACCCGGCGAGC GTTCAAGCGCTACTTTTAAGCGTTCCTATGATGAGGTGTACGGGGATGATGATATTCTTGAGCAGGCAGCTGACCGA TTAGGCGAGTTTGCTTATGGCAAGCGTAGTAGAATAAATCCCAAGGATGAAACAGTGTCCATACCCTTGGATCATGG AAATCCCACCCCTAGTCTTAAACCGGTCACTTTGCAGCAAGTGTTACCCGTAACTCCGCGAACAGGTGTTAAACGCG AAGGTGAAGATTTGTATCCCACTATGCAACTGATGGTGCCCAAACGCCAGAAGTTGGAGGACGTTTTGGAGAAAGTA AAAGTGGATCCAGATATTCAACCTGAGGTTAAAGTGAGACCCATTAAGCAGGTAGCGCCTGGTCTGGGAGTACAAAC TGTAGACATTAAAATTCCCACTGAAAGTATGGAAGTGCAAACTGAACCCGCAAAGCCTACTGCCACCTCCACTGAAG TGCAAACGGACCCATGGATGCCCATGCCTATTACAACTGACGCCGTCGGTCCCACTCGAAGATCCCGACGAAAGTAC GGTCCAGCAAGTCTGTTGATGCCCAACTATGTCGTACACCCATCTATTATTCCTACTCCTGGTTACCGAGGCACTCG CTACTATCGCAGCCGAAACAGTACTTCCCGCCGTCGCCGCAAGACACCTGCAAATCGCAGTCGTCGCCGTAGACGCA CAAGCAAACCGATTCCCGGCGCCCTGGTGCGGCAAGTGTACCGCAATGGTAGTGCGGAACCTTTGACACTGCCGCGT GCGCGTTACCATCCTAGTATCATCACTTAATCAATGTTGCCGCTGCCTCCTTGCAGATATGGCCCTCACTTGTCGCC TTCGCGTTCCCATCACTGGTTACCGAGGAAGAAACTCGCGCCGTAGAAGAGGGATGTTGGGGCGCGGAATGCGACGC TACAGGCGACGGCGTGCTATCCGCAAGCAATTGCGGGGTGGTTTTTTGCCAGCCTTAATTCCAATTATCGCTGCTGC GATTGGCGCAATACCAGGCATAGCTTCCGTGGCGGTTCAGGCCTCGCAACGACATTGACATTGGAAAAAAAAAAAAC GTATAAATAAAAAATACAATGGACTCTGACACTCCTGGTACTGTGACTATGTTTTCTTAGAGATGGAAGACATCAAT TTTTCATCCTTGGCTCCGCGACACGGCACGAAGCCGTACATGGGCACCTGGAGCGACATCGGCACGAGCCAACTGAA CGGGGGCGCCTTCAATTGGAGCAGTATCTGGAGCGGGCTTAAAAATTTTGGCTCAACCATAAAAACATACGGGAACA AAGCTTGGAACAGCAGTACAGGACAGGCGCTTAGAAATAAACTTAAAGACCAGAACTTCCAACAAAAAGTAGTCGAT GGGATAGCTTCCGGTATCAATGGAGTGGTAGATTTGGCTAACCAGGCTGTGCAGAAAAAGATAAACAGTCGTTTGGA CCCGCCGCCAGCAACCCCAGGTGAAATGCAAGTGGAGGAAGAAATTCCTCCGCCAGAAAAACGAGGCGACAAGCGTC CGCGTCCCGATTTGGAAGAGACGCTGGTGACGCGCGTAGATGAACCGCCTTCTTATGAGGAAGCAACGAAGCTTGGA ATGCCCACCACTAGACCGATAGCCCCTATGGCCACCGGGGTGATGAAACCTTCTCAGTTGCATCGACCCGTCACCTT GGATTTGCCCCCTCCTCCTGCTGCTACTGCTGTACCCGCTTCTAAGCCTGTCGCTGCCCCGAAACCAGTCGCCGTAG CCAGGTCACGTCCCGGGGGCGCTCCTCGTCCAAATGCACACTGGCAAAATACTCTGAACAGCATCGTGGGTCTAGGC GTGCAAAGTGTAAAACGCCGTCGCTGCTTTTAATTAAATATGGAGTAGCGCTTAACTTGCCTATCTGTGTATATGTG TCATTACACGCCGTCACAGCATCAGAGGAAAAAAGGAAGAGGTCGTGCGTCGACGCTGAGTTACTTTCAAGATGGCC ACCCCATCGATGCTGCCCCAATGGGCATACATGCACATCGCCGGACAGGATGCTTCGGAGTACCTGAGTCCGGGTCT GGTGCAGTTCGCCCGCGCCACAGACACCTACTTCAATCTGGGAAATAAGTTTAGAAATCCTACCGTAGCGCCGACCC ACGATGTGACCACCGATCGTAGCCAGCGGCTCATGTTGCGCTTCGTGCCCGTTGACCGGGAGGACAATACATACTCT TACAAAGTGCGGTACACCCTGGCCGTGGGCGACAACAGAGTGCTGGATATGGCCAGCACGTTCTTTGACATTAGGGG CGTGTTGGACAGAGGTCCCAGTTTTAAACCCTATTCTGGTACGGCTTACAACTCCCTGGCTCCTAAAGGCGCTCCAA ATGCATCTCAGTGGTTGGATAAGGGAGTTACAAGCACTGGCCTAGTGGACGACGGCAATACTGATGATGGGGAAGAA GCCAAAAAAGCAACATACACTTTTGGTAATGCTCCAGTAAAAGCCGAGGCTGAAATCACAAAAGACGGATTGCCGGT GGGCTTGGAAGTTTCAACTGAAGGTCCTAAACCAATCTATGCTGATAAGCTTTATCAGCCAGAACCTCAAGTGGGAG ACGAAACTTGGACTGACCTAGACGGAAAAACCGAAGAGTATGGAGGGAGGGTTCTTAAACCTGAAACTAAAATGAAA CCCTGCTACGGATCTTTTGCTAAACCTACTAATATTAAAGGAGGTCAGGCAAAGGTAAAACCAAAAGAAGACGATGG CACTAACAACATCGAGTATGACATTGACATGAACTTCTTTGACTTAAGATCACAAAGATCAGAACTCAAACCTAAAA TTGTAATGTATGCAGAAAATGTGGACCTGGAATGTCCAGATACTCATGTTGTGTACAAACCTGGAGTTTCAGATGCT AGTTCTGAGACCAATCTTGGACAACAGTCTATGCCCAACAGACCCAACTACATTGGCTTCAGAGATAACTTCATCGG ACTTATGTACTATAACAGTACTGGCAACATGGGGGTACTGGCTGGCCAAGCGTCTCAGTTGAATGCAGTGGTTGACT TGCAGGACAGAAACACAGAACTGTCTTACCAACTCTTGCTTGACTCTCTGGGCGACAGAACCAGATACTTTAGCATG TGGAATCAGGCTGTGGACAGTTATGATCCTGATGTACGTGTTATTGAAAATCATGGTGTGGAAGATGAACTTCCCAA CTATTGTTTTCCGTTGGATGGTGTCGGTCCGCGAACAGATAGTTACAAGGAGATTAAGCCAAATGGAGACCAATCTA CTTGGACAAATGTAGACCCAACTGGCAGCAGTGAACTTGCTAAGGGAAATCCATTTGCCATGGAAATTAACCTTCAA GCCAATCTATGGCGAAGTTTCCTTTATTCCAATGTGGCTCTATATCTCCCAGACTCGTACAAATACACCCCGTCCAA TGTCACTCTTCCAGAAAACAAAAACACCTACGACTACATGAACGGGCGGGTGGTGCCGCCATCTCTAGTAGACACCT ATGTGAACATTGGTGCCAGGTGGTCTCTGGATGCCATGGACAATGTCAACCCATTCAACCACCACCGTAACGCTGGC TTGCGTTACCGATCCATGCTTCTGGGTAACGGACGTTATGTGCCTTTCCACATACAAGTGCCTCAAAAATTCTTCGC TGTTAAAAACCTGCTGCTTCTCCCAGGCTCCTACACTTATGAGTGGAACTTTAGGAAGGATGTAAACATGGTTCTAC AGAGTTCCCTCGGTAACGACCTACGGGTAGATGGCGCCAGCATCAGTTTTACGAGCATCAACCTCTATGCTACTTTT TTCCCCATGGCTCACAACACCGCTTCCACCCTTGAAGCCATGCTGCGGAATGACACCAATGATCAGTCATTCAACGA CTACCTATCTGCAGCTAACATGCTCTACCCCATTCCTGCCAATGCAACCAATATTCCCATTTCCATTCCTTCTCGCA ACTGGGCGGCTTTCAGAGGCTGGTCATTTACCAGACTGAAAACCAAAGAAACTCCCTCTTTGGGGTCTGGATTTGAC CCCTACTTCGTCTATTCTGGTTCTATTCCCTACCTGGATGGTACCTTCTACCTGAACCACACTTTTAAGAAGGTTTC CATCATGTTTGACTCTTCAGTGAGCTGGCCTGGAAATGACAGGTTACTATCTCCTAACGAATTTGAAATAAAGCGCA CTGTGGATGGCGAAGGCTACAACGTAGCCCAATGCAACATGACCAAAGACTGGTTCTTGGTACAGATGCTCGCCAAC TACAACATCGGCTATCAGGGCTTCTACATTCCAGAAGGATACAAAGATCGCATGTATTCATTTTTCAGAAACTTCCA GCCCATGAGCAGGCAGGTGGTTGATGAGGTCAATTACAAAGACTTCAAGGCCGTCGCCATACCCTACCAACACAACA ACTCTGGCTTTGTGGGTTACATGGCTCCGACCATGCGTCAAGGTCAACCCTATCCCGCTAACTATCCCTATCCACTC ATTGGAACAACTGCCGTAAATAGTGTTACGCAGAAAAAGTTCTTGTGTGACAGAACCATGTGGCGCATACCGTTCTC AAGCAACTTCATGTCTATGGGAGCCCTTACAGACTTGGGACAGAACATGCTCTATGCCAACTCAGCTCATGCTCTGG ACATGACCTTTGAGGTGGATCCCATGGATGAGCCCACCCTGCTTTATCTTCTCTTCGAAGTTTTCGACGTGGTCAGA GTGCATCAGCCACACCGCGGCATCATCGAGGCAGTCTACCTGCGTACACCGTTCTCGGCCGGTAACGCTACCACGTA AGAAGCTTCTTGCTTCTTGCAAACAGCAGCTGCAACCATGGCCTGCGGATCCCAAAACGGCTCCAGCGAGCAAGAGC TCAGAGCCATTGTCCAAGACCTGGGTTGCGGACCATATTTTTTGGGAACCTTTGATAAGCGCTTCCCGGGGTTCATG GCCCCCGATAAGCTCGCCTGTGCCATTGTAAATACGGCCGGACGTGAGACGGGGGGAGAGCACTGGTTGGCTTTCGG TTGGAACCCACGTTCTAACACCTGCTACCTTTTTGATCCTTTTGGATTCTCGGATGATCGTCTCAAACAGATTTACC AGTTTGAATATGAGGGTCTCCTGCGCCGCAGCGCTCTTGCTACCAAGGACCGGTGTATTACGCTGGAAAAATCTACC CAGACCGTGCAGGGCCCCCGTTCTGCCGCCTGCGGACTTTTCTGCTGCATGTTCCTTCATGCCTTTGTGCACTGGCC TGACCGTCCCATGGACGGAAACCCCACCATGAAATTGCTAACTGGAGTGCCAAACAACATGCTTCATTCTCCTAAAG TCCAGCCCACCCTGTGTGACAATCAAAAAGCACTCTACCATTTTCTCAATACCCATTCGCCTTATTTTCGCTCTCAT CGTACACACATCGAAAGGGCCACTGCGTTCGACCGTATGGATGTGCAATAATGATTCATGTAAACAACGTGTTCAAT AAACAGCACTTTATTTTTTACATGTATCGAGGCTCTGGATTACTTATTTATTTACAAGTCGAATGGGTTCTGACGAG AATCAGAATGACCCGCAGGCAGTGATACGTTGCGGAACTGATACTTGGGTTGCCACTTGAATTCGGGAATCACCAAC TTGGGAACCGGTATATCGGGCAGGATGTCACTCCACAGCTTTCTGGTCAGCTGCAAAGCTCCCAGCAGGTCAGGAGC CGAAATCTTGAAATCACAATTAGGACCAGTGCTCTGAGCGCGAGAGTTGCGGTACACCGGATTGCAGCACTGAAACA CCATCAGCGACGGATGTCTTACGCTTGCCAGCACGGTGGGATCTGCAATCATGCCCACATCCAGATCTTCAGCATTG GCAATGCTGAACGGGGTCATCTTGCAGGTCTGCCTACCCATGGCGGGCACCCAATTAGGCTTGTGGTTACAATCGCA GTGCAGGGGGATCAGTATCATCTTGGCCTGATCCTGTCTGATTCCTGGATACACGGCTCTCATGAAAGCATCATATT GCTTGAAAGCCTGCTGGGCTTTACTACCCTCGGTATAAAACATCCCGCAGGACCTGCTCGAAAACTGGTTAGCTGCG CAGCCGGCATCATTCACACAGCAGCGGGCGTCATTGTTGGCTATTTGCACCACACTTCTGCCCCAGCGGTTTTGGGT GATTTTGGTTCGCTCGGGATTCTCCTTCAAGGCTCGTTGTCCGTTCTCGCTGGCCACATCCATCTCGATAATCTGCT CCTTCTGAATCATAATATTGCCATGCAAGCACTTCAGCTTGCCCTCATAATCATTGCAGCCATGAGGCCACAACGCA CAGCCTGTACATTCCCAATTATGGTGGGCGATCTGAGAAAAAGAATGTATCATTCCCTGCAGAAATCTTCCCATCAT CGTGCTCAGTGTCTTGTGACTAGTGAAAGTTAACTGGATGCCTCGGTGCTCCTCGTTCACGTACTGGTGACAGATGC GCTTGTATTGTTCGTGCTGCTCAGGCATTAGTTTAAAAGAGGTTCTAAGTTCGTTATCCAGCCTGTACTTCTCCATC AGCAGACACATCACTTCCATGCCTTTCTCCCAAGCAGACACCAGGGGCAAGCTAATCGGATTCTTAACAGTGCAGGC AGCAGCTCCTTTAGCCAGAGGGTCATCTTTGGCGATCTTCTCAATGCTTCTTTTGCCATCCTTCTCAACGATGCGCA CGGGCGGGTAGCTGAAACCCACTGCTACAAGTTGCGCCTCTTCTCTTTCTTCTTCGCTGTCTTGACTGATGTCTTGC ATGGGGACATGTTTGGTCTTCCTTGGCTTCTTTTTCGGGGGTATCGGAGGAGGAGGACTGTCGCTCCGTTCCGGAGA CAGGGAGGATTGTGACGTTTCGCTCACCATTACCAACTGACTGTCGGTAGAAGAACCTGACCCCACACGGCGACAGG TGTTTCTCTTCGGGGGCAGAGGTGGAGGCGATTGCGAAGGGCTGCGGTCCGACCTGGAAGGCGGATGACTGGCAGAA CCCCTTCCGCGTTCGGGGGTGTGCTCCCTGTGGCGGTCGCTTAACTGATTTCCTTCGCGGCTGGCCATTGTGTTCTC CTAGGCAGAGAAACAACAGACATGGAAACTCAGCCATTGCTGTCAACATCGCCACGAGTGCCATCACATCTCGTCCT CAGCGACGAGGAAAAGGAGCAGAGCTTAAGCATTCCACCGCCCAGTCCTGCCACCACCTCTACCCTAGAAGATAAGG AGGTCGACGCATCTCATGACATGCAGAATAAAAAAGCGAAAGAGTCTGAGCCAGACATCGAACAAGACCCGGGCTAT GTGACACCGGTGGAACACGAGGAAGAGTTGAAACGCTTTCTAGAGAGAGAGGATGAAAACTGCCCAAAACAGCAAGC GGATAACTATCACCAAGATGCTGGAAATAGGGATCAGAACACCGACTACCTCATAGGGCTTGACGGGGAAGACGCGC TCCTTAAACATCTAGCAAGACAGTCACTCATAGTCAAGGATGCATTATTGGACAGAACTGAAGTGCCCATCAGTGTC GAAGAGCTCAGCCGCGCCTACGAGCTTAACCTATTTTCACCTCGTACTCCCCCCAAACGTCAGCCAAACGGCACCTG CGAGCCAAATCCTCGCTTAAACTTTTATCCAGCTTTTGCTGTGCCAGAAGTACTGGCTACCTATCACATCTTTTTTA AAAATCAAAAAATTCCAGTCTCCTGCCGCGCTAATCGCACCCGCGCCGATGCCCTACTCAATCTGGGACCTGGTTCA CGCTTACCTGATATAGCTTCCTTGGAAGAGGTTCCAAAGATCTTCGAGGGTCTGGGCAATAATGAGACTCGGGCCGC AAATGCTCTGCAAAAGGGAGAAAATGGCATGGATGAGCATCACAGCGTTCTGGTGGAATTGGAAGGCGATAATGCCA GACTCGCAGTACTCAAGCGAAGCGTCGAGGTCACACACTTTGCATACCCCGCTGTCAACCTGCCCCCTAAAGTCATG ACGGCCGTCATGGACCAGTTACTCATTAAGCGCGCAAGTCCCCTTTCAGAAGACATGCATGACCCAGATGCCTGTGA TGAGGGTAAACCAGTGGTCAGTGATGAGCAGCTAACCCGATGGCTGGGCACCGACTCTCCCCGGGATTTGGAAGAGC GTCGCAAGCTTATGATGGCCGTGGTGCTGGTTACCGTAGAACTAGAGTGTCTTCGGCGTTTCTTTACCGATTCAGAA ACCTTGCGCAAACTCGAAGAGAATCTGCACTACACTTTTAGACACGGCTTTGTGCGGCAGGCATGCAAGATATCTAA CGTGGAACTCACCAACCTGGTTTCCTACATGGGTATTCTGCATGAGAATCGCCTAGGACAAAGCGTGCTGCACAGCA CCCTTAAGGGGGAAGCCCGCCGTGATTACATCCGCGATTGTGTTTATCTCTACCTGTGCCACACGTGGCAAACCGGC ATGGGTGTATGGCAGCAATGTTTAGAAGAACAGAACCTGAAAGAGCTAAACAAGCTCTTACAGAAATCTCTTAAGGT TCTGTGGACAGGGTTCGACGAGCGCACCGTCGCTTCCGACCTGGCAGACCTCATCTTCCCAGAGCGTCTCAGGGTTA CTTTGCGAAACGGACTGCCTGACTTTATGAGCCAGAGCATGCTTAACAATTTTCGCTCTTTCATCCTGGAACGCTCC GGTATCCTGCCCGCCACCTGCTGCGCACTGCCCTCCGACTTTGTGCCTCTCACCTACCGCGAATGCCCCCCGCCGCT ATGGAGTCACTGCTACCTGTTCCGTCTGGCCAACTACCTCTCCTACCACTCGGATGTGATCGAGGATGTGAGCGGAG ACGGCTTGCTGGAGTGTCACTGCCGCTGCAATCTGTGCACGCCCCACCGGTCCCTAGCTTGCAACCCCCAGTTGATG AGCGAAACCCAGATAATAGGCACCTTTGAATTGCAAGGCCCCAGCAGCCAAGGCGATGGGTCTTCTCCTGGGCAAAG TTTAAAACTGACCCCGGGACTGTGGACCTCCGCCTACTTGCGCAAGTTTGCCCCGGAAGATTACCACCCCTATGAAA TCAAGTTCTATGAGGACCAATCACAGCCTCCGAAAGCCGAACTTTCGGCCTGCGTCATCACCCAGGGGGCAATTCTG GCCCAATTGCAAGCCATCCAAAAATCCCGCCAAGAATTTCTACTGAAAAAGGGTAAGGGGGTCTACCTTGACCCCCA GACCGGCGAGGAACTCAACACAAGGTTCCCTCAGGATGTCCCAACGACGAGAAAGCAAGAAGTTGAAGGTGCAGCCG CCGCCCCCAGAAGATATGGAGGAAGATTGGGACAGTCAGGCAGAGGAAGCGGAGGAGGAGGACAGTCTGGAGGACAG TCTGGAGGAAGACAGTTTGGAGGAGGAAAACGAGGAGGCAGAGGAGGTGGAAGAAGTAACCGCCGACAAACAGTTAT CCTCGGCTGCGGAGACAAGCAACAGCGCTACCATCTCCGCTCCGAGTCGAGGAACCCGGCGGCGTCCCAGCAGTAGA TGGGACGAGACCGGACGCTTCCCGAACCCAACCAGCGCTTCCAAGACCGGTAAGAAGGATCGGCAGGGATACAAGTC CTGGCGGGGGCATAAGAATGCCATCATCTCCTGCTTGCATGAGTGCGGGGGCAACATATCCTTCACGCGGCGCTACT TGCTATTCCACCATGGGGTGAACTTTCCGCGCAATGTTTTGCATTACTACCGTCACCTCCACAGCCCCTACTATAGC CAGCAAATCCCGGCAGTCTCGACAGATAAAGACAGCGGCGGCGACCTCCAACAGAAAACCAGCAGCGGCAGTTAGAA AATACACAACAAGTGCAGCAACAGGAGGATTAAAGATTACAGCCAACGAGCCAGCGCAAACCCGAGAGTTAAGAAAT CGGATCTTTCCAACCCTGTATGCCATCTTCCAGCAGAGTCGGGGCCAAGAGCAGGAACTGAAAATAAAAAACCGATC TCTGCGTTCGCTCACCAGAAGTTGTTTGTATCACAAGAGCGAAGATCAACTTCAGCGCACTCTCGAGGACGCCGAGG CTCTCTTCAACAAGTACTGCGCGCTGACTCTTAAAGAGTAGGCAGCGACCGCGCTTATTCAAAAAAGGCGGGAATTA CATCATCCTCGACATGAGTAAAGAAATTCCCACGCCTTACATGTGGAGTTATCAGCCCCAAATGGGATTGGCGGCAG GCGCCTCCCAGGACTACTCCACCCGCATGAATTGGCTCAGCGCCGGGCCTTCTATGATTTCTCGAGTTAATGATATA CGCGCCTACCGAAACCAAATACTTTTGGAACAGTCAGCTCTTACCACCACGCCCCGCCAACACCTTAATCCCAGAAA TTGGCCCGCCGCCCTAGTGTACCAGGAAAGTCCCGCTCCCACCACTGTATTACTTCCTCGAGACGCCCAGGCCGAAG TCCAAATGACTAATGCAGGTGCGCAGTTAGCGGGCGGCTCCACCCTATGTCGTCACAGGCCTCGGCATAATATAAAA CGCCTGATGATCAGAGGCCGAGGTATCCAGCTCAACGACGAGTCGGTGAGCTCTCCGCTTGGTCTACGACCAGACGG AATCTTTCAGATTGCCGGCTGCGGGAGATCTTCCTTCACCCCTCGTCAGGCTGTTCTGACTTTGGAAAGTTCGTCTT CGCAACCCCGCTCGGGCGGAATCGGGACCGTTCAATTTGTGGAGGAGTTTACTCCCTCTGTCTACTTCAACCCCTTC TCCGGATCTCCTGGGCACTACCCGGACGAGTTCATACCGAACTTCGACGCGATTAGCGAGTCAGTGGACGGCTACGA TTGATGTCTGGTGACGCGGCTGAGCTATCTCGGCTGCGACATCTAGACCACTGCCGCCGCTTTCGCTGCTTTGCCCG GGAACTCATTGAGTTCATCTACTTCGAACTCCCCAAGGATCACCCTCAAGGTCCGGCCCACGGAGTGCGGATTACTA TCGAAGGCAAAATACACTCTCGCCTGCAACGAATTTTCTCCCAGCGGCCCGTGCTGATCGAGCGAGACCAGGGAAAC ACCACGGTTTCCATCTACTGCATTTGTAATCACCCCGGATTGCATGAAAGCCTTTGCTGTCTTATGTGTACTGAGTT TAATAAAAACTGAATTAAGACTCTCCTACGGACTGCCGCTTCTTCAACCCGGATTTTACAACCAGAAGAACGAAACT TTTCCTGTCGTCCAGGACTCTGTTAACTTCACCTTTCCTACTCACAAACTAGAAGCTCAACGACTACACCGCTTTTC CAGAAGCATTTTCCCTACTAATACTACTTTCAAAACCGGAGGTGAGCTCCAAGGTCTTCCTACAGAAAACCCTTGGG TGGAAGCGGGCCTTGTAGTGCTAGGAATTCTTGCGGGTGGGCTTGTGATTATTCTTTGCTACCTATACACACCTTGC TTCACTTTCCTAGTGGTGTTGTGGTATTGGTTTAAAAAATGGGGCCCATACTAGTCTTGCTTGTTTTACTTTCGCTT TTGGAACCGGGTTCTGCCAATTACGATCCATGTCTAGACTTCGACCCAGAAAACTGCACACTTACTTTTGCACCCGA CACAAGCCGCATCTGTGGAGTTCTTATTAAGTGCGGATGGGAATGCAGGTCCGTTGAAATTACACACAATAACAAAA CCTGGAACAATACCTTATCCACCACATGGGAGCCAGGAGTTCCCGAGTGGTACACTGTCTCTGTCCGAGGTCCTGAC GGTTCCATCCGCATTAGTAACAACACTTTCATTTTTTCTGAAATGTGCGATCTGGCCATGTTCATGAGCAAACAGTA TTCTCTATGGCCTCCTAGCAAGGACAACATCGTAACGTTCTCCATTGCTTATTGCTTGTGCGCTTGCCTTCTTACTG CTTTACTGTGCGTATGCATACACCTGCTTGTAACCACTCGCATCAAAAACGCCAATAACAAAGAAAAAATGCCTTAA CCTCTTTCTGTTTACAGACATGGCTTCTCTTACATCTCTCATATTTGTCAGCATTGTCACTGCCGCTCACGGACAAA CAGTCGTCTCTATCCCTCTAGGACATAATTACACTCTCATAGGACCCCCAATCACTTCAGAGGTCATCTGGACCAAA CTGGGAAGCGTTGATTACTTTGATATAATCTGCAACAAAACAAAACCAATAATAGTAACTTGCAACATACAAAATCT TACATTGATTAATGTTAGCAAAGTTTACAGCGGTTACTATTATGGTTATGACAGATACAGTAGTCAATATAGAAATT ACTTGGTTCGTGTTACCCAGTTAAAAACCACGAAAATGCCAAATATGGCAAAGATTCGATCCGATGACAATTCTCTA GAAACTTTTACATCTCCCACCACACCCGACGAAAAAAACATCCCAGATTCAATGATTGCAATTGTTGCAGCGGTGGC AGTGGTGATGGCACTAATAATAATATGCATGCTTTTATATGCTTGTCGCTACAAAAAGTTTCATCCTAAAAAACAAG ATCTCCTACTAAGGCTTAACATTTAATTTCTTTTTATACAGCCATGGTTTCCACTACCACATTCCTTATGCTTACTA GTCTTGCAACTCTGACTTCTGCTCGCTCACACCTCACTGTAACTATAGGCTCAAACTGCACACTAAAAGGACCTCAA GGTGGTCATGTCTTTTGGTGGAGAATATATGACAATGGATGGTTTACAAAACCATGTGACCAACCTGGTAGATTTTT CTGCAACGGCAGAGACCTAACCATTATCAACGTGACAGCAAATGACAAAGGCTTCTATTATGGAACCGACTATAAAA GTAGTTTAGATTATAACATTATTGTACTGCCATCTACCACTCCAGCACCCCGCACAACTACTTTCTCTAGCAGCAGT GTCGCTAACAATACAATTTCCAATCCAACCTTTGCCGCGCTTTTAAAACGCACTGTGAATAATTCTACAACTTCACA TACAACAATTTCCACTTCAACAATCAGCATTATCGCTGCAGTGACAATTGGAATATCTATTCTTGTTTTTACCATAA CCTACTACGCCTGCTGCTATAGAAAAGACAAACATAAAGGTGATCCATTACTTAGATTTGATATTTAATTTGTTCTT TTTTTTTTTATTTACAGTATGGTGAACACCAATCATGGTACCTAGAAATTTCTTCTTCACCATACTCATTTGTGCAT TTAATGTTTGCGCTACTTTCACAGCAGTAGCCACAGCAACCCCAGACTGTATAGGAGCATTTGCTTCCTATGCACTT TTTGCTTTTGTTACTTGCATCTGCGTATGTAGCATAGTCTGCCTGGTTATTAATTTTTTCCAACTTCTAGACTGGAT CCTTGTGCGAATTGCCTACCTGCGCCACCATCCCGAATACCGCAACCAAAATATCGCGGCACTTCTTAGACTCATCT AAAACCATGCAGGCTATACTACCAATATTTTTGCTTCTATTGCTTCCCTACGCTGTCTCAACCCCAGCTGCCTATAG TACTCCACCAGAACACCTTAGAAAATGCAAATTCCAACAACCGTGGTCATTTCTTGCTTGCTATCGAGAAAAATCAG AAATTCCCCCAAATTTAATAATGATTGCTGGAATAATTAATATAATCTGTTGCACCATAATTTCATTTTTGATATAC CCCCTATTTGATTTTGGCTGGAATGCTCCCAATGCACATGATCATCCACAAGACCCAGAGGAACACATTCCCCTACA AAACATGCAACATCCAATAGCGCTAATAGATTACGAAAGTGAACCACAACCCCCACTACTCCCTGCTATTAGTTACT TCAACCTAACCGGCGGAGATGACTGAAACACTCACCACCTCCAATTCCGCCGAGGATCTGCTCGATATGGACGGCCG CGTCTCAGAACAGCGACTTGCCCAACTACGCATCCGCCAGCAGCAGGAACGCGCGGCCAAAGAGCTCAGAGATGTCA TCCAAATTCACCAATGCAAAAAAGGCATATTCTGTTTGGTAAAACAAGCCAAGATATCCTACGAGATCACCGCTACT GACCATCGCCTCTCTTACGAACTTGGCCCCCAACGACAAAAATTTACCTGCATGGTGGGAATCAACCCCATAGTTAT CACCCAGCAAAGTGGAGATACTAAGGGTTGCATTCACTGCTCCTGCGATTCCATCGAGTGCACCTACACCCTGCTGA AGACCCTATGCGGCCTAAGAGACCTGCTACCAATGAATTAAAAAATGATTAATAAAAAATCACTTACTTGAAATCAG CAATAAGGTCTCTGTTGAAATTTTCTCCCAGCAGCACCTCACTTCCCTCTTCCCAACTCTGGTATTCTAAACCCCGT TCAGCGGCATACTTTCTCCATACTTTAAAGGGGATGTCAAATTTTAGCTCCTCTCCTGTACCCACAATCTTCATGTC TTTCTTCCCAGATGACCAAGAGAGTCCGGCTCAGTGACTCCTTCAACCCTGTCTACCCCTATGAAGATGAAAGCACC TCCCAACACCCCTTTATAAACCCAGGGTTTATTTCCCCAAATGGCTTCACACAAAGCCCAGACGGAGTTCTTACTTT AAAATGTTTAACCCCACTAACAACCACAGGCGGATCTCTACAGCTAAAAGTGGGAGGGGGACTTACAGTGGATGACA CTGATGGTACCTTACAAGAAAACATACGTGCTACAGCACCCATTACTAAAAATAATCACTCTGTAGAACTATCCATT GGAAATGGATTAGAAACTCAAAACAATAAACTATGTGCCAAATTGGGAAATGGGTTAAAATTTAACAACGGTGACAT TTGTATAAAGGATAGTATTAACACCTTATGGACTGGAATAAACCCTCCACCTAACTGTCAAATTGTGGAAAACACTA ATACAAATGATGGCAAACTTACTTTAGTATTAGTAAAAAACGGAGGGCTTGTTAATGGCTACGTGTCTCTAGTTGGT GTATCAGACACTGTGAACCAAATGTTCACACAAAAGACAGCAAACATCCAATTAAGATTATATTTTGACTCTTCTGG AAATCTATTAACTGATGAATCAGACTTAAAAATTCCACTTAAAAATAAATCTTCTACAGCGACCAGTGAAACTGTAG CCAGCAGCAAAGCCTTTATGCCAAGTACTACAGCTTATCCCTTCAACACCACTACTAGGGATAGTGAAAACTACATT CATGGAATATGTTACTACATGACTAGTTATGATAGAAGTCTATTTCCCTTGAACATTTCTATAATGCTAAACAGCCG TATGATTTCTTCCAATGTTGCCTATGCCATACAATTTGAATGGAATCTAAATGCAAGTGAATCTCCAGAAAGCAACA TAGCTACGCTGACCACATCCCCCTTTTTCTTTTCTTACATTACAGAAGACGACAACTAAAATAAAGTTTAAGTGTTT TTATTTAAAATCACAAAATTCGAGTAGTTATTTTGCCTCCACCTTCCCATTTGACAGAATACACCAATCTCTCCCCA CGCACAGCTTTAAACATTTGGATACCATTAGAGATAGACATTGTTTTAGATTCCACATTCCAAACAGTTTCAGAGCG AGCCAATCTGGGGTCAGTGATAGATAAAAATCCATCGCGATAGTCTTTTAAAGCGCTTTCACAGTCCAACTGCTGCG GATGCGAATCCGGAGTCTGGATCACGGTCATCTGGAAGAAGAACGATGGGAATCATAATCCGAAAACGGTATCGGAC GATTGTGTCTCATCAAACCCACAAGCAGCCGCTGTCTGCGTCGCTCCGTGCAACTGCTGTTTATGGGATCAGGGTCC ACAGTGTCCTGAAGCATGATTTTAATAGCCCTTAACATCAACTTTCTGGTGCGATGCGCGCAGCAACGCATTCTGAT TTCACTCAAATCTTTGCAGTAGGTACAACACATTATTACAATATTGTTTAATAAACCATAATTAAAAGCGCTCCAGC CAAAACTCATATCTGATATAATCGCCCCTGCATGACCATCATACCAAAGTTTAATATAAATTAAATGACGTTCCCTC AAAAACACACTACCCACATACATGATCTCTTTTGGCATGTGCATATTAACAATCTGTCTGTACCATGGACAACGTTG GTTAATCATGCAACCCAATATAACCTTCCGGAACCACACTGCCAACACCGCTCCCCCAGCCATGCATTGAAGTGAAC CCTGCTGATTACAATGACAATGAAGAACCCAATTCTCTCGACCGTGAATCACTTGAGAATGAAAAATATCTATAGTG GCACAACATAGACATAAATGCATGCATCTTCTCATAATTTTTAACTCCTCAGGATTTAGAAACATATCCCAGGGAAT AGGAAGCTCTTGCAGAACAGTAAAGCTGGCAGAACAAGGAAGACCACGAACACAACTTACACTATGCATAGTCATAG TATCACAATCTGGCAACAGCGGGTGGTCTTCAGTCATAGAAGCTCGGGTTTCATTTTCCTCACAACGTGGTAACTGG GCTCTGGTGTAAGGGTGATGTCTGGCGCATGATGTCGAGCGTGCGCGCAACCTTGTCATAATGGAGTTGCTTCCTGA CATTCTCGTATTTTGTATAGCAAAACGCGGCCCTGGCAGAACACACTCTTCTTCGCCTTCTATCCTGCCGCTTAGCG TGTTCCGTGTGATAGTTCAAGTACAGCCACACTCTTAAGTTGGTCAAAAGAATGCTGGCTTCAGTTGTAATCAAAAC TCCATCGCATCTAATTGTTCTGAGGAAATCATCCACGGTAGCATATGCAAATCCCAACCAAGCAATGCAACTGGATT GCGTTTCAAGCAGGAGAGGAGAGGGAAGAGACGGAAGAACCATGTTAATTTTTATTCCAAACGATCTCGCAGTACTT CAAATTGTAGATCGCGCAGATGGCATCTCTCGCCCCCACTGTGTTGGTGAAAAAGCACAGCTAAATCAAAAGAAATG CGATTTTCAAGGTGCTCAACGGTGGCTTCCAACAAAGCCTCCACGCGCACATCCAAGAACAAAAGAATACCAAAAGA AGGAGCATTTTCTAACTCCTCAATCATCATATTACATTCCTGCACCATTCCCAGATAATTTTCAGCTTTCCAGCCTT GAATTATTCGTGTCAGTTCTTGTGGTAAATCCAATCCACACATTACAAACAGGTCCCGGAGGGCGCCCTCCACCACC ATTCTTAAACACACCCTCATAATGACAAAATATCTTGCTCCTGTGTCACCTGTAGCGAATTGAGAATGGCAACATCA ATTGACATGCCCTTGGCTCTAAGTTCTTCTTTAAGTTCTAGTTGTAAAAACTCTCTCATATTATCACCAAACTGCTT AGCCAGAAGCCCCCCGGGAACAAGAGCAGGGGACGCTACAGTGCAGTACAAGCGCAGACCTCCCCAATTGGCTCCAG CAAAAACAAGATTGGAATAAGCATATTGGGAACCGCCAGTAATATCATCGAAGTTGCTGGAAATATAATCAGGCAGA GTTTCTTGTAAAAATTGAATAAAAGAAAAATTTGCCAAAAAAACATTCAAAACCTCTGGGATGCAAATGCAATAGGT TACCGCGCTGCGCTCCAACATTGTTAGTTTTGAATTAGTCTGCAAAAATAAAAAAAAAAACAAGCGTCATATCATAG TAGCCTGACGAACAGGTGGATAAATCAGTCTTTCCATCACAAGACAAGCCACAGGGTCTCCAGCTCGACCCTCGTAA AACCTGTCATGGTGATTAAACAACAGCACCGAAAGTTCCTCGCGGTGACCAGCATGAATAATTCTTGATGAAGCATA CAATCCAGACATGTTAGCATCAGTTAACGAGAAAAAACAGCCAACATAGCCTTTGGGTATAATTATGCTTAATCGTA AGTATAGCAAAGCCACCCCTCGCGGATACAAAGTAAAAGGCACAGGAGAATAAAAAATATAATTATTTCTCTGCTGC TGTTCAGGCAACGTCGCCCCCGGTCCCTCTAAATACACATACAAAGCCTCATCAGCCATGGCTTACCAGACAAAGTA CAGCGGGCACGCACAAGCTCTAAAGTCACTCTCCAACCTCTCCACAATATATATACACAAGCCCTAAACTGACGTAA TGGGAGTAAAGTGTAAAAAATCCCGCCAAACCCAACACACACCCCGAAACTGCGTCACCAGGGAAAAGTACAGTTTC ACTTCCGCAATCCCAACAAGCGTCACTTCCTCTTTCTCACGGTACGTCACATCCCATTAACTTGCAACGTCATTTTC CCACGGCCGCGCCGCCCCGTTTAGCCGTTAACCCCACAGCCAATCACCACACACCCCACAATTTTTAAAATCACCTC ATTTACATATTGGCACCATTCCATCTATAAGGTATATTATTGATGATG

[0626] GenBank Accession No. AAW33501 MTKRVRLSDSFNPVYPYEDESTSQHPFINPGFISPNGFTQSPDGVLTLKCLTPLTTTGGSLQLKVGGGLTVDDTDGT LQENIRATAPITKNNHSVELSIGNGLETONNKLCAKLGNGLKENNGDICIKDSINTLWTGINPPPNCQIVENTNTND GKLTLVLVKNGGLVNGYVSLVGVSDTVNQMFTQKTANIQLRLYFDSSGNLLTDESDLKIPLKNKSSTATSETVASSK AFMPSTTAYPFNTTTRDSENYIHGICYYMTSYDRSLFPLNISIMLNSRMISSNVAYAIQFEWNLNASESPESNIATL TTSPFFFSYITEDDN

[0627] GenBank Accession No. ABC49791 MRRVVLGGAVVYPEGPPPSYESVMQQQQATAVMOSPLEAPFVPPRYLAPTEGRNSIRYSELAPQYDTTRLYLVDNKS ADIASLNYQNDHSNFLTTVVONNDFTPTEASTQTINFDERSRWGGQLKTIMHTNMPNVNEYMESNKFKARVMVSRKP PEGVRVDDNYDHKQDILKYEWFEFTLPEGNFSVTMTIDLMNNAIIDNYLKVGRONGVLESDIGVKEDTRNFKLGWDP ETKLIMPGVYTYEAFHPDIVLLPGCGVDFTESRLSNLLGIRKKHPFQEGFKILYEDLEGGNIPALLDVDAYENSKKD QKAKIEAAAEAKANIVANDPVRVANASEIRGDSFAATSVPTKESLLDDVSQNIELKLTIKPVEKDGKNRSYNVLEDK INTAYRSWYLSYNYGDPEKGVRSWTLLTTSDVTCGAEQVYWSLPDMMQDPVTFRSTRQVSNYPVVGAELMPVFSKSF YNEQAVYSQQLRQSTSLTHVENRFPENQILIRPPAPTITTVSENVPALTDHGTLPLRSSIRGVQRVTVTDARRRTCP YVYKALGIVAPRVLSSRTF

[0628] GenBank Accession No. AAW33485 MATPSMLPQWAYMHIAGQDASEYLSPGLVQFARATDTYFNLGNKERNPTVAPTHDVTTDRSQRLMLRFVPVDREDNT YSYKVRYTLAVGDNRVLDMASTFFDIRGVLDRGPSFKPYSGTAYNSLAPKGAPNASQWLDKGVTSTGLVDDGNTDDG EEAKKATYTFGNAPVKAEAEITKDGLPVGLEVSTEGPKPIYADKLYQPEPQVGDETWTDLDGKTEEYGGRVLKPETK MKPCYGSFAKPTNIKGGQAKVKPKEDDGTNNIEYDIDMNFFDLRSQRSELKPKIVMYAENVDLECPDTHVVYKPGVS DASSETNLGQQSMPNRPNYIGFRDNFIGLMYYNSTGNMGVLAGQASQLNAVVDLQDRNTELSYOLLLDSLGDRTRYF SMWNQAVDSYDPDVRVIENHGVEDELPNYCFPLDGVGPRTDSYKEIKPNGDQSTWTNVDPTGSSELAKGNPFAMEIN LQANLWRSFLYSNVALYLPDSYKYTPSNVTLPENKNTYDYMNGRVVPPSLVDTYVNIGARWSLDAMDNVNPENHHRN AGLRYRSMLLGNGRYVPFHIQVPQKFFAVKNLLLLPGSYTYEWNFRKDVNMVLQSSLGNDLRVDGASISFTSINLYA TFFPMAHNTASTLEAMLRNDTNDQSENDYLSAANMLYPIPANATNIPISIPSRNWAAFRGWSFTRLKTKETPSLGSG FDPYFVYSGSIPYLDGTFYLNHTFKKVSIMFDSSVSWPGNDRLLSPNEFEIKRTVDGEGYNVAQCNMTKDWFLVQML ANYNIGYQGFYIPEGYKDRMYSFFRNFQPMSRQVVDEVNYKDFKAVAIPYQHNNSGFVGYMAPTMRQGQPYPANYPY PLIGTTAVNSVTQKKFLCDRTMWRIPFSSNFMSMGALTDLGQNMLYANSAHALDMTFEVDPMDEPTLLYLLFEVEDV VRVHQPHRGIIEAVYLRTPFSAGNATT

[0629] GenBank Accession No. DQ900900 (SEQ ID NO: 217) CATCATCATAATATACCCCACAAAGTAAACAAAAGTTAATATGCAAATGAGCTTTTGAATTTTAACGGTTTTGGGGC GGAGCCAACGCTGATTGGACGAGAAGCGGTGATGCAAATAACGTCACGACGCACGGCTAACGGCCGGCGCGGAGGCG TGGCCTAGGCCGGAAGCAAGTCGCGGGGCTAATGACGTATAAAAAAGCGGACTTTAGACCCGGAAACGGCCGATTTT CCCGCGGCCACGCCCGGATATGAGGTAATTCTGGGCGGATGCAAGTGAAATTAGGTCATTTTGGCGCCAAAACTGAA TGAGGAAGTGAAAAGTGAAAAATACCTGTCCCGCCCAGGGCGGAATATTTACCGAGGGCCGAGAGACTTTGACCGAT TACGTGGGGTTTCGATTGCGGTGTTTTTTTCGCGAATTTCCGCGTCCGTGTGAAAGTCCGGTGTTTATGTCACAGAT CAGCTGATCCACAGGGTATTTAAACCAGTTGAGCCCGTCAAGAGGCCACTCTTGAGTGCCAGCGAGTAGAGATTTCT CTGAGCTCCGCTCCCAAAGTGTGAGAAAAATGAGACACCTGCGCCTCCTGTCTTCAACTGTGCCTATTAACATGGCC GCATTATTGCTGGAGGACTATGTGAGTACAGTATTGGAGGACGAACTACATCCATCTCCATTTGAGCTGGGACCTAC ACTTCAGGACCTTTATGATTTGGAGGTAGATGCCCATGATGACGACCCAAACGAAGAGGCTGTGAATTTAATATTTC CAGAATCTCTGATTCTTCAGGCTGACATAGCCAGCGAAGCTGTACCTACACCACTTCATACACCGACTTTGTCACCC ATACCTGAATTGGAAGAGGAGGACGAGTTAGACCTCCGATGTTATGAGGAAGGTTTTCCTCCCAGCGATTCAGAGGA CGAACAGGGTGAGCAGAGCATGGCTCTAATCTCAGAATATGCTTGTGTGGTTGTGGAAGAGCATTTTGTGTTGGACA ATCCTGAGGTGCCCGGGCAAGGCTGTAGATCCTGCCAGTACCACCGGGATAAGACCGGAGACACAAACGCCTCCTGC GCTCTGTGTTACATGAAAAAGAACTTCAGCTTTATTTACAGTAAGTGGAGTGAATGTGAGAGAGGCTGAGTGCTTAA CACATAACTGGGTGATGCTTAAACAGCTGTGCTAAGTGTGGTTTATTTTTGTTTCTAGGTCCGGTGTCAGAGGATGA GTCATCACCCTCAGAAGAAAACCACCCGTGTCCCCCTGAGCTGTCAGGCGAAACGCCCCTGCAAGTGCACAAACCCA CCCCAGTCAGACCCAGTGGCGAGAGGCGAGCAGCTGTTGAAAAAATTGAGGACTTGTTACATGACATGGGTGGGGAT GAACCTTTGGACCTGAGCTTGAAACGCCCCAGGAACTAGGCGCAGCTGTGCTTAGTCATGTGTAAATAAAGTTGTAC AATAAAAGTATATGTGACGCATGCAAGGTGTGGTTTATGACTCATGGGGGGGGCTTAGTCCTATATAAGTGGCAACA CCTGGGCACTGGGCACAGACCTTCAGGGAGTTCCTGATGGATGTGTGGACTATCCTTGCAGACTTTAGCAAGACACG CCGGCTTGTAGAGGATAGTTCAGACGGGTGCTCCGGGTTCTGGAGACACTGGTTTGGAACTCCTCTATCTCGACTGG TGTACACAGTTAAGAAGGATTATAACGAGGAATTTGAAAATCTTTTTGCTGATTGCTCTGGCCTGCTAGATTCTCTG AATCTCGGCCACCAGTCCCTTTTCCAGGAAAGGGTACTCCACAGCCTTGATTTTTCCAGCCCAGGGCGCACTACAGC CGGGGTTGCTTTTGTGGTTTTTCTGGTTGACAAATGGAGCCAGAACACCCAACTGAGCAGGGGCTACATTCTGGACT TCGCAGCCATGCACCTGTGGAGGGCATGGGTGAGGCAGCGGGGACAGAGAATCTTGAACTACTGGCTTATACAGCCA GCAGCTCCGGGTCTTCTTCGTCTACACAGACAAACATCCATGTTGGAGGAAGAAATGAGGCAGGCCATGGACGAGAA CCCGAGGAGCGGCCTGGACCCTCCGTCGGAAGAGGAGCTGGATTGAATCAGGTATCCAGCTTGTACCCAGAGCTTAG CAAGGTGCTGACATCCATGGCTAGGGGAGTGAAGAGGGAGAGGAGCGATGGGGGCAATACCGGGATGATGACCGAGC TGACGGCCAGCCTGATGAATCGCAAGCGCCCAGAGCGCATTACCTGGCACGAGCTACAGATGGAGTGCAGGGATGAG TTGGGCCTGATGCAGGATAAATATGGCCTGGAGCAGATAAAAACACATTGGTTGAACCCAGATGAGGATTGGGAGGA GGCCATTAAGAAATATGCCAAGATAGCCCTGCGCCCAGATTGCAAGTACATAGTGACCAAGACCGTGAATATTAGAC ATGCCTGCTACATTTCAGGGAACGGGGCAGAGGTGGTCATCGATACCCTGGACAAGGCCGCCTTCAGGTGTTGCATG ATGGGAATGAGAGCAGGAGTGATGAATATGAATTCCATGATCTTCATGAACATGAAGTTCAATGGAGAGAAGTTTAA TGGGGTGCTGTTCATGGCCAACAGCCACATGACCCTGCATGGCTGCAGTTTCTTTGGCTTCAACAATATGTGCGCCG AGGTCTGGGGCGCTTCCAAGATCAGGGGATGTAAGTTTTATGGCTGCTGGATGGGCGTGGTCGGAAGACCTAAGAGC GAGATGTCTGTGAAGCAGTGTGTGTTTGAGAAATGCTACCTGGGAGTCTCTACCGAGGGCAATGCTAGAGTGAGACA CTGCTCTTCCCTGGATACGGGCTGCTTCTGCCTGGTGAAGGGTACGGCCTCTCTGAAGCATAATATGGTGAAGGGCT GCACAGATGAGCGCATGTACAACATGCTAACATGCGACTCGGGGGTCTGTCATATCCTGAAGAACATCCATGTGACC TCCCACCCCAGAAAGAAGTGGCCAGTGTTTGAGAATAACCTGCTGATCAAGTGCCATATGCACCTGGGTGCCAGAAG GGGCACCTTCCAGCCGTACCAGTGCAACTTTAGCCAGACCAAGCTGCTGTTGGAAAACGATGCCTTCTCCAGGGTGA ACCTGAACGGCATCTTTGACATGGATGTCTCGGTGTACAAGATCCTGAGATACGATGAGACCAAGTCCAGGGTGCGC GCTTGCGAGTGCGGGGGCAGACACACCAGGATGCAGCCAGTGGCCCTGGATGTGACCGAGGAGCTGAGACCAGACCA CCTGGTGATGGCCTGTACCGGGACCGAGTTCAGCTCCAGTGGGGAGGACACAGATTAGAGGTAGGTTTGAGTAGTGG GCGTGGCTAATGTGAGTATAAAGGCGGGTGTCTTACGAGGGTCTTTTTGCTTTTCTGCAGACATCATGAACGGGACC GGCGGGGCCTTCGAAGGGGGGCTTTTTAGCCCTTATTTGACAACCCGCCTGCCGGGATGGGCCGGAGTTCGTCAGAA TGTGATGGGATCTACGGTGGATGGGCGTCCAGTGCTTCCAGCAAATTCCTCGACCATGACCTACGCGACCGTGGGGA GCTCGTCGCTTGACAGCACCGCCGCAGCCGCGGCAGCCGCAGCCGCCATGACAGCGACGAGACTGGCCTCGAGCTAT ATGCCCAGCAGCGGTAGCAGCCCCTCTGTGCCCAGTTCCATCATCGCCGAGGAGAAACTGCTGGCCCTGCTGGCCGA GCTGGAAGCCCTGAGCCGCCAGCTGGCCGCCCTGACCCAGCAGGTGTCCGATCTCCGCGAGCAACAGCAGCAGCAAA ATAAATGATTCAATAAACACAGATTCTGATTCAAACAGCAAAGCATCTTTATTATTTATTTTTTCGCGCGCGGTAGG CCCTGGTCCACCTCTCCCGATCATTGAGAGTGCGGTGGATTTTTTCCAGGACCCGGTAGAGGTGGGATTGGATGTTG AGGTACATGGGCATGAGCCCGTCCCGGGGGTGGAGGTAGCACCACTGCATGGCCTCGTGCTCTGGGGTCGTGTTGTA GATAATCCAGTCATAGCAGGGGCGCTGGGCGTGGTGCTGGATGATGTCCTTGAGGAGGAGACTGATGGCCACGGGGA GCCCCTTGGTGTAGGTGTTGGCAAAGCGGTTAAGCTGGGAGGGATGCATGCGGGGGGAGATGATGTGCAGTTTGGCC TGGATCTTGAGGTTGGCGATGTTGCCACCCAGATCCCGCCGGGGGTTCATATTGTGCAGGACCACCAGAACGGTGTA GCCCGTGCACTTGGGGAACTTATCATGCAACTTGGAAGGGAATGCGTGGAAGAATTTGGAGACGCCCTTGTGCCCGC CCAGGTTTTCCATGCACTCATCCATGATGATGGCAATGGGCCCGTGGGCTGCGGCTTTGGCAAAAACGTTTCTGGGG TCAGAGACATCATAATTATGCTCCTGGGTGAGATCATCATAAGACATTTTAATGAATTTGGGGCGAAGGGTGCCAGA TTGGGGGACGATCGTTCCCTCGGGCCCCGGGGCGAAGTTCCCCTCGCAGATCTGCATCTCCCAGGCTTTCATCTCGG AGGGGGGGATCATGTCCACCTGCGGGGCGATGAAAAAAACGGTTTCCGGGGCGGGGGTGATGAGCTGCGAGGAGAGC AGGTTTCTTAACAGCTGGGACTTGCCGCACCCGGTCGGGCCGTAGATGACCCCGATGACGGGTTGCAGGTGGTAGTT CAAGGAGATGCAGCTGCCGTCGTCCCGGAGGAGGGGGGCCACCTCGTTGAGCATGTCTCTCACTTGGAGGTTTTCCC GGACGAGCTCGCCGAGGAGGCGGTCCCCGCCCAGCGAGAGCAGCTCTTGCAGGGAAGCAAAGTTTTTCAGGGGCTTG AGCCCGTCGGCCATGGGCATCTTGGCAAGGGTCTGCGAGAGGAGCTCCAGGCGGTCCCATAGCTCGGTGACGTGCTC TACGGCATCTCGATCCAGCAGACTTCCTCGTTTCGGGGGTTGGGACGACTGCGACTGTAGGGCACGAGACGATGGGC GTCCAGCGCGGCCAGCGTCATGTCCTTCCAGGGTCTCAGGGTCCGAGTGAGGGTGGTCTCCGTCACGGTGAAGGGGT GGGCCCCGGGCTGGGCGCTTGCAAGGGTGCGCTTGAGACTCATCCTGCTGGTGCTGAAACGGGCACGGTCTTCGCCC TGCGCGTCGGCGAGATAGCAGTTGACCATGAGCTTGTAGTTAAGGGCCTCGGCGGCGTGGCCCTTGGCACGGAGCTT GCCTTTGGAAGAGCGCCCGCAGGCGGGACAGAGGAGGGATTGCAGGGCGTAGAGCTTGGGTGCGAGAAAGACGGACT CGGGAGCGAAGGCGTCCGCTCCGCAGTGGGCGCAGACGGTTTCGCACTCGACGAGCCAGGTGAGCTCGGGCTGCTCG GGGTCAAAAACCAGTTTTCCCCCGTTCTTTTTGATGCGCTTCTTACCTCGCGTCTCCATGAGTCTGTGTCCGCGTTC GGTGACAAACAGGCTGTCTGTGTCCCCGTAGACGGACTTGATTGGCCTGTCCTGCAGGGGCGTCCCGCGGTCCTCCT CGTAGAGAAACTCGGACCACTCTGAGACAAAGGCGCGCGTCCACGCCAAGACAAAGGAGGCCACGTGCGAGGGGTAG CGGTCGTTGTCCACCAGGGGGTCCACCTTTTCCACCGTGTGCAGACACATGTCCCCCTCCTCCGCATCCAAGAAGGT GATTGGCTTGTAGGTGTAGGCCACGTGACCGGGGGTCCCCGACGGGGGGGTATAAAAGGGGGCGGGTCTGTGCTCGT CCTCACTCTCTTCCGCGTCGCTGTCCACGAGCGCCAGCTGTTGGGGTAGGTATTCCCTCTCGAGAGCGGGCATGACC TCGGCACTCAGGTTGTCAGTTTCTAGAAACGAGGAGGATTTGATGTTGGCCTGCCCTGCCGCAATGCTTTTTAGGAG ACTTTCATCCATCTGGTCAGAAAAGACTATTTTTTTATTGTCAAGCTTGGTGGCAAAGGAGCCATAGAGGGCGTTGG AGAGAAGCTTGGCGATGGATCTCATGGTCTGATTTTTGTCACGGTCGGCGCGCTCCTTGGCCGCGATGTTGAGCTGG ACATACTCGCGCGCGACACACTTCCATTCTGGGAAGACGGTGGTGCGCTCGTCGGGCACGATCCTGACGCGCCAGCC GCGATTATGCAGGGTGACCAGGTCCACGCTGGTGGCCACCTCGCCGCGCAGGGGCTCGTTGGTCCAGCAGAGGCGTC CGCCCTTGCGCGAGCAGAACGGGGGCAGCACATCAAGCAGATGCTCGTCAGGGGGGTCCGCATCGATGGTGAAGATG CCCGGACAGAGTTCCTTGTCAAAATAATCGATTTTTGAGGATGCATCATCCAAGGCCATCTGCCACTCGCGGGCGGC CAGCGCTCGCTCGTAGGGGTTGAGGGGCGGACCCCAGGGCATGGGATGCGTGAGGGCGGAGGCGTACATGCCGCAGA TGTCGTAGACATAGATGGGCTCCGAGAGGATGCCGATGTAGGTGGGATAACAGCGCCCCCCGCGGATGCTGGCGCGC ACATAGTCATACAACTCGTGCGAGGGGGCCAAGAAAGCGGGGCCGAGATTGGTGCGCTGGGGCTGCTCGGCGCGGAA GACGATCTGGCGAAAGATGGCATGCGAGTTGGAGGAGATGGTGGGCCGTTGGAAGATGTTAAAGTGGGCGTGGGGCA AGCGGACCGAGTCGCGGATGAAGTGCGCGTAGGAGTCTTGCAGCTTGGCAACGAGCTCGGCGGTGACAAGGACGTCC ATGGCGCAGTAGTCCAGCGTTTCACGGATGATGTCATAACCCGCCTCTTCTTTCTTCTCCCACAGCGCGCGGTTGAG GGCGTACTCCTCGTCATCCTTCCAGTACTCCCGGAGCGGGAATCCTCGATCGTCCGCACGGTAAGAGCCCAGCATGT AGAAATGGTTCACGGCCTTGTAGGGACAGCAGCCCTTCTCCACGGGGAGGGCGTAAGCTTGAGCGGCCTTGCGGAGC GAGGTGTGCGTCAGGGCGAAGGTATCCCTAACCATGACTTTCAAGAACTGGTACTTGAAATCCGAGTCGTCGCAGCC GCCGTGCTCCCAGAGCTCGAAATCGGTGCGCTTCTTCGAGAGGGGGTTAGGCAGAGCGAAAGTGACGTCATTGAAGA GAATCTTGCCTGCCCGCGGCATGAAATTGCGGGTGATGCGGAAAGGGCCCGGAACGGAGGCTCGGTTGTTGATGACC TGGGCGGCGAGGACGATCTCGTCGAAGCCGTTGATGTTGTGCCCGACGATGTAGAGTTCCATGAATCGCGGGCGGCC TTTGATGTGCGGCAGCTTTTTGAGTTCCTCGTAGGTGAGGTCCTCGGGGCATTGCAGGCCGTGCTGCTCGAGCGCCC ACTCCTGGAGATGTGGGTTGGCTTGCATGAATGAAGCCCAGAGCTCGCGGGCCATGAGGGTCTGGAGCTCGTCGCGA AAGAGGCGGAACTGCTGGCCCACGGCCATCTTTTCTGGGGTGACGCAGTAGAAGGTGAGGGGGTCCCGCTCCCAGCG ATCCCAGCGTAAGCGCACGGCGAGATCGCGAGCGAGGGCGACCAGCTCGGGGTCCCCGGAGAATTTCATGACCAGCA TGAAGGGGACGAGCTGCTTGCCGAAGGACCCCATCCAGGTGTAGGTTTCTACATCGTAGGTGACAAAGAGCCGCTCC GTGCGAGGATGAGAGCCGATTGGGAAGAACTGGATTTCCTGCCACCAGTTGGTCGAGTGGCTGTTGATGTGATGAAA GTAGAAATCCCGCCGGCGAACCGAGCACTCGTGCTGATGCTTGTAAAAGCGTCCGCAGTACTCGCAGCGCTGCACGG GCTGTACCTCATCCACGAGATACACAGCGCGTCCCTTGAGGAGGAACTTCAGGAGTGGCGGCCCTGGCTGGTGGTTT TCATGTTCGCCTGCGTGGGACTCACCCTGGGGCTCCTCGAGGACGGAGAGGCTGACGAGCCCGCGCGGGAGCCAGGT CCAGATCTCGGCGCGGCGGGGGCGGAGAGCGAAAACGAGGGCGCGCAGTTGGGAGCTGTCCATGGTGTCGCGGAGAT CCAGGTCCGGGGGCAGGGTTCTGAGGTTGACCTCGTAGAGGCGGGTGAGGGCGTGCTTGAGATGCAGATGGTACTTG ATCTCCACGGGTGAGTTGGTGGTCGTGTCCACGCATTGCATGAGCCCGTAGCTGCGCGGGGCCACGACCGTGCCGCG GTGCGCTTTTAGAAGCGGTGTCGCGGACGCGCTCCCGGCGGCAGCGGCGGTTCCGGCCCCGCGGGCAGTGGCGGTAG AGGCACGTCGGCGTGGCGCTCGGGCAGGTCCCGGTGCTGCGCCCTGAGAGCGCTGGCGTGCGCGACGACGCGGCGGT TGACATCCTGGATCTGCCGCCTTTGCGTGAAGACCACGGGCCCCGTGACTTTGAACCTGAAAGACAGTTCAACAGAA TCAATCTCGGCGTCATTGACGGCGGCCTGACGCAGGATCTCTTGCACGTCGCCCGAGTTGTCCTGGTAGGCGATCTC GGACATGAACTGCTCGATTTCCTCCTCCTGGAGATCGCCGCGGCCCGCGCGCTCTACGGTGGCGGCAAGGTCATTCG AGATGCGACCCATGAGCTGCGAGAAGGCGCCCAGGCCGCTCTCGTTCCAGACGCGGCTGTAAACCACGTCCCCGTCG GCGTCGCGCGCGCGCATGACCACCTGCGCGAGGTTGAGCTCCACGTGCCGCGCGAAGACGGCATAGTTGCGCAGGCG TTGGAAGAGGTAGTTGAGGGTGGTGGCGATGTGCTCGGTGACGAAGAAGTACATAATCCAGCGGCGCAGGGGCATTT CGCTGATGTCGCCAATGGCCTCCAGCCTTTCCATGGCCTCGTAGAAATCCACGGCGAAGTTGAAAAACTGGGCGTTG CGGGCCGAGACCGTGAGCTCGTCTTCCAGGAGCCTGATGAGTTCGGCGATGGTGGCGCGCACCTCGCGCTCGAAATC CCCGGGGGCCTCCTCCTCTTCCTCTTCTTCCATGACGACCTCTTCTTCTATTTCTTCCTCTGGGGGCGGTGGTGGTG GCGGGGCCCGACGACGACGGCGACGCACCGGGAGACGGTCGACGAAGCGCTCGATCATCTCCCCGCGGCGGCGACGC ATGGTTTCGGTGACGGCGCGACCCCGTTCGCGAGGACGCAGCGTGAAGACGCCGCCGGTCATCTCCCGGTAATGGGG TGGGTCCCCGTTGGGCAGCGATAGGGCGCTGACAATGCATCTTATCAATTGCGGTGTAGGGCACGTGAGCGCGTCGA GATCGACCGGATCGGAGAATCTTTCGAGGAAAGCGTCTAGCCAATCGCAGTCGCAAGGTAAGCTCAAACACGTAGCA GCCCTGTGGACGCTGTTAGAATTGCGGTTGCTGATGATGTAATTGAAGTAGGCGTTTTTGAGGCGGCGGATGGTGGC GAGGAGGACCAGGTCCTTGGGTCCCGCTTGCTGGATGCGGAGCCGCTCGGCCATGCCCCAGGCCTGGCCCTGACACC GGCTCAGGTTCTTGTAGTAGTCATGCATGAGCCTCTCGATGTCATCACTGGCGGAGGCGGAGTCTTCCATGCGGGTG ACCCCGACGCCCCTGAACGGCTGCACGAGCGCCAGGTCGGCGACGACGCGCTCGGCGAGGATGGCCTGTTGCACGCG GGTGAGGGTGTCCTGGAAGTCGTCCATGTCGACGAAGCGGTGGTAGGCCCCTGTGTTGATGGTGTAAGTGCAGTTGG CCATAAGCGACCAGTTGACGGTCTGCAGGCCGGGTTGCACGACCTCGGAGTACCTGAGCCGCGAGAAGGCGCGCGAG TCGAAGACATAGTCGTTGCAGGTGCGCACGAGGTACTGGTATCCGACTAGAAAGTGCGGCGGCGGCTGGCGGTAGAG CGGCCAGCGCTGGGTGGCCGGCGCGCCCGGGGCCAGGTCCTCAAGCATGAGTCGGTGGTAGCCGTAGAGGTAGCGGG ACATCCAGGTGATGCCGGCGGCGGTGGTGGAGGCGCGCGGGAACTCGCGGACGCGGTTCCAGATGTTGCGCAGGGGC AGGAAATAGTCCATGGTCGGCACGGTCTGGCCGGTGAGACGCGCGCAGTCATTGATGCTCTAGAGGCAAAAACGAAA GCGGTTGAGCGGGCTCTTCCTCCGTAGCCTGGCGGAACGCAAACGGGTTAGGCCGCGTGTGTACCCCGGTTCGAGTC CCCTCGAATCAGGCTGGAGCCGCGACTAACGTGGTATTGGCACTCCCGTCTCGACCCAAGCCCGATAGCCGCCAGGA TACGGCGGAGAGCCCTTTTTGTCGGCCGAGGGGAGTCGCTAGACTTGAAAGCGGCCGAAAACCCTGCCGGGTAGTGG CTCGCGCCCGTAGTCTGGAGAAGCATCGCCAGGGTTGAGTCGCGGCAGAACCCGGTTCAAGGACGGCCGCGGCGAGC GGGACTTGGTCACCCCGCCGATTTAAAGACCCACAGCCAGCCGACTTCTCCAGTTACGGGAGCGAGCCCCCTTTTTT CTTTTTGCCAGATGCATCCCGTCCTGCGCCAAATGCGTCCCACCCCCCCGGCGACCACCGCGACCGCGGCCGTAGCA GGCGCCGGCGCTAGCCAGCCACAGCCACAGACAGAGATGGACTTGGAAGAGGGCGAAGGGCTGGCGAGACTGGGGGC GCCGTCCCCGGAGCGACATCCCCGCGTGCAGCTGCAGAAGGACGTGCGCCCGGCGTACGTGCCTGCGCAGAACCTGT TCAGGGACCGCAGCGGGGAGGAGCCCGAGGAGATGCGCGACTGCCGGTTTCGGGGGGCAGGGAGCTGCGCGAGGGC CTGGACCGCCAGCGCGTGCTGCGCGACGAGGATTTCGAGCCGAACGAGCAGACGGGGATCAGCCCCGCGCGCGCGCA CGTGGCGGCGGCCAACCTGGTGACGGCCTACGAGCAGACGGTGAAGCAGGAGCGCAACTTCCAAAAGAGTTTCAACA ACCACGTGCGCACCCTGATCGCGCGCGAGGAGGTGGCCCTGGGCCTGATGCACCTGTGGGACCTGGCGGAGGCCATC GTGCAGAACCCGGACAGCAAGCCTCTGACGGCACAGCTGTTCCTGGTGGTGCAGCACAGCAGGGACAACGAGGCGTT CAGGGAGGCACTGCTGAACATCGCCGAGCCCGAGGGTCGCTGGCTGCTGGAGCTGATTAACATCTTGCAGAGCATCG TAGTGCAGGAGCGCAGCCTGAGCCTGGCCGAGAAGGTGGCGGCGATCAACTACTCGGTGCTGAGCCTGGGCAAGTTT TACGCGCGCAAGATTTACAAGACGCCGTATGTGCCCATAGACAAGGAGGTGAAGATAGACAGCTTTTACATGCGCAT GGCGCTCAAGGTGCTGACGCTGAGCGACGACCTGGGCGTGTACCGCAACGACCGCATCCACAAGGCCGTGAGCACAA GCCGGCGGCGCGAGCTGAGCGACCGCGAGCTGATGCTGAGTCTGCGCCGGGCGCTGGTAGGAGGCGCCACCGGCGGT GAGGAGTCCTACTTTGACATGGGGGGGGACCTGCATTGGCAGCCGAGCCGACGCGCCTTGGAGGCCGCCTACGGTCC AGAGGACTTGGATGAGGAAGAGGAAGAGGAGGAGGATGCACCCGTTGCGGGGTACTGACGCCTCCGTGATGTGTTTT TAGATGCAGCAAGCCCCGGACCCCGCCATAAGGGCGGCGCTGCAAAGCCAGCCGTCCGGTCTAGCATCGGACGACTG GGAGGCCGCGATGCAACGCATCATGGCCCTGACGACCCGCAACCCCGAGTCCTTTAGACAACAGCCGCAGGCCAACA GACTCTCGGCCATTCTGGAGGCGGTGGTTCCTTCTCGGACCAACCCCACGCACGAGAAGGTGCTGGCGATCGTGAAC GCGCTGGCGGAGAACAAGGCCATCCGTCCCGACGAGGCCGGGCTAGTGTACAACGCCCTGCTGGAGCGCGTGGGCCG CTACAACAGCACAAACGTGCAGTCCAACCTGGACCGGCTGGTGACGGACGTGCGCGAGGCCGTGGCGCAGCGCGAGC GGTTCAAGAACGAGGGCCTGGGTTCGCTGGTGGCGCTGAACGCCTTCCTGGCGACGCAGCCGGCGAACGTGCCGCGC GGGCAGGATGATTATACCAACTTTATAAGCGCGCTGCGGCTGATGGTGACCGAGGTGCCCCAGAGCGAGGTGTACCA GTCGGGCCCGGACTACTTTTTCCAGACGAGCAGACAGGGCCTGCAGACGGTGAACCTGAGTCAGGCTTTCAAGAACC TGCGCGGGCTGTGGGGCGTGCAGGCGCCCGTGGGCGACCGGTCGACGGTGAGCAGCTTGCTGACGCCCAACTCGCGG CTGCTGCTGCTGCTGATCGCGCCCTTCACCGACAGTGGCAGCGTGAACCGCAACTCGTACCTGGGTCACCTGCTGAC GCTGTACCGCGAGGCCATAGGCCAGGCGCAGGTGGATGAGCAGACCTTCCAGGAGATCACTAGCGTGAGCCGCGCGC TGGGTCAGAACGACACCGACAGTCTGAGGGCCACCCTGAACTTCTTGCTGACCAATAGACAGCAGAAGATCCCGGCG CAGTACGCGCTGTCGGCCGAGGAGGAGCGCATCCTGAGATATGTGCAGCAGAGCGTAGGGCTGTTCCTGATGCAGGA GGGGGCCACCCCCAGCGCCGCGCTGGACATGACCGCGCGCAACATGGAACCTAGCATGTACGCCGCCAACCGGCCGT TTATTAATAAGCTGATGGACTACCTGCACCGCGCGGCGTCCATGAACTCGGACTACTTTACCAATGCCATCTTGAAC CCGCACTGGCTCCCGCCGCCGGGGTTCTACACGGGCGAGTACGACATGCCTGACCCCAACGACGGGTTTTTGTGGGA CGACGTGGACAGCGCGGTGTTCTCACCGACCTTGCAAAAGCGCCAGGAGGCGGTGCGCACGCCCGCGAGCGAGGGCG CGGTGGGTCGGAGCCCCTTTCCTAGCTTAGGGAGTTTGCATAGCTTGCCGGGCTCGGTGAACAGCGGCAGGGTGAGC CGGCCGCGCTTGCTGGGCGAGGACGAGTACCTGAACGACTCGCTGCTGCAGCCGCCGCGGGTCAAGAACGCCATGGT CAATAACGGGATAGAGAGTCTGGTGGACAAACTGAACCGCTGGAAAACCTACGCTCAGGACCATAGGGAACCTGCGC CCGCGCCGCGGCGACAGCGTCACGACCGGCAGCGGGGCCTGGTGTGGGACGACGAGGACTCGGCCGACGATAGCAGC GTGTTGGACTTGGGCGGGAGCGGTGGGGCCAACCCGTTCGCGCATCTGCAGCCCAGACTGGGGCGACGGATGTTTTG AATGCAAAATAAAACTCACCAAGGCCATAGCGTGCGTTCTCTTCCTTGTTAGAGATGAGGCGCGCGGTGGTGTCTTC CTCTCCTCCTCCCTCGTACGAGAGCGTGATGGCGCAGGCGACCCTGGAGGTTCCGTTTGTGCCTCCGCGGTATATGG CTCCTACGGAGGGCAGAAACAGCATTCGTTACTCGGAGCTGGCTCCGCTGTACGACACCACTCGCGTGTATTTGGTG GACAACAAGTCGGCGGACATCGCTTCCCTGAACTACCAAAACGACCACAGCAACTTCCTGACCACGGTGGTGCAGAA CAACGATTTCACCCCTGCCGAGGCCAGCACGCAGACGATAAATTTTGACGAGCGGTCGCGGTGGGGCGGTGATCTGA AGACCATTCTGCACACCAACATGCCTAATGTGAACGAGTACATGTTCACCAGCAAGTTTAAGGCGCGGGTGATGGTG GCTAGAAAAAAGGCGGAAGGGGCTGATGCAAATGATAGGAGCAAGGATATCTTAGAGTATCAGTGGTTTGAGTTTAC CCTGCCCGAGGGCAACTTTTCCGAGACCATGACCATAGACCTAATGAACAACGCCATCTTGGAAAACTACTTGCAAG TGGGGCGGCAAAATGGCGTGCTGGAGAGTGATATCGGAGTCAAGTTTGACAGCAGAAATTTCAAGCTGGGCTGGGAC CCGGTGACCAAGCTGGTGATGCCAGGGGTCTACACCTACGAGGCCTTCCACCCGGACGTGGTGCTGCTGCCGGGCTG CGGGGTGGATTTCACCGAGAGCCGCCTGAGCAACCTCCTGGGCATTCGCAAGAAGCAACCTTTTCAAGAGGGCTTCA GAATCATGTATGAGGACCTAGTAGGGGGCAACATCCCCGCTCTCCTGAATGTCAAGGAGTATCTGAAGGATAAGGAA GAAGCTGGCAAAGCAGATGCAAATACTATTAAGGCTCAGAATGATGCCGTCCCAAGAGGAGATAACTATGCATCAGC GGCAGAAGCCAAAGCAGCAGGAAAAGAAATTGAGTTGAAGGCCATTTTGAAAGATGATTCAGACAGAAGCTACAATG TGATCGAGGGAACCACAGACACCCTGTACCGCAGTTGGTACCTGTCCTATACCTACGGGGATCCCGAGAAGGGGGTG CAGTCGTGGACGCTGCTCACCACCCCGGACGTCACCTGCGGCGCGGAGCAAGTCTACTGGTCGCTGCCGGACCTCAT GCAAGACCCCGTCACCTTCCGCTCTACCCAGCAAGTCAGCAACTACCCCGTGGTCGGCGCCGAGCTCATGCCCTTCC GCGCCAAGAGCTTTTACAACGACCTCGCCGTCTACTCCCAGCTCATCCGCAGCTACACCTCCCTCACCCACGTCTTC AACCGCTTCCCCGACAACCAGATCCTTTGCCGCCCGCCCGCGCCCACCATCACCACCGTCAGTGAAAACGTGCCTGC TCTCACAGATCACGGGACGCTACCGCTGCGCAGCAGTATCCGCGGAGTCCAGCGAGTGACCGTCACTGACGCCCGTC GCCGCACCTGTCCCTACGTCTACAAGGCCCTGGGCATAGTCGCGCCGCGCGTGCTTTCCAGTCGCACCTTCTAAAAA ATGTCTATTCTCATCTCGCCCAGCAATAACACCGGCTGGGGTCTTACTAGGCCCAGCACCATGTACGGAGGAGCCAA GAAACGCTCCCAGCAGCACCCCGTCCGCGTCCGCGGTCACTTCCGCGCTCCCTGGGGCGCTTACAAGCGGGGGCGGA CCTCTGCTCCTGCCGCCGTGCGCACCACCGTCGACGACGTCATCGACTCGGTGGTCGCCGATGCGCGCAACTACACC CCCGCCCCCTCGACCGTGGACGCGGTCATCGACAGCGTGGTGGCAGACGCGCGTGACTATGCCAGACGCAAGAGCCG GCGGCGACGGATCGCCAGGCGCCACCGGAGCACGCCCGCCATGCGCGCCGCCCGAGCTCTGCTGCGCCGCGCCAGAC GCACGGGCCGCCGGGCCATGATGCGAGCCGCGCGCCGCGCTGCCACTGCACCCACCCCCGCAGGCAGGACTCGCAGA CGAGCGGCCGCTGCCGCCGCCGCGGCCATCTCTAGCATGACCAGACCCAGGCGCGGAAACGTGTACTGGGTGCGCGA CTCCGTCACGGGCGTGCGCGTGCCCGTGCGCACCCGTCCTCCTCGTCCCTGATCTAATGCTTGTGTCCTCCCCCGCA AGCGACGATGTCAAAGCGCAAAATCAAGGAGGAGATGCTCCAGGTCGTCGCCCCGGAGATTTACGGACCACCCCAGG CGGACCAGAAACCCCGCAAAATCAAGCGGGTTAAAAAAAAGGATGAGGTGGACGAGGGGGCAGTAGAGTTTGTGCGC GAGTTCGCTCCGCGGCGGCGCGTAAATTGGAAGGGGCGCAGGGTGCAGCGTGTGTTGCGGCCCGGCACGGCGGTGGT GTTCACGCCCGGCGAGCGGTCCTCGGTCAGGAGCAAGCGTAGCTATGACGAGGTGTACGGCGACGACGACATCCTGG ACCAGGCGGCGGAGCGGGCGGGCGAGTTCGCCTACGGGAAGCGGTCGCGCGAAGAGGAGCTGATCTCGCTGCCGCTG GACGAAAGCAACCCCACGCCGAGCCTAAAGCCCGTGACCCTGCAGCAGGTGCTGCCCCAGGCAGTGCTGCTGCCGAG CCGCGGGGTCAAGCGCGAGGGCGAGAGCATGTACCCGACCATGCAGATCATGGTGCCCAAGCGCCGGCGCGTGGAGG ACGTGCTGGACACCGTAAAAATGGATGTGGAGCCCGAGGTCAAGGTGCGCCCCATCAAGCAGGTGGCGCCGGGCCTG GGCGTGCAAACCGTGGACATTCAGATCCCCACCGACATGGATGTCGACAAAAAACCCTCGACCAGCATCGAGGTGCA AACCGACCCCTGGCTCCCAGCCTCCACCGCTACCGCGTCCACTTCTACCGCCGCCACGGCTACCGAGCCTCCCAGGA GGCGAAGATGGGGCGCCGCCAGCCGGCTGATGCCCAACTACGTGTTGCATCCTTCCATCATCCCGACGCCAGGCTAC CGCGGCACCCGGTACTACGCCAGCCGCAGGCGCCCAGCCAGCAAACGCCGCCGCCGCACCGCCACCCGCCGCCGTCT GGCCCCCGCCCGCGTGCGCCGCGTGACCACGCGGCGGGGCCGCTCGCTCGTTCTGCCCACCGTGCGCTACCACCCCA GCATCCTTTAATCCGTGTGCTGTGATACTGTTGCAGAGAGATGGCTCTCACTTGCCGCCTGCGCATCCCCGTCCCGA ATTACCGAGGAAGATCCCGCCGCAGGAGAGGCATGGCAGGCAGTGGCCTGAACCGCCGCCGGCGGCGGGCCATGCGC AGGCGCCTGAGTGGCGGCTTTCTGCCCGCGCTCATCCCCATAATCGCCGCGGCCATCGGCACGATCCCGGGCATAGC TTCCGTTGCGCTGCAGGCGTCGCAGCGCCGTTGATGTGCGAATAAAGCCTCTTTAGACTCTGACACACCTGGTCCTG TATATTTTTAGAATGGAAGACATCAATTTTGCGTCCCTGGCTCCGCGGCACGGCACGCGGCCGTTCATGGGCACCTG GAACGAGATCGGCACCAGCCAGCTGAACGGGGGCGCCTTCAATTGGAGCAGTGTCTGGAGCGGGCTTAAAAATTTCG GCTCGACGCTCCGGACCTATGGGAACAAGGCCTGGAATAGTAGCACTGGGCAGTTGTTAAGGGAAAAGCTCAAAGAC CAGAACTTCCAGCAAAAGGTGGTGGACGGGCTGGCCTCGGGCATTAACGGGGTGGTGGACATCGCGAACCAGGCCGT GCAGCGCGAGATAAACAGCCGCCTGGACCCGCGGCCGCCCACGGTGGTGGAGATGGAAGATGCAACTCTTCCGCCGC CCAAGGGCGAGAAGCGACCGCGGCCCGACGCGGAGGAGACAATCCTGCAAGTGGACGAGCCGCCCTCGTACGAGGAG GCCGTCAAGGCCGGCATGCCCACCACGCGCATCATCGCGCCGCTGGCCACGGGTGTAATGAAACCCGCTACCCTTGA CCTGCCTCCACCACCCACGCCCGCTCCACCAAAAGCAGCTCCGGTTGTGCAGCCCCCTCCGGTGGCGACCGCCGTGC GCCGCGTCCCCGCCCGCCGCCAGGCCCAGAACTGGCAGAGCACGCTGCACAGTATCGTGGGCCTGGGAGTGAAAAGT CTGAAGCGCCGCCGATGCTATTGAGAGAGAGTAAAGAGGACACTAAAGGGAGAGCTTAACTTGTATGTGCCTTACCG CCAGAGAACGCGCGAAGATGGCCACCCCCTCGATGATGCCGCAGTGGGCGTACATGCACATCGCCGGGCAGGACGCC TCGGAGTACCTGAGCCCGGGTCTGGTGCAGTTTGCCCGCGCCACCGACACGTACTTCAGCCTGGGCAACAAGTTTAG GAACCCCACGGTGGCTCCCACCCACGATGTGACCACGGACCGGTCCCAGCGTCTGACGCTGCGCTTTGTGCCCGTGG ATCGCGAGGACACCACGTACTCGTACAAGGCGCGCTTCACTCTGGCCGTGGGCGACAACCGGGTGCTAGACATGGCC AGCACTTACTTTGACATCCGCGGCGTCCTGGACCGCGGCCCAAGCTTCAAACCCTACTCGGGCACGGCTTACAACAG CCTGGCCCCCAAGGGCGCCCCCAATCCCAGTCAGTGGACTACCAAAGAAAAGCAAAACGGAGGAACTGGAGCAGAAA AAGATGTTACAAAGACATTTGGACTTGCCGCCATGGGAGGCAGTAATATTTCTAAAGACGGTTTGCAGATTGGAACT GACAAAACAGCAAATGCTGAAAAACCAATCTATGCAGACAAAACTTTCCAGCCAGAACCTCAAGTTGGAGAAGAAAA CTGGCAGGATAATGATGAATATTATGGCGGCAGGGCTCTTAAAAAAGATACCAAAATGAAGCCATGCTATGGTTCAT TTGCTAAACCCACAAACAAGGAAGGTGGGCAGGCTAAATTGAAAGAAACACCCAATGGTACCGATCCTCAATACGAT GTGGACATGGCTTTCTTTGACTCAAGCACTATAAATATACCAGATGTGGTGTTGTACACTGAAAATGTAGATTTGGA AACTCCAGATACACATGTGGTGTACAAACCAGGCAAAGAGGATGACAGTTCTGAAGCTAATTTAACTCAGCAGTCCA TGCCTAACAGACCAAACTACATTGGCTTCAGAGACAACTTTGTGGGGCTATTGTACTACAACAGCACTGGCAACATG GGTGTGCTGGCTGGTCAGGCTTCTCAGTTGAATGCCGTGGTCGACTTGCAAGACAGAAACACCGAACTGTCTTACCA GCTCTTGCTAGATTCTCTTGGTGACAGAACCAGATATTTTAGTATGTGGAACTCTGCGGTGGACAGCTATGATCCCG ATGTCAGGATCATTGAGAACCACGGTGTGGAAGATGAACTTCCTAACTATTGCTTCCCCTTGGACGGTGTTCAAACT AATTCAGCCTATCAAGGTGTTAAACTAAAGCCTGATCAAACAGGAGGCGGAGTTAATGGAGATTGGGTAAAGGATGA TGACATTTCAGCCCATAATCAAATTGGAAAGGGCAACATCTTTGCCATGGAGATCAACCTCCAGGCCAACCTGTGGA AGAGTTTTCTGTACTCGAACGTGGCCCTGTACCTGCCCGACTCCTACAAGTACACGCCGGCCAACGTCACGCTGCCC GCCAACACCAACACCTATGAGTACATGAACGGCCGCGTGGTAGCCCCCTCGCTGGTGGACGCCTACATTAACATCGG CGCCCGCTGGTCGCTGGACCCCATGGACAACGTCAACCCCTTTAACCACCACCGCAATGCGGGCCTGCGCTACCGCT CCATGCTTTTGGGCAATGGCCGCTACGTGCCCTTCCACATCCAAGTGCCCCAAAAGTTCTTTGCCATCAAGAACCTG CTCCTGCTCCCCGGCTCCTACACCTACGAGTGGAACTTCCGCAAGGATGTCAACATGATCCTGCAGAGTTCCCTCGG AAACGACCTGCGCGTCGACGGCGCCTCCGTCCGCTTCGACAGCGTCAACCTCTACGCCACCTTCTTCCCCATGGCGC ACAACACCGCCTCCACCCTGGAAGCCATGCTGCGCAACGACACCAACGACCAGTCCTTCAACGACTACCTCTCGGCC GCCAACATGCTCTACCCCATCCCGGCCAAGGCCACCAACGTGCCCATTTCCATCCCCTCGCGCAACTGGGCCGCCTT CCGCGGCTGGAGTTTCACCCGGCTCAAGACCAAGGAAACTCCCTCCCTTGGCTCGGGTTTTGACCCCTACTTTGTCT ACTCGGGCTCCATCCCCTACCTCGACGGGACCTTCTACCTCAACCACACCTTCAAGAAGGTTTCCATCATGTTCGAC TCCTCGGTCAGCTGGCCCGGCAACGACCGGCTGCTTACGCCGAACGAGTTCGAGATCAAGCGCAGCGTCGACGGGGA GGGCTACAACGTGGCCCAATGCAACATGACCAAGGACTGGTTCCTCGTCCAGATGCTCTCCCACTACAACATCGGCT ACCAGGGCTTCCATGTGCCCGAGGGCTACAAGGACCGCATGTACTCCTTCTTCCGCAACTTCCAGCCCATGAGCAGG CAGGTGGTCGATGAGATCAACTACAAGGACTACAAGGCAGTCACCCTGCCCTTCCAGCACAACAACTCTGGCTTCAC CGGCTACCTGGCACCCACCATGCGTCAGGGGCAGCCCTACCCCGCCAACTTCCCCTACCCGCTCATCGGCTCCACCG CAGTGCCATCCGTCACCCAGAAAAAGTTCCTCTGCGACAGGGTCATGTGGCGCATCCCCTTCTCCAGCAACTTCATG TCCATGGGCGCCCTCACCGACCTGGGTCAGAACATGCTCTACGCCAACTCGGCCCACGCGCTCGACATGACCTTCGA GGTGGACCCCATGGATGAGCCCACCCTCCTCTATCTTCTCTTCGAAGTTTTCGACGTGGTCAGAGTGCACCAGCCGC ACCGCGGCGTCATCGAGGCCGTCTACCTGCGCACGCCCTTCTCCGCCGGCAACGCCACCACCTAAGCATGAGCGGCT CCAGCGAACGAGAGCTCGCGGCCATCGTGCGCGACCTGGGCTGCGGGCCCTACTTTTTGGGCACCCACGACAAGCGC TTCCCGGGCTTCCTCGCCGGCGACAAGCTGGCCTGCGCCATCGTCAACACGGCCGGCCGCGAGACCGGGGGCGTGCA CTGGCTCGCCTTTGGCTGGAACCCGCGCTCGCGCACCTGCTACATGTTCGACCCCTTCGGGTTCTCGGACCGCCGGC TCAAGCAGATTTACAGCTTCGAGTACGAGGCCATGCTGCGCCGAAGCGCCCTGGCCTCCTCGCCCGATCGCTGTCTT AGCCTCGAACAGTCCACCCAGACCGTGCAGGGGCCCGACTCCGCCGCCTGCGGACTCTTCTGTTGCATGTTCTTGCA TGCCTTCGTGCACTGGCCCGACCGACCCATGGACGGGAACCCCACCATGAACTTGCTGACGGGGGTGCCCAACGGCA TGCTACAATCGCCACAGGTGCTGCCCACCCTCAGGCGCAACCAGGAGGAGCTCTACCGCTTCCTCGCGCGCCACTCC CCCTACTTTCGCTCCCACCGCGCCGCCATCGAACACGCCACCGCTTTTGATAAAATGAAACAACTGCGTGTATGACT CAAATAAACAGCACTTTTATTTTACACATGCGCTGGAGTATATGCAAGTTATTTAAAAGTCGAAGGGGTTCTCGCGC TCGTCGTTGTGCGCCGCGCTGGGGAGGGCCACGTTGCGGTACTGGAACTTGGGCTGCCACTTGAACTCGGGGATCAC CAGTTTGGGCACTGGAGTCTCGGGGAAGGTCTCGCTCCACATGCGCCGGCTCATTTGCAGGGCGCCCAGCATGTCAG GGCCGGAGATCTTGAAATCGCAGTTGGGACCGGTGCTCTGCGCGCGCGAGTTGCGGTACACGGGGTTGCAGCACTGG AACACCATCAGACTGGGGTACTTCACACTGGCAAGCACGCTCTTGTCGCTAATCTGATCCTTGTCCAGGTCCTCGGC GTTGCTCAGGCCGAACGGGGTCATCTTGCACAGCTGGCGGCCCAGGAAGGGCACGCTCTGAGGCTTGTGGTTACACT CGCAGTGCACGGGCATCAGCATCATCCCCGCGCCGCGCTGCATATTCGGGTAGAGGGCCTTGACGAAGGCCGCGATC TGCTTGAAAGCTTGCTGGGCCTTGGCCCCCTCGCTAAAAAACAGGCCGCAGCTCTTCCCGCTGAACTGGTTATTCCC GCACCCGGCATCATGCACGCAGCAGCGCGCGTCATGGCTGGTCAGTTGCACCACGCTCCGTCCCCAGCGGTTCTGGG TCACCTTAGCCTTGCTGGGCTGCTCCTTCAGCGCGCGCTGTCCGTTCTCGCTGGTCACATCCATCTCCACCACGTGG TCCTTGTGAATCATCACCGTTCCATGCAGACACTTGAGCTGACCTTCCACCTCGGTGCAGCCGTGATCCCACAGGAC GCAGCCGGTGCACTCCCAATTCTTGTGCGCGATCCCGCTGTGGCTGAAAATGTAACCTTGCAACAGGCGACCCATAA TGGTGCTAAATGCTTTCTGGGTGGTGAATGTCAGTTGCATCCCGCGGGCCTCCTCGTTCATCCAGGTCTGGCACATC TTCTGGAAGATCTCGGTCTGCTCCGGCATGAGCTTGTAAGCATCGCGCAAGCCGCTGTCGACGCGGTAGCGTTCCAT CAGCACGTTCATGGTATCCATGCCCTTCTCCCATGACGAGACCAGAGGCAGACTCAGGGGGTTGCGCACGTTCAGGA CACCAGGGGTCGCGGGCTCGACGATGCGTTTTCCGTCCTTGCCTTCCTTCAACAGAACCGGAGGCTGGCTGAATCCC ACTCCCACGATCACGGCGTCTTCCTGGGGCATCTCTTCGTCGGGGTCTACCTTGGTCACATGCTTGGTCTTTCTGGC TTGCTTCTTTTTTGGAGGGCTGTCCACGGGGACCACGTCCTCCTCGGAAGACCCGGAGCCCACCCGCTGATACTTTC GGCGCTTGGTGGGCAGAGGAGGTGGCGGCGGCGAGGGGCTCCTCTCCTGCTCCGGCGGATAGCGCGCCGACCCGTGG CCCCGGGGCGGAGTGGCCTCTCGCTCCATGAACCGGCGCACGTCCTGACTGCCGCCGGCCATTGTTTCCTAGGGGAA GATGGAGGAGCAGCCGCGTAAGCAGGAGCAGGAGGAGGACTTAACCACCCACGAGCAACCCAAAATCGAGCAGGACC TGGGCTTCGAAGAGCCGGCTCGTCTAAAACCCCCACAGGATGAACAGGAGCACGAGCAAGACGCAGGCCAGGAGGAG ACCGACGCTGGGCTCGAGCATGGCTACCTGGGAGGAGAGGAGGATGTGCTGCTAAAACACCTGCAGCGCCAGTCCCT CATCCTCCGGGACGCCCTGGCCGACCGGAGCGAAACCCCCCTCAGCGTCGAGGAGCTGTGTCGGGCCTACGAGCTCA ACCTCTTCTCGCCGCGCGTGCCCCCCAAACGCCAGCCCAACGGCACCTGCGAGCCCAACCCGCGTCTCAACTTCTAT CCCGTCTTTGCGGTCCCCGAGGCCCTTGCCACCTATCACATCTTTTTCAAGAACCAAAAGATCCCCATCTCCTGTCG CGCCAATCGCACTCGCGCCGACGCGCTCCTCGCTCTGGGGCCCGGCGCGCGCATACCTGATATCGCTTCCCTGGAAG AGGTGCCCAAGATCTTCGAAGGGCTCGGTCGGGACGAGACGCGCGCGGCAAACGCTCTGAAAGAAACAGCAGAGGAA GAGGGTTACACTAGCGCCCTGGTAGAGTTGGAAGGCGACAACGCCAGGCTGGCCGTGCTTAAGCGCAGCGTCGAGCT CACCCATTTCGCCTACCCCGCCGTCAACCTCCCGCCCAAGGTCATGCGTCGCATCATGGATCAGCTCATCATGCCCC ACATCGAGGCCCTTGATGAAAGTCAGGAACAGCGCCCCGAGAACGCCCAGCCCGTGGTCAGCGACGAGATGCTCGCG CGCTGGCTCGGGACCCGCGACCCCCAGGCCCTGGAGCAGCGGCGCAAGCTCATGCTGGCCGTGGTCCTGGTCACCCT TGAGCTCGAATGCATGCGCCGCTTTTTTACCGACCCCGAGACCCTGCGCAAGGTCGAGGAGACCCTGCACTACACTT TCAGACACGGTTTCGTCAGGCAGGCCTGCAAGATCTCCAACGTGGAGCTGACCAACCTGGTCTCCTGCCTGGGGATC CTACACGAGAACCGCTTGGGACAGACCGTGCTCCACTCTACCCTGAAGGGCGAGGCGCGGCGGGACTACATCCGCGA CTGCGTCTTTCTCTTTCTCTGCCACACATGGCAAGCGGCCATGGGCGTGTGGCAGCAGTGTCTCGAGGACGAGAACC TGAAGGAGCTGGACAAGCTTCTTGCTAGAAACCTTAAAAAGCTGTGGACGGGCTTCGACGAGCGCACCGTCGCCTCG GACCTGGCCGAGATCGTCTTCCCCGAGCGCCTGAGGCAGACGCTGAAAGGAGGGCTGCCCGACTTCATGAGCCAGAG CATGTTGCAAAACTACCGCACTTTCATTCTCGAGCGATCTGGGATGCTGCCCGCCACCTGCAACGCCTTCCCCTCCG ACTTTGTCCCGCTGAGCTACCGCGAGTGTCCCCCGCCGCTGTGGAGCCACTGCTACCTCTTGCAGCTGGCCAACTAC ATTGCCCACCACTCGGATGTGATCGAGGACGTGAGCGGCGAGGGGCTGCTCGAGTGCCACTGTCGCTGCAACCTATG CTCCCCGCACCGCTCCCTGGTCTGCAACCCCCAGCTACTGAGCGAGACCCAGGTCATCGGTACCTTTGAGCTGCAAG GTCCGCAGGAGTCCACCGCTCCGCTGAAACTCACGCCGGGGTTGTGGACTTCCGCGTACCTGCGCAAATTTGTACCC GAGGACTACTACGCCCATGAGATAAAGTTCTTCGAGGACCAATCGCGTCCGCAGCACGCGGATCTCACGGCCTGCGT CATCACCCAGGGCGCGATCCTCGCCCAATTGCACGCCATCCAAAAATCCCGCCAAGAGTTTCTTCTGAAAAAGGGTA GAGGGGTCTACCTGGACCCCCAGACGGGCGAGGTGCTCAACCCGGGTCTCCCCCAGCATGCCGAGGAAGAAGCAGGA GCCGCTAGTGGAGGAGATGGAAGAAGAATGGGACAGCCAGGCAGAGGAGGACGAATGGGAGGAGGAGACAGAGGAGG AAGACTTGGAAGAGGTGGAAGAGGAGCAGGCAACAGAGCAGCCCGTCGCCGCACCATCCGCGCCGGCAGCCCCTCCG GTCACGGATACAACCTCCGCAGCTCCGGCCAAGCCTCCTCGTAGATGGGATCGAGTGAAGGGTGACGGTAAGCACGA GCGACAGGGCTACCGATCATGGAGGGCCCACAAAGCCGCGATCATCGCCTGCTTGCAAGACTGCGGGGGGAACATCG CTTTCGCCCGCCGCTACCTGCTCTTCCACCGCGGGGTGAACATCCCCCGCAACGTGTTGCATTACTACCGTCACCTT CACAGCTAAGAAAAAGCAAGTCAAAGGAGTCGCCGGAGGAGGAGGCCTGAGGATCGCGGCGAACGAGCCCTTGACCA CCAGGGAGCTGAGGAACCGGATCTTCCCCACTCTTTATGCCATTTTTCAGCAAAGTCGAGGTCAGCAGCAAGAGCTC AAAGTAAAAAACCGGTCTCTGCGCTCGCTCACCCGCAGTTGCTTGTACCACAAAAACGAAGATCAGCTGCAGCGCAC TCTCGAAGACGCCGAGGCTCTGTTCCACAAGTACTGCGCGCTGACTCTTAAAGACTAAGGCGCGCCCACCCGGAAAA AAGGCGGGAATTACCTCATCGCCACCATGAGCAAGGAGATTCCCACCCCTTACATGTGGAGCTATCAGCCCCAGATG GGCCTGGCCGCGGGCGCCTCCCAGGACTACTCCACCCGCATGAACTGGCTTAGTGCCGGCCCCTCGATGATCTCACG GGTCAACGGGGTCCGTAACCATCGAAACCAGATATTGTTGCAGCAGGCGGCGGTCACCTCCACGCCCAGGGCAAAGC TCAACCCGCGTAATTGGCCCTCCACCCTGGTGTATCAGGAAATCCCCGGGCCGACTACCGTACTACTTCCGCGTGAC GCACTGGCCGAAGTCCGCATGACTAACTCAGGTGTCCAGCTGGCCGGCGGCGCTTCCCGGTGCCCGCTCCGCCCACA ATCGGGTATAAAAACCCTGGTGATCCGAGGCAGAGGCACACAGCTCAACGACGAGTTGGTGAGCTCTTCAATCGGTC TGCGACCGGACGGAGTGTTCCAACTAGCCGGAGCCGGGAGATCGTCCTTCACTCCCAACCAGGCCTACCTGACCTTG CAGAGCAGCTCTTCGGAGCCTCGCTCGGGAGGCATCGGAACCCTCCAGTTCGTGGAGGAGTTTGTGCCCTCGGTCTA CTTCAACCCCTTCTCGGGCTCGCCAGGCCTCTACCCGGACGAGTTTATACCGAACTTCGACGCAGTGAGAGAAGCGG TGGACGGCTACGACTGAATGTCCTATGGTGACTCGGCTGAGCTCGCTCGGTTGAGGCATCTGGACCACTGCCGCCGC CTGCGCTGCTTTGCCCGGGAGAGCTACGGCCTCATCTACTTTGAGCTGCCCGAGGAGCACCCCAACGGCCCTGCACA CGGAGTGCGGATCACCGTAGAGGGCACCACCGAGTCTCACCTGGTCAGGTTCTTCACCCAGCAACCCTTCCTGGTCG AGCGGGACCGGGGCGCCACCACCTACACCGTCTACTGCATTTGTCCTACCCCGAAGTTGCATGAGAATTTTTGTTGT ACTCTTTGTGGTGAGTTTAATAAAAGCTAAACTCTTGCAATACTCTGGACCTTGTCGTCATCAACTCAACGAGACCG TCTACCTCACCAACCAGACTGAGGTAAAACTTACCTGCAGACCACACAAGACCTATATCATCTGGTTCTTCGAGAAC ACCTCATTTGCAGTCTCCAACACTCACTGCAACGACGGTGTTGAACTTCCCAACAACCTTTCCAGTGGACTGAGTTA CAATACACGTAGAGCTAAGCTCATCCTCTACAATCCTTTTGTAGAGGGAACCTACCAGTGCCAGAGCGGACCTTGCT TCCACAGTTTTACTTTGGTGAACGTTACCGGCAGCAGCACAGCCGCTCCAGAAACTAACCTTCCTTCTGATACTATC AAACCTTGTTTCGGAGGTGAGCTAAGGCTTCCCCCTTCTCAGGAGGGGGTTAGCCCATACGAAGTGGTCGGGTATTT GATTTTAGGGGTGGTCCTGGGTGGGTGCATAGCGGTGCTAGCTCAGCTGCCTTGCTGGGTGGAAATCAAAATCTTTA TATGCTGGGTAAGACATTGTGGGGAGGAACTATGAAGGGGCTCTTGCTGATTATCCTTTCCCTGGTGGGGGGTGTGC TGTCATGCCACGAACAGCCACGATGTAACATCACCACAGGCAATGAGAGGAACGACTGCTCTGTAGTTATCAAATGC GAGCACCATTGTCCTCTCAACATTACATTCAAAAATAAGACCATGGGAAATGTATGGGTGGGATTCTGGCAACCAGG AGATGAGCAGAACTACACGGTCACTGTCCATGGTAGCAATGGCAATCACACTTTCGGTTTCAAATTCATTTTTGAAG TCATGTGTGATATCACACTACATGTGGCTAGACTTCATGGCTTGTGGCCCCCTACCAAGGATAACATGGTGGGTTTT TCTTTGGCTTTTGTGATCATGGCCTGCTTGATGTCAGGTCTGCTGGTAGGGGCTCTAGTGTGGTTTCTGAAACGCAA GCCCAGGTATGGAAATGAAGAGAAGGAAAAATTGCTATAAATTCTTTTTCTTTTTCGCAGAACCATGAATACAGTGA TCCGTATCGTGCTGCTCTCTCTTCTTGTAGCTTTTAGTCAGGCAGGATTTCATACTATCAATGCTACATGGTGGGCT AATATAACTTTAGTGGGACCCCCAGACACACCAGTCACTTGGTATGATACTCAAGGATTGTGGTTTTGCAATGGCAG TAGAGTTAAGAATCCTCAAATCAGACATACATGTAATGATCAAAACCTTACTTTGATCCATGTGAACAAAACTTATG AAAGAACATACATGGGTTATAATAGACAAGGGACTAAAAAAGAAGACTACAAAGTTGTAGTTATACCACCTCCTCCT GCTACTGTAAAACCACAGCCAGAGCCAGAGTATGTGTTTGTTTATATGGGAGAGAACAAAACTCTAGAAGGTCCTCC GGGAACTCCAGTCACATGGTTTAATCAGGATGGAAAGAAATTTTGTGAAGGAGAAAAAGTTCTTCATCCAGAATTTA ACCACACCTGTGACAAACAAAACCTTATACTACTGTTTGTGAATTTTACACATGATGGAGCTTACCTTGGGTACAAT CATCAAGGAACCCAGAGAACACACTATGAAGTTACAGTATTAGATCTTTTTCCAGATTCTGGCCAAATGAAAATTGA AAATCATAGTGAGGAAACAGAGCAAAAAAATGATGAACATCATAACTGGCAGAAACAGGGTGGGCAAAAACAGGGTG GGCAAAAAACAAATCAAACAAAAGTTAATGACAGGAGAAAAACAGCGCAAAAAAGACCATCAAAGCTAAAGCCGGCA ACTATTGAGGCAATGCTGGTTACAGTGACTGCCGGGTCTAACTTAACTTTGGTTGGACCTAAAGCAGAAGGAAAAGT TACTTGGTTTGATGGAGATTTAAAAAGACCATGTGAGCCTAATTACAGACTAAGACACGAATGTAATAATCAAAACT TAACTCTGATTAATGTAACTAAAGATTATGAGGGAACTTACTATGGTACAAATGACAAAGATGAGGGCAAAAGGTAC AGAGTGAAAGTAAATACTACAAATTCTCAATCTGTGAAAATTCAGCCATATACCAGACAAACTACTCCTGATCAAGA GCACAAATTTGAATTACAGTTCGAAACTAATGGAAATTATGATTCAAAAATTCCCTCAACCACTGTGGCAATCGTGG TGGGTGTGATTGCGGGCTTCATAACTCTGATCATTGTCTTCATATGCTACATCTGCTGCCGCAAGCGTCCCAGGGCA TACAATCATATGGTAGACCCACTACTCAGCTTCTCTTACTAAGACTCAGTCACTTTCATTTCAGAACCATGAAGGCT TTCACAGCTTGCGTTCTGATTAGCCTAGTCACACTTAGTGTAGCTATTAAAAATCAATATCATGTTCATAATGTTAC CAGAGATGGATATATCACATTAAATGTAACAATTGATAATACTACCTGGACAAGATATCATTTAAATAAGTGGCATC AAATTTGTACGTGGTCAGACCCATCATACAAATGTCACAGCAATGGCAGCATTACCATTCATGCTTTCAATATTACT TCTGGCCAGTACAAAGCTGAAAGTTTTACTAACTGGTTTAGATATTACGGTAATCATAAACATGAAATTCATATTTT TAACATAACTGTAATTGAGCATCCTACAACAAAAGCACCCACCACTGCTAATACAGCTACATCAATTAAATCAACAA CCACACAGCCTACTACTAGGGAGACAACTCAACCTACCACCACAGTCAGTACAACTACTGAGACCACTACTCAAACT ACACAGCTAGACACAACAGTGCAGAATAGCACTGTGTTGGTTAGGTATCTGTTGAGGGAGGAAAGTACTACTGAACA GACAGAGGCTACCTCAAGTGCCTTTAGCAGCACTGCAAATTTAACTTCGCTTGCTTGGACTAATGAAACCGGAGTAT CATTGATGAATCATCAGCCTTTCTCAGGTTTGGATATTCAAATTACTTTTCTGGTTGTTTGTGGGATCTTTATTCTT GTGGTTCTTCTGTACTTTGTCTGCTGCAAAGCCAGAGAGAAATCTAGGAGGCCCATCTACAGGCCAGTAATCGGGGA ACCTCAGCCACTCCAAGTGGAAGGGGGTCTAAGGAATCTTCTTTTCTCTTTTTCAGTATGGTGATCAGCCATGATTC CTAGGTTCTTCCTATTTAACATCCTCTTCTGTCTCTTCAACATCTGCGCTGCCTTTGCAGCCGTCTCGCACGCCTCG CCCGACTGTCTCGGGCCCTTCCCAACCTACCTCCTCTTTGCCCTGCTCACCTGCACCTGCGTCTGCAGCATTGTCTG CCTGGTCATCACCTTCCTGCAGCTTATCGACTGGTGCTGTGCGCGCTACAATTATCTCCATCACAGTCCCGAATACA GGGACAAGAACGTAGCCAGAATCTTAAGGCTCATCTGACCATGCAGACTCTGCTCATGCTGCTATCCCTCCTATCCC CTGCCCTAGCCACTTATGCTGATTACTCTAAATGCAAATTCGCAGACATATGGAATTTCTTAGATTGCTATCAGGAA AAAATTGATATGCCCTCCTATTACTTGGTGATTGTGGGAATAGTCATGGTCTGCTCCTGCACTTTCTTTGCCATCAT GATTTACCCCTGTTTTGATCTCGGCTGGAACTCTGTTGAAGCATTCACATACACACTAGAAAGCAGTTCACTAGCCT CCACGCCACCACCCACACCGCCTCCTCGCAGAAATCAGTTCCCCCTGATACAGTACTTAGAAGAGCCCCCTCCCCGA CCCCCTTCCACTGTTAGCTACTTTCACATAACCGGCGGCGATGACTGACCACCACCTGGACCTCGAGATGGACGGCC AGGCCTCCGAGCAGCGCATCCTGCAACTGCGCGTCCGTCAGCAGCAGGAGCGGGCCGCCAAGGAGCTCCTTGATGCC ATCAACATCCACCAGTGCAAGAAGGGCATCTTCTGCCTGGTCAAACAGGCAAAGATCACCTACGAGCTCGTGTCCAA CGGCAAACAGCATCGCCTTACCTATGAGATGCCCCAGCAGAAGCAGAAGTTCACCTGCATGGTGGGCGTCAACCCCA TAGTCATCACCCAGCAGTCGGGCGAGACCAACGGCTGCATCCACTGCTCCTGCGAAAGCCCCGAGTGCATCTACTCC CTTCTCAAGACCCTTTGCGGACTCCGCGACCTCCTCCCCATGAACTGATGTTGATTAAAAGCCCAGAAACCAATCAG ACCCTTCCTCATTTCCCCATCCCAATACTCATAAGAATAAATCATTGGAATTAATCATTCAATAAAGATCACTTACT TGAAATCTGAAAGTATGTCTCTGGTGTAGTTGCTCAGCAACACCTCGGTACCCTCCTCCCAGCTCTGGTACTCCAGT CCCCGGCGGGCGGCGAACTTCCTCCACACCTTGAAAGGGATGTCAAATTCCTGGTCCACAATTTTCATTGTCTTCCC TCTTAGATGTCAAAGAGGCTCCGGGTGGAAGATGACTTCAACCCCGTCTACCCCTATGGCTACGCGCGGAATCAGAA TATCCCCTTCCTCACTCCCCCCTTTGTCTCCTCCGATGGATTCAAAAACTTCCCCCCTGGGGTACTGTCACTCAAAC TGGCTGATCCAATCACCATTACCAATGGGGATGTATCCCTCAAGGTGGGAGGTGGTCTCACTTTGCAAGATGGAAGC CTAACTGTAAACCCTAAGGCTCCACTGCAAGTTAATACTGATAAAAAACTTGAGCTTGCATATGATAATCCATTTGA AAGTAGTGCTAATAAACTTAGTTTAAAAGTAGGACATGGATTAAAAGTATTAGATGAAAAAAGTGCTGCGGGGTTAA AAGATTTAATTGGCAAACTTGTGGTTTTAACAGGAAAAGGAATAGGCACTGAAAATTTAGAAAATACAGATGGTAGC AGCAGAGGAATTGGTATAAATGTAAGAGCAAGAGAAGGGTTGACATTTGACAATGATGGATACTTGGTAGCATGGAA CCCAAAGTATGACACGCGCACACTTTGGACAACACCAGACACATCTCCAAACTGCACAATTGCTCAAGATAAGGACT CTAAACTCACTTTGGTACTTACAAAGTGTGGAAGTCAAATATTAGCTAATGTGTCTTTGATTGTGGTCGCAGGAAAG TACCACATCATAAATAATAAGACAAATCCAAAAATAAAAAGTTTTACTATTAAACTGCTATTTAATAAGAACGGAGT GCTTTTAGACAACTCAAATCTTGGAAAAGCTTATTGGAACTTTAGAAGTGGAAATTCCAATGTTTCGACAGCTTATG AAAAAGCAATTGGTTTTATGCCTAATTTGGTAGCGTATCCAAAACCCAGTAATTCTAAAAAATATGCAAGAGACATA GTTTATGGAACTATATATCTTGGTGGAAAACCTGATCAGCCAGCAGTCATTAAAACTACCTTTAACCAAGAAACTGG ATGTGAATACTCTATCACATTTAACTTTAGTTGGTCCAAAACCTATGAAAATGTTGAATTTGAAACCACCTCTTTTA CCTTCTCCTATATTGCCCAAGAATGAAAGACCAATAAACGTGTTTTTCATTTGAAATTTTCATGTATCTTTATTGAT TTTTACACCAGCACGAGTAGACAGTCTCCCACCACCAGCCCATTTTACAGTGTACACGGTTCTCTCAGCACGGGTAG CCTTAAATAGGGAAATATTCTCATTAGTGCGGGAATTGGACTTGGGGTCTATAATCCACACAGTTTCCTGGCGAGCC AAACGGGGGTCGGTGATTGAAATAAAGCCGTCCTCTGAAAAGTCATCCAAGCGGGCCTCACAGTCCAAGGTCACAGT CTGGTGGAACGAGAAGAACGCACAGATTCATACTCGGAAAACAGGATGGGTCTGTGCCTCTCCATCAGCGCCCTCAG CAGTCTCTGCCGCCGGGGCTCGGTGCGGCTGCTGCAAATGGGATCGGGATCACAAGTCTCTCTGACTATGATCCCAA CAGCCTTCAGCATCAGTCTCCTGGTGCGACGGGCACAGCACCGCATCCTGATCTCTGCCATGTTCTCACAGTAAGTG CAGCACATAATCACCATGTTATTCAGCAGCCCATAATTCAGGGCGCTCCAGCCAAAGCTCATGTTGGGAATGATGGA ACCCACGTGACCATCGTACCAGATGCGACAGTATATCAGGTGCCTGCCCCTCATGAACACACTGCCCATGTACATGA TCTCTTTGGGCATGTTTCTGTTTACAATCTGGCGGTACCAGGGGAAGCGCTGGTTGAACATGCACCCGTAAATGACT CTCCTGAACCACACGGCCAGCAGGGTGCCTCCCGCCCGACACTGCAGGGAGCCAGGGGATGAACAGTGGCAATGCAG GATCCAGCGCTCGTACCCGCTCACCATTTGAGCTCTTACCAAGTCCAGGGTAGCGGGGCACAGGCACACTGACATAC ATCTTTTTAAAATTTTTATTTCCTCTGTGGTGAGGATCATATCCCAGGGGACTGGAAACTCTTGGAGCAGGGTAAAG CCAGCAGCACATGGTAATCCACGGACAGAACTTACATTATGATAATCTGCATGATCACAATCGGGCAACAGGGGATG TTGTTCAGTCAGTGAAGCCCTGGTTTCCTCATCAGATCGTGGTAAACGGGCCCTGCGATATGGATGATGGCGGAGCG AGCTGGATTGAATCTCGGTTTGCATTGTAGTGGATTCTCTTGCGTACCTTGTCGTACTTCTGCCAGCAGAAATGGGC CCTTGAACAGCATATACCCCTCCTACGGCCGTCCTTTCGCTGCTGCCGCTCAGTCATCCAACTAAAGTACATCCATT CTCGAAGATTCTGGAGAAGTTCCTCTGCATCTGATAAAATAAAAAACCCGTCCATGCGAATTCCCCTCATCACATCA GCCAGGACTCTGTAGGCCATCCCCATCCAGTTAATGCTGCCTTGTCTATCATTCAGAGGGGGCGGTGGCAGGACTGG AAGAACCATTTTTATTCCAAACGGTCTCGAAGGACGATAAAGTGCAAGTCACGCAGGTGACAGCGTTCCCCTCCGCT GTGCTGGTGGAAACAGACAGCCAGGTCAAAACCCACTCTATTTTCAAGGTGCTCGACCGTGGCTTCGAGCAGTGGCT CTACGCGCACATCCAGCATAAGAATCACATTAAAGGCTGGCCCTCCATCGATTTCATCAATCATCAGGTTACATTCC TGCACCATCCCCAGGTAATTCTCATTTTTCCAGCCTTGGATTATCTCTACAAATTGTTGGTGTAAGTCCACTCCGCA CATGTGGAAAAGCTCCCACAGTGCCCCCTCCACTTTCATAATCAGGCAGACCTTCATAATAGAAACAGATCCTGCTG CTCCACCACCTGCAGCGTGTTCAAAACAACAAGATTCAATAAGGTTCTGCCCTCCGCCCTGAGCTCGCGCCTCAATG TCAGCTGCAAAAAGTCACTTAAGTCCTGGGCCACTACAGCTGACAATTCAGAGCCAGGGCTAAGCGTGGGACTGGCA AGCGTAAGGGAAAACTTTAATGCTCCAAAGCTAGCACCCAAAAACTGCATGCTGGAATAAGCTCTCTTTGTGTCTCC GGTGATGCCTTCCAAAATGTGAGTGATAAAGCGTGGTAGTTTTTCTTTAATCATTTGCGTAATAGAAAAGTCCTCTA AATAAGTCACTAGGACCCCAGGGACCACAATGTGGTAGCTTACACCGCGTCGCTGAAGCATGGTTAGTAGAGATGAG AGTCTGAAAAACAGAAAGCATGCACTAAACTAAGGTGGCTATTTTCACTGAAGGAAAAATCACTCTCTCCAGCAGCA GGGTACCCACTGGGTGGCCCTTGCGGACATACAAAAATCGGTCCGTGTGATTAAAAAGCAGCACAGTAAGTTCCTGT CTTCTTCCGGCAAAAATCACATCAGACTGGGTTAGTATGTCCCTGGCATGGTAGTCATTCAAGGCCATAAATCTGCC CTGATATCCAGTAGGAACCAGCACACTCACTTTTAGGTGAAGCAATACCACCCCATGCGGAGGAATGTGGAAAGATT CAGGGCAAAAAAATTATATCTATTGCTAGCCCCTTCCTGGACGGGAGCAATCCCTCCAGGACTATCTATAAAAGCAT ACAGAGATTCAGCCATAGCTTAGCCCGCTTACCAGTAGACAGAAAGCACAGCAGTACAAGCGCCAACAGCAGCAACT GACTACCCACTGACCCAGCTCCCTATTTAAAGGCACCTTACACTGACGTAATGACCAAAGGTCTAAAAACCCCGCCA AAAAAAACACACACGCCCTGGGTGTTTTTCACAAAAACACTTCCGCGTTCTCACTTCCTCGTATCGATTTTGTGACT CAACTTCCGGGTTCCCACGTTACGTCACTTCTGCCCTTACATGTAACTTGGCCGTATGGCGCCATCTTGCCCACGTC CAAAATGGCTTTCATGACCGGCCACGCCTCCGCGCCGGCCGTTAGCCGTGCGTCGTGACGTTATTTGCATCACCGCT TCTCGTCCAATCAGCGTTGGCTCCGCCCCAAAACCGTTAAAATTCAAAAGCTCATTTGCATATTAACTTTTGTTTAC TTTGTGGGGTATATTATGATGATG

[0630] GenBank Accession No. ABK59080 MSKRLRVEDDENPVYPYGYARNQNIPFLTPPFVSSDGFKNFPPGVLSLKLADPITITNGDVSLKVGGGLTLQDGSLT VNPKAPLQVNTDKKLELAYDNPFESSANKLSLKVGHGLKVLDEKSAAGLKDLIGKLVVLTGKGIGTENLENTDGSSR GIGINVRAREGLTFDNDGYLVAWNPKYDTRTLWTTPDTSPNCTIAQDKDSKLTLVLTKCGSQILANVSLIVVAGKYH IINNKTNPKIKSFTIKLLFNKNGVLLDNSNLGKAYWNFRSGNSNVSTAYEKAIGFMPNLVAYPKPSNSKKYARDIVY GTIYLGGKPDQPAVIKTTFNQETGCEYSITENFSWSKTYENVEFETTSFTFSYIAQE

[0631] GenBank Accession No. ABK59086 MRRAVVSSSPPPSYESVMAQATLEVPFVPPRYMAPTEGRNSIRYSELAPLYDTTRVYLVDNKSADIASLNYQNDHSN FLTTVVONNDFTPAEASTQTINFDERSRWGGDLKTILHTNMPNVNEYMFTSKFKARVMVARKKAEGADANDRSKDIL EYQWFEFTLPEGNFSETMTIDLMNNAILENYLOVGRONGVLESDIGVKFDSRNFKLGWDPVTKLVMPGVYTYEAFHP DVVLLPGCGVDFTESRLSNLLGIRKKOPFQEGFRIMYEDLVGGNIPALLNVKEYLKDKEEAGKADANTIKAQNDAVP RGDNYASAAEAKAAGKEIELKAILKDDSDRSYNVIEGTTDTLYRSWYLSYTYGDPEKGVQSWTLLTTPDVTCGAEQV YWSLPDLMQDPVTFRSTQQVSNYPVVGAELMPFRAKSFYNDLAVYSQLIRSYTSLTHVENRFPDNQILCRPPAPTIT TVSENVPALTDHGTLPLRSSIRGVQRVTVTDARRRTCPYVYKALGIVAPRVLSSRTF

[0632] GenBank Accession No. ABK59070 MCLTARERAKMATPSMMPQWAYMHIAGQDASEYLSPGLVQFARATDTYFSLGNKFRNPTVAPTHDVTTDRSQRLTLR FVPVDREDTTYSYKARFTLAVGDNRVLDMASTYFDIRGVLDRGPSFKPYSGTAYNSLAPKGAPNPSQWTTKEKONGG TGAEKDVTKTFGLAAMGGSNISKDGLQIGTDKTANAEKPIYADKTFQPEPQVGEENWODNDEYYGGRALKKDTKMKP CYGSFAKPTNKEGGQAKLKETPNGTDPQYDVDMAFFDSSTINIPDVVLYTENVDLETPDTHVVYKPGKEDDSSEANL TQQSMPNRPNYIGFRDNFVGLLYYNSTGNMGVLAGQASQLNAVVDLQDRNTELSYQLLLDSLGDRTRYFSMWNSAVD SYDPDVRIIENHGVEDELPNYCFPLDGVQTNSAYQGVKLKPDQTGGGVNGDWVKDDDISAHNQIGKGNIFAMEINLQ ANLWKSFLYSNVALYLPDSYKYTPANVTLPANTNTYEYMNGRVVAPSLVDAYINIGARWSLDPMDNVNPFNHHRNAG LRYRSMLLGNGRYVPFHIQVPQKFFAIKNLLLLPGSYTYEWNFRKDVNMILQSSLGNDLRVDGASVREDSVNLYATF FPMAHNTASTLEAMLRNDTNDOSENDYLSAANMLYPIPAKATNVPISIPSRNWAAFRGWSFTRLKTKETPSLGSGFD PYFVYSGSIPYLDGTFYLNHTFKKVSIMFDSSVSWPGNDRLLTPNEFEIKRSVDGEGYNVAQCNMTKDWFLVOMLSH YNIGYQGFHVPEGYKDRMYSFFRNFQPMSRQVVDEINYKDYKAVTLPFOHNNSGFTGYLAPTMRQGQPYPANFPYPL IGSTAVPSVTQKKFLCDRVMWRIPFSSNFMSMGALTDLGQNMLYANSAHALDMTFEVDPMDEPTLLYLLFEVFDVVR VHQPHRGVIEAVYLRTPFSAGNATT

[0633] GenBank Accession No. AY737798 (SEQ ID NO: 218) CAATCAATATAATATACCTTATAGATGGAATGGTGCCAATATGTAAATGAGGTAATTTAAAAAAGTGCGCGCTGTGT GGTGATTGGCTGCGGGGTGAACGGCTAAAAGGGGCGGACATGCTGGGAGGTGACGTGACTTATGGGGGAGGAGTTAT GTTGCAAGTTATCGCGGTAAAGGTGACGTAAAACGAGGTGTGGTTTGGACACGGAAGTAGACAGTTTTCCCACGCTT ACTGACAGGATATGAGGTAGTTTTGGGCGGATGCAAGTGAAAATTCTCCATTTTCGCGCGAAAACTGAATGAGGAAG TGAATTTCTGAGTCATTTCGCGGTTATGACAGGGTGGAGTATTTGCCGAGGGCCGAGTAGACTTTGACCGTTTACGT GGAGGTTTCGATTACCGTGTTTTTCACCTAAATTTCCGCGTACGGTGTCAAAGTCCTGTGTTTTTACGTAGGTGTCA GCTGATCGCTAGGGTATTTAAACCTGTCGAGTTCCGTCAAGAGGCCACTCTTGAGTGCCAGCGAGAAGAGTTTTCTC CTCCGCGCCGCGAGTCAGTTTTGCGCTTTGAAAATGAGACACCTGCGATTCCTGCCACAGGAGATTATCTCCAGCGA GACCGGGATAGAAATACTGGAGTTTGTGGTAAATACCCTGATGGGAGATGACCCGGAACCGCCAGCGCAGCCTTTCG ATCCACCTACGCTGCACGATCTGTATGATTTAGAGGTAGACGGGCCGGACGATCCCAATGAGGAAGCTGTAAATGGG TTTTTTACTGATTCTATGCTACTAGCTGCCGATGAAGGATTGGACATAAACCCTCCTCCTGAGACCCTTGATACCCC AGGGGTGGTTGTGGAAAGCGGCAGAGGTGGGATAAAATTGCCTGATCTGGGAGCAGCTGAAATGGACTTGCGTTGTT ATGAAGAGGGTTTTCCTCCGAGTGATGATGAAGATGGGGAAACTGAACAGTCCATCCATACCGCAGTGAATGAGGGA GTAAAAGCTGCCAGCGATGTTTTTAAGTTGGACTGTCCGGAGCTGCCTGGACATGGCTGTAAGTCTTGTGAATTTCA CAGGAATAACACTGGAATGAAAGAACTATTGTGCTCGCTTTGCTATATGAGAATGCACTGCCATTTTATTTACAGTA AGTGTATTTAAGTGAAATTTAAAGGAATAGTGTAGCTGTTTAATAACTGTTGAATGGTAGATTTATGTTTTTACTTG TGATTTTTTGTAGGTCCTGTGTCTGATGATGAGTCGCCTTCTCCTGATTCAACTACCTCACCTCCTGAAATTCAGGC GCCCGTACCTGCAAACGTATGCAAGCCCATTCCTGTGAAGCCTAAGTCTGGGAAACGCCCTGCTGTGGATAAGCTTG AGGACTTGTTGGAGGGTGGGGATGGACCTTTGGACCTTAGTACCCGGAAACTGCCAAGGCAATGAGTGCCCTGCAGC TGTGTTTATTTAATGTGACGTCATGTAATAAAATTATGTCAGCTGCTGAGTGTTTTATTGCTTCTTGGGTGGGGACT TGGATATATAAGTAGGAGCAGATCTGTGTGGTTAGCTTATAGCAACCTGCTGCCATCCATGGAGGTTTGGGCTATCT TGGAAGACCTGAGACAGACTAGGCTACTGCTAGAAAACGCCTCGGACGGAGTCTCTGGCTTTTGGAGATTCTGGTTC GGTGGTGATCTAGCTAGGCTAGTGTTTAGGATAAAACAGGACTACAGGGAAGAATTTGAAAAGTTATTGGACGACAG TCCAGGACTTTTTGAAGCTCTTAACTTGGGCCATCAGGCTCATTTTAAGGAGAAGGTTTTATCAGTTTTAGATTTTT CTACTCCTGGTAGAACTGCTGCTGCTGTAGCTTTTCTTACTTTTATATTGGATAAATGGATCCGACAAACCCACTTC AGCAAGGGATACGTTTTGGATTTCATAGCAGCAGCTTTGTGGAGAACATGGAAGGCTCGCAGCATGAGGACAATCTT AGATTACTGGCCAGTGCAGCCTCTGGGAGTAGCAGGGATACTGAGACACCCACCGACCATGCCAGCGGTTCTGGAGG AGGAGCAGCAGGAGGACAATCCGAGAGCCGGCCTGGACCCTCCGGTGGAGGAGTAGCTGACCTGTTTCCTGAACTGC GACGGGTGCTTACTAGGTCTACGTCCAGTGGACAGGACAGGGGCATTAAGAGGGAAAGGAATCCTAGTGGGAATAAT TCAAGAACCGAGTTGGCTTTAAGTTTAATGAGCCGTAGGCGTCCTGAAACTGTTTGGTGGCATGAGGTTCAGAGCGA AGGCAGGGATGAAGTTTCAATATTGCAGGAGAAATATTCACTAGAACAACTTAAGACCTGTTGGTTGGAACCTGAGG ATGATTGGGAGGTGGCCATTAGGAATTATGCTAAGATATCTCTGAGGCCTGATAAACAGTATAGAATTACTAAAAAG ATTAATATTAGAAATGCATGCTACATATCAGGGAATGGGGCAGAGGTTATAATAGATACCCAAGATAAAGCAGCTTT TAGATGTTGTATGATGGGTATGTGGCCAGGGGTTGTCGGCATGGAAGCAGTAACATTTATGAATATTAGGTTTAAAG GGGATGGGTATAATGGCATTGTATTTATGGCTAACACTAAGCTGATTCTACATGGTTGTAGCTTTTTTGGGTTTAAT AATACTTGTGTAGAAGCTTGGGGGCAAGTTGGTGTGAGGGGTTGTAGTTTTTATGCATGCTGGATTGCAACATCAGG TAGGGTCAAGAGTCAGTTGTCTGTGAAGAAATGCATGTTTGAGAGATGTAATCTTGGCATACTGAATGAAGGTGAAG CAAGGGTCCGCCACTGCGCAGCTACAGAAACTGGCTGCTTCATTCTAATAAAGGGAAATGCCAGTGTGAAGCATAAT ATGATCTGTGGACATTCGAATGAGAGGCCTTATCAGATGCTGACTTGCGCTGGTGGACATTGCAATATTCTTGCTAC CGTGCATATCGTTTCCCATGCACGCAAGAAATGGCCTGTATTTGAACATAATGTGATTACCAAGTGCACCATGCACA TAGGTGGTCGCAGGGGAATGTTTATGCCTTACCAGTGTAACATGAATCATGTGAAGGTGATGTTGGAACCAGATGCC TTTTCCAGAGTGAGCTTAACAGGAATCTTTGATATGAATATTCAACTATGGAAGATACTGAGATATGATGACACTAA ACCGAGGGTGCGCGCATGCGAATGCGGAGGCAAGCATGCTAGATTCCAGCCGGTGTGCGTGGATGTGACTGAAGACC TGAGACCCGATCATTTGGTGCTTGCCTGCACTGGAGCGGAGTTCGGTTCTAGTGGTGAAGAAACTGACTAAAGTGAG TAGTGGGGCAAGATGTGGATGGAGACTTTCAGGTTGGTAAGGTGGACAGATTGGGTAAATTTTGTTAATTTCTGTCT TGCAGCTGCCATGAGTGGAAGCGCTTCTTTTGAGGGGGGAGTATTTAGCCCTTATCTGACGGGCAGGCTCCCATCAT GGGCAGGAGTTCGTCAGAATGTCATGGGATCCACTGTGGATGGGAGACCCGTCCAGCCCGCCAATTCCTCAACGCTG ACCTATGCCACTTTGAGTTCGTCACCATTGGATGCAGCTGCAGCCGCCGCCGCTACTGCTGCCGCCAACACCATCCT TGGAATGGGCTATTACGGAAGCATCGTTGCCAATTCCAGTTCCTCTAATAACCCTTCAACCCTGGCTGAGGACAAGC TACTTGTTCTCTTGGCTCAGCTCGAGGCCTTAACCCAACGCTTAGGCGAACTGTCTAAGCAGGTGGCCCAGTTGCGT GAGCAAACTGAGTCTGCTGTTGCCACAGCAAAGTCTAAATAAAGATCTCAAATCAATAAATAAAGAAATACTTGTTA TAAAAACAAATGAATGTTTATTTGGTTTTTCGCGCGCGGTATGCCCTGGACCATCGGTCTCGATCATTGAGAACTCG GTGGATCTTTTCCAGTACCCTGTAAAGGTGGGATTGAATGTTTAGATACATGGGCATTAGTCCGTCTCGGGGGTGGA GATAGCTCCATTGAAGAGCCTCTTGCTCCGGGGTAGTGTTATAAATCACCCAGTCATAGCAAGGTCGGAGTGCATGG TGTTGCACAATATCTTTTAGGAGCAGACTAATTGCAACGGGGAGGCCCTTAGTGTAGGTGTTTACAAATCTGTTGAG CTGGGACGGGTGCATCCTGGGGGAAATTATATGCATTTTGGACTGGATCTTGAGGTTGGCAATGTTGCCGCCTAGAT CCCGTCTCGGGTTCATATTGTGCAGAACCACCAAGACAGTGTATCCGGTGCACTTGGGAAATTTATCATGCAGCTTA GAGGGAAAAGCATGAAAAAATTTGGAGACGCCTTTGTGACCCCCCAGATTCTCCATGCACTCATCCATAATGATAGC GATGGGGCCGTGGGCAGCGGCACGGGCGAACACGTTCCGGGGGTCTGAAACATCATAGTTATGCTCCTGAGTCAGGT CATCATAAGCCATTTTAATAAACTTTGGGCGGAGGGTGCCAGATTGGGGGATGAAAGTTCCCTCTGGCCCGGGAGCA TAGTTTCCCTCACATATTTGCATTTCCCAGGCTTTCAGTTCCGAGGGGGGGATCATGTCCACCTGCGGGGCTATAAA AAATACCGTTTCTGGAGCCGGGGTGATTAACTGGGATGAGAGCAAATTCCTAAGCAGCTGAGACTTGCCGCACCCAG TGGGACCGTAAATGACCCCAATTACGGGTTGCAGATGGTAGTTTAGGGAGCGACAGCTGCCGTCCTCCCGGAGCAGG GGGGCCACTTCGTTCATCATTTCCCTTACATGGATATTTTCCCGCACCAAGTCCGTTAGGAGGCGCTCTCCCCCAAG GGATAGAAGCTCCTGGAGCGAGGAGAAGTTTTTCAACGGTTTCAGCCCGTCAGCCATGGGCATTTTGGAAAGAGTCT GTTGCAAGAGCTCGAGCCGGTCCCAGAGCTCGGTGATGTGCTCTATGGCATCTCGATCCAGCAGACCTCCTCGTTTC GCGGGTTGGGACGGCTCCTGGAGTAGGGAATCAGACGATGAGCGTCCAGCGCTGCTAGGGTCCGATCCTTCCATGGT CGCAGCGTCCGAGTCAGGGTTGTTTCCGTCACGGTGAAGGGGTGCGCGCCTGGTTGGGCGCTTGCGAGGGTGCGCTT CAGACTCATCCTGCTGGTCGAGAACCGCTGCCGATCGGCGCCCTGCATGTCGGCCAGGTAGCAGTTTACCATGAGTT CGTAGTTGAGCGCCTCGGCCGCGTGGCCTTTGGCACGGAGCTTACCTTTGGAAGTTTTATGGCAGGCGGGGCAGTAG ATACATTTGAGGGCATACAGCTTGGGCGCGAGGAAAATGGATTCGGGGGAGTATGCATCCGCACCGCAGGAGGCGCA GACGGTTTCGCACTCCACGAGCCAGGTCAGATCCGGCTCATCGGGGTCAAAAACAAGTTTTCCGCCATGTTTTTTGA TGCGTTTCTTACCTTTGGTTTCCATGAGTTCGTGTCCCCGCTGGGTGACAAAGAGGCTGTCCGTGTCCCCGTAGACC GACTTTATGGGCCTGTCCTCGAGCGGAGTGCCTCGGTCCTCTTCGTAGAGGAACCCAGCCCACTCTGATACAAAAGC GCGTGTCCAGGCCAGCACAAAGGAGGCCACGTGGGAGGGGTAGCGGTCGTTGTCAACCAGGGGGTCCACCTTCTCTA CGGTATGTAAACACATGTCCCCCTCCTCCACATCCAAGAATGTGATTGGCTTGTAAGTGTAGGCCACGTGACCAGGG GTCCCCGCCGGGGGGGTATAAAAGTGGGCGGGCCTCTGTTCGTCCTCACTGTCTTCCGGATCACTGTCCAGGAGCGC CAGCTGTTGGGGTAGGTATTCTCTCTCGAAGGCGGGCATGACCTCTGCACTCAGGTTGTCAGTTTCTAGGAACGAGG AGGATTTGATATTGACAGTACCAGCAGAGATGCCTTTCATAAGACTCTCGTCCATCTGGTCAGAAAACACAATCTTC TTGTTATCCAGCTTGGTGGCAAATGATCCATAGAGGGCATTGGATAGAAGCTTGGCGATGGAGCGCATGGTTTGGTT CTTTTCCTTGTCCGCGCGCTCCTTGGCGGCGATGTTAAGCTGGACGTACTCGCGCGCCACACATTTCCATTCAGGGA AGATGGTTGTCAGTTCATCCGGAACTATTCTGACTCGCCATCCCCTATTGTGCAGGGTTATCAGATCCACACTGGTG GCTACCTCGCCTCGGAGGGGCTCATTGGTCCAGCAGAGTCGACCTCCTTTTCTTGAACAGAAAGGGGGGAGGGGGTC TAGCATGAACTCATCAGGGGGGTCCGCATCTATGGTAAATATTCCCGGTAGCAAATCTTTGTCAAAATAGCTGATGG TGGCGGGATCATCCAAGGTCATCTGCCATTCTCGAACTGCCAGCGCGCGCTCGTAGGGGTTAAGAGGGGTGCCCCAG GGCATGGGGTGGGTGAGCGCGGAGGCATACATGCCACAGATATCGTAGACATAGAGGGGCTCTTCGAGGATGCCGAT GTAAGTGGGATAACAGCGCCCCCCTCTGATGCTTGCTCGCACATAGTCATAGAGTTCATGTGAGGGGGCGAGAAGAC CCGGGCCCAGATTGGTGCGGTTGGGTTTTTCCGCCCTGTAAACGATCTGGCGAAAGATGGCATGGGAATTGGAAGAG ATAGTAGGTCTCTGGAATATGTTAAAATGGGCATGAGGTAGGCCTACAGAGTCCCTTATGAAGTGGGCATATGACTC TTGCAGCTTGGCTACCAGCTCGGCGGTGACGAGTACGTCCAGGGCACAGTAGTCGAGAGTTTCCTGGATGATGTCAT AACGCGGTTGGCTTTTCTTTTCCCACAGCTCGCGGTTGAGAAGGTATTCTTCGCGATCCTTCCAGTACTCTTCGAGG GGAAACCCGTCTTTTTCTGCACGGTAAGAGCCCAACATGTAGAACTGATTGACTGCCTTGTAGGGACAGCATCCCTT CTCCACTGGGAGAGAGTATGCTTGGGCTGCATTGCGCAGCGAGGTATGAGTGAGGGCAAAAGTGTCCCTGACCATGA CTTTGAGGAATTGATACTTGAAGTCGATGTCATCACAGGCCCCCTGTTCCCAGAGTTGGAAGTCCACCCGCTTCTTG TAGGCGGGGTTGGGCAAAGCGAAAGTAACATCATTGAAGAGGATCTTGCCGGCCCTGGGCATGAAATTTCGGGTGAT TCTGAAAGGCTGAGGGACCTCTGCTCGGTTATTGATAACCTGAGCGGCCAAGACGATCTCATCAAAGCCATTGATGT TGTGCCCCACTATGTACAGTTCTAAGAATCGAGGGGTGCCCCTGACATGAGGCAGCTTCTTGAGTTCTTCAAAAGTG AGGTCTGTAGGGTCAGTGAGAGCATAGTGTTCGAGGGCCCATTCGTGCACGTGAGGGTTCGCTTTGAGGAAGGAGGA CCAGAGGTCCACTGCCAGTGCTGTTTGTAACTGGTCCCGGTACTGACGAAAATGCTGCCCGACTGCCATCTTTTCTG GGGTGACGCAATAGAAGGTTTGGGGGTCCTGCCGCCAGCGATCCCACTTGAGTTTTATGGCCAGGTCATAGGCGATG TTGACGAGCCGCTGGTCTCCAGAGAGTTTCATGACCAGCATGAAGGGGATTAGCTGCTTGCCAAAGGACCCCATCCA GGTGTAGGTTTCCACATCGTAGGTGAGGAAGAGCCTTTCTGTGCGAGGATGAGAGCCAATCGGGAAGAACTGGATCT CCTGCCACCAGTTGGAGGAATGGCTGTTGATGTGATGGAAGTAGAACTCCCTGCGACGCGCCGAGCATTCATGCTTG TGCTTGTACAGACGGCCGCAGTACTCGCATCGATTCACGGGATGCACCTCATGAATGAGTTGTACCTGACTTCCTTT GACGAGAAATTTCAGTGGAAAATTGAGGCCTGGCGATTGTACCTCGCGCTCTACTATGTTGTCTGCATCGGCATGAC CATCTTCTGTCTCGATGGTGGTCATGCTGACGAGCCCTCGCGGGAGGCAAGTCCAGACCTCGGCGCGGCAGGGGCGG AGCTCGAGGACGAGAGCGCGCAGGCCGGAGCTGTCCAGGGTCCTGAGACGCTGCGGAGTCAGGTTAGTAGGCAGTGT CAGGAGATTGACTTGCATGATCTTTTCGAGGGCGTGAGGGAGGTTCAGATGGTACTTGATCTCCACGGGTCCGTTGG TGGAGATGTCGATGGCTTGCAGGGTTCCGTGCCCCTTGGGCGCTACCACCGTGCCCTTGTTTTTCCTTTTGGGCGGC GGTGGCTCTGTTGCTTCTTGCATGTTTAGAAGCGGTGTCGAGGGCGCGCACCGGGCGGCAGGGGCGGTTCGGGACCC GGCGGCATGGCCGGCAGTGGTACGTCGGCGCCGCGCGCGGGTAGGTTCTGGTACTGCGCCCTCAGAAGACTCGCATG CGCCACGACGCGGCGGTTGACATCCTGGATCTGACGCCTCTGGGTGAAAGCTACCGGCCCCGTGAGCTTGAACCTGA AAGAGAGTTCAACAGAATCAATCTCGGTATCGTTGACGGCGGCTTGCCTAAGGATTTCTTGCACGTCGCCAGAGTTG TCCTGGTAGGCGATCTCGGCCATGAACTGCTCGATCTCTTCCTCTTGAAGATCTCCGCGGCCCGCTCTCTCGACGGT GGCCGCGAGGTCGTTGGAGATACGCCCAATGAGTTGAGAGAATGCATTCATGCCCGCCTCGTTCCAGACGCGGCTGT AGACCACAGCCCCCACGGGATCTCTCGCGCGCATGACCACCTGGGCGAGGTTGAGCTCCACGTGGCGGGTGAAGACC GCATAGTTGCATAGGCGCTGGAAAAGGTAGTTGAGTGTGGTGGCGATGTGCTCGGTGACGAAGAAATACATGATCCA TCGTCTCAGCGGCATCTCGCTGACATCGCCCAGCGCTTCCAAGCGCTCCATGGCCTCGTAGAAGTCCACGGCAAAGT TGAAAAACTGGGAGTTACGCGCGGACACGGTCAACTCTTCTTCCAAAAGACGGATGAGTTCGGCGATGGTGGTGCGC ACCTCGAGCTCGAAAGCCCCTGGGATTTCTTCCTCAATCTCTTCTTCTTCCACTAACATCTCTTCCTCTTCAGGTGG GGCTGCAGGAGGAGGGGGAACGCGGCGACGCCGGCGGCGCACGGGCAGACGGTCGATGAATCTTTCAATGACCTCTC CGCGGCGGCGGCGCATGGTCTCGGTGACGGCACGACCGTTCTCCCTGGGTCTCAGAGTGAAGACGCCTCCGCGCATC TCCCTGAAGTGGTGACTGGGAGGCTCTCCGTTGGGCAGGGACACCGCGCTGATTATGCATTTTATTAATTGCCCCGT AGGTACTCCGCGCAAGGACCTGATCGTCTCAAGATCCACGGGATCTGAAAACCTTTCGACGAAAGCGTCTAACCAGT CGCAATCGCAAGGTAGGCTGAGCACTGTTTCTTGCGGGGGGGGGGGGCTAGACGCTCGGTCGGGGTTCTCTCTTTCT TCTCCTTCCTCCTCTTTGGAGGGTGAGACGATGCTGCTGGTGATGAAATTAAAATAGGCAGTTTTGAGACGGCGGAT GGTGGCGAGGAGCACCAGGTCTTTGGGTCCGGCTTGTTGGATGCGCAGGCGATGGGCCATTCCCCAAGCATTATCCT GACATCTGGCCAGATCTTTATAGTAGTCTTGCATGAGTCGTTCCACGGGCACTTCTTCTTCGCCCGCTCTGCCATGC ATGCGAGTGATCCCGAACCCGCGCATGGGCTGGACAAGTGCCAGGTCCGCTACAACCCTTTCTGCGAGGATGGCTTG CTGCACCTGGGTGAGGGTGGCTTGGAAGTCGTCAAAGTCCACGAAGCGGTGGTAAGCCCCGGTGTTGATTGTGTAGG AGCAGTTGGCCATGACTGACCAGTTGACTGTCTGGTGCCCAGGGCGCACAAGCTCGGTATACTTAAGGCGCGAGTAT GCGCGGGTGTCAAAGATGTAATCGTTACAGGTGCGCACCAGGTACTGGTAGCCGATGAGAAAGTGCGGCGGCGGCTG GCGGTATAGGGGCCATCGCTCTGTAGCCGGGGCGCCAGGGGCGAGGTCTTCCAGCATGAGGCGGTGATAACCGTAGA TGTACCTGGACATCCAGGTGATACCGGAGGCGGTGGTGGATGCCCGCGGGAACTCGCGTACGCGGTTCCAGATGTTG CGCAGCGGCATGAAGTAGTTCATGGTAGGCACGGTTTGGCCCGTGAGACGTGCACAGTCGTTGATGCTCTAGACATA CGGGCAAAAACGAAAGCGGTCAGCGGCTCGTCTCCGTGGCCTGGAGGCTAAGCGAACGGGTTGGGCTGCGCGTGTAC CCCGGTTCGAATCTCGGATCAGGCTGGAGCCGCAGCTAACGTGGTACTGGCACTCCCGTCTCGACCCAGGCCTGCAC AAAACCTCCAGGATACGGAGGCGGGTCGTTTTTTTTTTTTTGGCTTTTTCCTGGATGGGAGCCAATGCTGCGTCAAG CTTTAGAACACTCAGTTCTCGGGGCTGGGAGTGGCTCGCGCCCGTAGTCTGGAGAATCAATCGCCAGGGTTGCGTTG CGGTGTGCCCCGGTTCGAGTCTTAGCGCGCCGGATCGGCCGGTTTCCGCGACAAGCGAGGGTTTGGCAGCCTCGTCA TTTCTAAGACCCCGCCAGCCGACTTCTCCAGTTTACGGGAGCGAGCCCTCTTTTTTTGTTTTTTTGTTGCCCAGATG CATCCCGTGCTGCGACAGATGCGCCCCCAGCAACAGCCCCCTTCTCAGCAGCAGCTACAACAACAGCCACAAAAGGC TCTTCCTGCTCCTGTAACTACTGCGGCTGCAGCCGTCAGCGGCGCGGGGCAGCCCGCCTATGATCTGGACTTGGAAG AGGGCGAGGGACTGGCGCGCCTGGGCGCACCATCGCCCGAGCGGCACCCGCGGGTGCAACTGAAAAAGGACTCTCGC GAGGCGTACGTGCCCCAGCAGAACCTGTTCAGGGACAGGAGCGGCGAGGAGCCTGAGGAAATGCGAGCTTCCCGCTT TAACGCGGGTCGCGAACTGCGTCACGGTCTGGACCGAAGACGGGTGCTGCGTGATGATGATTTTGAAGTCGATGAAG TGACAGGAATAAGTCCTGCTAGGGCACATGTGGCCGCGGCCAACCTAGTATCAGCTTACGAGCAGACCGTGAAGGAG GAGCGCAACTTTCAAAAATCTTTCAACAACCATGTGCGCACCCTGATTGCCCGCGAGGAAGTGACACTGGGTCTGAT GCACCTGTGGGACCTGATGGAAGCCATTACCCAGAACCCCACCAGCAAACCTCTAACCGCTCAGCTGTTTCTGGTGG TGCAACATAGTAGAGACAATGAGGCATTTAGGGAGGCGCTGTTGAACATTACTGAGCCCGAGGGGAGATGGTTGTAT GATCTTATCAATATTCTGCAAAGTATAATCGTGCAAGAACGTAGCCTGGGTCTAGCTGAGAAGGTGGCTGCTATTAA CTACTCGGTCTTGAGCCTGGGCAAGCACTACGCTCGCAAGATCTACAAAACCCCATACGTACCTATAGACAAGGAGG TGAAGATAGATGGGTTTTATATGCGCATGACTCTCAAGGTGCTGACCTTGAGTGACGATCTGGGAGTGTACCGCAAC GACAGGATGCACCGCGCAGTGAGCGCCAGCAGAAGGCGTGAGCTGAGCGACAGAGAACTTATGCACAGCTTGCAAAG AGCTCTGACTGGGGCTGGAACCGAGGGGGAAAACTACTTTGACATGGGAGCGGACTTGCAGTGGCAGCCCAGTCGCA GGGCCCTGGACGCAGCAGGGTATGAGCTTCCTTACATAGAAGAGGTGGATGAAGGCCAGGATGAGGAGGGCGAGTAT CTGGAAGACTGATGGCGCGACCATCCATATTTTTGCTAGATGGAACAGCAGGCACCGGACCCCGCAAAACGGGCGGC GCTACAGAGCCAGCCGTCCGGCATTAACTCCTCGGACGATTGGAGCCAGGCCATGCAACGCATCATGGCGCTGACGA CCCGCAACCCCGAAGCCTTTAGACAGCAACCCCAGGCCAACCGCCTTTCTGCCATCCTGGAGGCCGTAGTGCCCTCC CGCTCCAACCCCACACACGAGAAGGTCCTGGCCATCGTGAACGCGCTGGTGGAGAACAAAGCCATACGTCCCGATGA GGCTGGGCTGGTATACAATGCCCTATTGGAGCGCGTAGCCCGTTACAACAGCAGCAACGTGCAGACCAACCTGGACC GGATGGTGACCGATGTGCGCGAGGCCGTGTCTCAGCGCGAGCGGTTCCAGCGAGACGCCAATTTAGGGTCGCTGGTG GCTTTGAACGCCTTCCTCAGCACTCAGCCTGCCAACGTGCCTCGCGGTCAGCAAGACTACACAAACTTTCTAAGTGC ATTGAGACTCATGGTGGCCGAAGTCCCTCAAAGCGAAGTGTACCAGTCCGGGCCAGACTACTTTTTCCAGACCAGCA GACAGGGCTTGCAGACAGTGAACCTGAGCCAGGCTTTTAAGAACCTGAATGGTCTGTGGGGAGTGCGCGCCCCAGTG GGAGATCGGGCGACCGTGTCTAGCTTGCTGACCCCCAACTCCCGCCTACTACTGCTCTTGGTAGCCCCATTCACTGA CAGCGGTAGCATCGACCGTAATTCGTACTTGGGCTATCTGTTGAACCTGTATCGCGAGGCCATAGGGCAAACTCAGG TAGATGAGCAAACCTATCAAGAAATTACCCAAGTGAGCCGCGCTCTGGGTCGGGAGGACACTGGCAGCTTGGAAGCC ACCTTAAACTTCTTGCTGACCAACCGGTCGCAGAAGATCCCTCCTCAGTATTCGCTTACCGCGGAGGAGGAACGGAT CCTGAGATACGTGCAGCAGAGCGTGGGACTGTTCCTAATGCAGGAGGGGGCGACTCCTACTGCTGCGCTCGATATGA CAGCCCGAAACATGGAGCCCAGCATGTATGCCAGTAACCGGCCTTTTATCAATAAACTGCTAGACTACTTACACAGG GCGGCTGCTATGAACTCTGATTATTTCACCAATGCTATCCTGAACCCCCATTGGCTGCCCCCACCTGGGTTCTATAC GGGCGAGTATGACATGCCCGACCCCAATGACGGGTTTTTATGGGACGATGTGGACAGTAGTGTTTTCTCCCCGCCTC CTGGTTATAACACTTGGAAGAAGGAAGGTGGCGATAGAAGGCACTCTTCCGTGTCACTGTCCGGAGCAACGGGTGCT GCAGCGGCTCCCGAGGCCGCAAGTCCTTTCCCTAGTTTGCCATTTTCGCTAAACAGTGTACGCAGCAGTGAGCTGGG AAGAATAACCCGTCCTCGCTTGATCGGCGAGGAGGAGTATTTGAACGACTCCCTGTTGAGACCCGAGAGGGAGAAGA ATTTCCCCAACAACGGGATAGAAAGCTTGGTTGACAAAATGAACCGCTGGAAGACGTACGCGCACGATCACAGGGAC GATCCCCGGGCGCTGGGGGATAGCCGGGGCATCGCTACCCGTAAACGCCAGTGGCACGACAGGCAGCGGGGCCTGGT GTGGGCCGATGATGATTCCGCCGACGACAGCAGCGTGTTGGACTTGGGTGGGAGTGGTGGTAACCCGTTCGCTCACC TGCGCCCCCGCGTCGGGCGCCTGATGTAAGAAACCGAAAATAAATACTCACCAAGGCCATGGCGACCAGCGTGCGTT CGTTTCTTCTCTGTTATAGCTAGTATGATGAGGCGAACCGTGCTAGGCGGAGCGGTGGTGTATCCGGAGGGTCCTCC TCCTTCGTACGAGAGCGTGATGCAGCAGGCGGCGGCGGCGGCGATGCAGCCACCACTGGAGGCTCCCTTTGTACCCC CTCGGTACCTGGCACCTACGGAGGGGAGAAACAGCATTCGTTACTCGGAGCTGGCACCATTGTATGATACCACCCGG TTGTATTTGGTGGACAACAAGTCCGCGGACATCGCCTCACTGAACTATCAGAACGACCACAGCAACTTCCTCACCAC GGTGGTGCAAAACAATGACTTTACCCCCACGGAGGCCAGCACCCAGACCATCAACTTTGACGAGCGGTCGCGATGGG GCGGTCAGCTGAAGACTATCATGCACACCAACATGCCCAACGTGAACGAGTACATGTTTAGCAACAAGTTCAAAGCT CGGGTGATGGTGTCTAGAAAGGCTCCTGAAGGTGTCACAGTAGATGACAATTATGATCACAAGCAGGATATTTTGGA ATATGAGTGGTTTGAGTTTACTCTACCGGAAGGGAACTTCTCAGCCACAATGACCATTGACCTAATGAACAATGCCA TCATTGATAATTACCTTGAAGTGGGCAGACAGAATGGAGTGTTGGAGAGTGACATTGGTGTTAAATTTGACACCAGG AACTTTAGACTGGGTTGGGATCCGGAAACTAAGTTGATTATGCCTGGGGTTTACACCTATGAGGCATTCCATCCTGA CATTGTATTGTTGCCTGGTTGCGGAGTTGACTTTACTGAAAGTCGCCTTAGTAACTTGCTTGGTATCAGGAAAAGAC ACCCATTCCAGGAGGGTTTTAAGATCTTGTATGAGGATCTTGAAGGGGGTAATATCCCGGCCCTGTTGGATGTAGAA GCCTATAAGAACAGTAAGAAAGAACGAGAAGCCAAAACAGAAGCCGCTAAAGCTGCTGCTATTGCTAAAGCCAACAT AGTTGTCAGCGACCCTGTAAGGGTGGCTAATGCCGAAGAAGTCAGAGGAGACAACTATACAGCTTCATCTGTTGCAA CTGAAGAATCGCTATTGGCTGCTGTGGCCGAAACTACAGAGACCAAACTCACTATTAAACCTGTAGAAAAAGACAGC AAGAGTAGAAGTTACAATGTCTTGGAAGATAAAGTGAATACAGCCTACCGCAGCTGGTACCTGTCCTACAACTATGG TGACCCTGAAAAAGGAGTCCGTTCCTGGACACTGCTCACCACCTCGGATGTCACCTGTGGAGCAGAGCAGGTGTACT GGTCGCTCCCAGACATGATGCAGGACCCTGTCACATTCCGTTCCACGAGACAAGTCAGCAACTATCCAGTGGTAGGT GCAGAGCTCATGCCGGTCTTCTCAAAGAGTTTCTACAACGAGCAAGCCGTGTACTCCCAGCAGCTTCGCCAGTCCAC CTCGCTCACGCACGTCTTCAACCGCTTCCCTGAGAACCAGATCCTCATCCGCCCGCCAGCGCCCACCATTACCACCG TCAGTGAAAACGTTCCTGCTCTCACAGATCACGGGACCCTGCCGTTGCGCAGCAGTATCCGGGGAGTCCAGCGCGTG ACCGTTACTGACGCCAGACGCCGCACCTGCCCCTACGTCTACAAGGCCCTGGGCATAGTCGCGCCGCGCGTCCTTTC AAGCCGCACTTTCTAAAAAAAAATGTCCATTCTTATCTCACCTAGTAATAACACCGGTTGGGGCCTGCGCGCGCCAA GCAAGATGTACGGAGGTGCTCGCAAACGCTCTACACAGCACCCTGTGCGCGTGCGCGGGCACTTCCGCGCTCCATGG GGCGCCCTCAAGGGTCGTACCCGCACTAGAACCACCGTCGATGATGTGATCGACCAGGTGGTGGCCGATGCTCGTAA TTATACTCCTACTGCACCTACATCTACTGTGGATGCAGTTATTGACAGCGTAGTGGCTGACGCCCGCGCCTATGCTC GCCGGAAGAGCAGGCGGAGACGCATCGCCAGGCGCCACCGGGCTACTCCCGCTATGCGAGCGGCAAGAGCTCTGCTG AGGAGGGCCAAACGCGTGGGGCGAAGAGCTATGCTTAGAGCGGCCAGACGCGCGGCTTCAGGTGCCAGTGCCGGCAG GTCCCGCAGGCGCGCAGCCACGGCGGCAGCAGCGGCCATTGCCAACATGGCCCAACCGCGAAGAGGCAATGTGTACT GGGTGCGCGACGCCACCACCGGCCAGCGCGTGCCCGTGCGCACCCGCCCCCCTCGCTCTTAGAAGATACTGAGCAGT CTCCGATGTTGTGTCCCAGCGAGGATGTCCAAGCGCAAATACAAGGAAGAGATGCTCCAGGTCATCGCGCCTGAAAT CTACGGTCCGCCGGTGAAGGATGAAAAAAAGCCCCGCAAAATCAAGCGGGTCAAAAAGGACAAAAAGGAAGAAGATG GCAATGATGGTCTGGCGGAGTTTGTACGCGAGTTCGCCCCAAGGCGGCGAGTGCAGTGGCGTGGACGCAAAGTGCAG CCTGTGCTGAGACCTGGAACCACGGTGGTCTTTACGCCCGGCGAGCGCTCCAGCACTGCTTTTAAGCGGTCCTATGA TGAGGTGTATGGGGATGATGATATTCTGGAGCAGGCGGCCGACCGCCTGGGCGAGTTTGCTTATGGCAAGCGCTCCC GCTCGAGCCCCAAGGAGGAGGCGGTGTCCATTCCCTTGGACAATGGGAATCCCACCCCTAGTCTCAAGCCAGTCACC CTGCAGCAAGTGCTGCCCGTGCCTCCACGCAGAGGCAACAAGCGAGAGGGTGAGGATCTGTATCCCACTATGCAATT GATGGTGCCCAAGCGCCAGCGGCTGGAGGACGTGCTGGAGAAAATGAAAGTGGATCCCGATATACAACCTGAGGTCA AAGTGAGACCCATCAAGCAGGTGGCGCCAGGTTTGGGAGTACAAACCGTAGACATCAAGATTCCCACCGAGTCAATG GAAGTCCAAACCGAACCTGCAAAGCCCACAACCACCTCCATTGAGGTGCAAACGGATCCCTGGATGACCGCACCCGT TACAACTCCAGCTGCTGTCAACACCACTCGAAGATCCCGGCGAAAGTACGGTCCAGCAAGTTTGCTGATGCCAAATT ATGCTCTGCACCCATCCATTATTCCAACTCCGGGTTACCGAGGCACTCGCTACTACCGCAGCAGGAGCAGCACTTCC CGCCGTCGCCGCAAAACACCTGCAAGTCGTAGTCATCGTCGTCGCCGCCGCCCCACCAGCAATCTGACTCCCGCTGC TCTGGTGCGGAGAGTGTATCGCGATGGCCGCGCGGATCCCCTGACGTTACCGCGCGTACGCTACCATCCAAGCATCA CAACTTAACAACTGTTGCCGCTGCCTCCTTGCAGATATGGCCCTCACTTGCCGCCTTCGTGTCCCCATTACTGGCTA CCGAGGAAGAAACTCGCGCCGTAGAAGAGGGATGTTGGGGCGCGGAATGCGACGCCACAGGCGGCGGCGCGCTATCA GCAAGAGGCTGGGGGGTGGCTTTCTGCCTGCTCTGATCCCCATCATAGCCGCGGCGATCGGGGCGATACCAGGCATA GCTTCCGTGGCGGTTCAGGCCTCGCAGCGCCACTGACATTGGAAAAACTTATAAATAAAACAGAATGGACTCTGATG CTCCTGGTCCTGTGACTATGTTTTTGTAGAGATGGAAGACATCAATTTTTCATCCCTGGCTCCGCGACACGGCACGA GGCCGTACATGGGCACCTGGAGCGACATCGGCACCAGCCAACTGAACGGGGGCGCCTTCAATTGGAGCAGTATCTGG AGCGGGCTTAAAAATTTTGGCTCTACCATAAAAACCTATGGGAACAAAGCTTGGAACAGCAGCACAGGGCAGGCATT GAAAAATAAGCTTAAAGAGCAAAACTTCCAACAGAAGGTGGTTGATGGAATCGCCTCTGGTATCAATGGGGTGGTGG ATCTGGCCAACCAGGCCGTGCAGAAACAGATAAACAGCCGCCTTGACCCGCCGCCGTCAGCCCCTGGTGAAATGGAA GTGGAGGAAGATCTCCCTCCCCTTGAAAAGCGGGGCGACAAGCGTCCGCGCCCCGATCTGGAGGAGACACTAGTCAC ACGCTCAGACGACCCGCCCTCCTACGAGGAGGCAGTGAAGCTTGGAATGCCCACCACCAGACCTGTAGCCCCCATGG CTACCGGGGTAATGAAACCTTCTCAGTCACACCGACCCGCTACCTTGGACTTGCCTCCCCCTGCTGTTGCAGCGCCT GCTCGCAAGCCTGTCGCTACCCCGAAGCCCACCACCGTACAGCCCGTCGCCGTAGCCAGACCGCGTCCTGGGGGCAC TCCACGTCCGAATGCAAACTGGCAGAGTACTCTGAACAGCATCGTGGGTCTGGGCGTGCAAAGTGTAAAGCGCCGTC GCTGCTTTTAAATTAAATATGGAGTAGCGCTTAACTTGCCTGTCTGTGTGTATGTGTCATCATCACGCCGCCGCCGC AGCAACAGCAGAGGAGCAAGGAAGAGGTCGCGCGCCGAGGCTGAGTTGATTTCAAGATGGCCACCCCATCGATGCTG CCCCAGTGGGCATACATGCACATCGCCGGACAGGATGCTTCGGAGTACCTGAGTCCGGGTCTGGTGCAGTTCGCCCG CGCCACAGACACCTACTTCAATCTGGGGAACAAGTTTAGGAACCCCACCGTGGCGCCCACCCATGATGTGACCACCG ACCGCAGTCAGCGGCTGATGCTGCGCTTTGTGCCCGTTGACCGGGAAGACAATACCTACGCATACAAAGTTCGATAC ACCTTGGCTGTGGGCGACAACAGAGTGCTGGATATGGCCAGCACTTTCTTTGACATTCGGGGTGTGTTGGATAGAGG TCCTAGCTTCAAGCCATATTCTGGCACTGCTTACAACTCATTGGCCCCTAAGGGCGCTCCCAATACATCTCAGTGGC TTAATAAGGGAGATGAAGAGGATGGGGAAGACGACCAACAAGCTACATACACTTTTGGCAATGCGCCAGTAAAAGCC GAAGCTGAAATTACAAAAGAAGGACTGCCAATAGGTTTGGAAGTTCCATCTGAAGGTGGCCCTAAACCCATTTATGC TGATAAACTGTATCAGCCAGAACCTCAGGTGGGAGAGGAATCTTGGACTGATACGGATGGCACAGATGAAAAATATG GAGGCAGAGCACTTAAACCTGAAACTAAAATGAAACCCTGCTACGGGTCTTTCGCTAAACCTACTAATGTTAAAGGC GGGCAGGCAAAAGTGAAGAAAGAAGAAGAAGGCAAGGTTGAATATGACATTGACATGAACTTTTTCGACCTAAGATC ACAAATGACTGGCCTCAAGCCTAAAATTGTAATGTATGCAGAAAATGTGGATCTAGAAACTCCTGACACTCATGTGG TGTACAAACCTGGAGCTTCAGATGCTAGCTCTCATGCAAACCTTGGTCAACAGTCCATGCCCAATAGACCTAACTAT ATTGGCTTCAGGGACAACTTCATCGGACTCATGTACTACAACAGTACTGGCAACATGGGAGTGCTGGCTGGACAAGC GTCTCAGCTAAATGCAGTGGTTGACTTGCAAGACAGAAACACAGAATTGTCATATCAACTCTTGCTTGATTCTCTGG GGGACAGAACCAGATATTTCAGTATGTGGAATCAAGCAGTGGATAGCTATGACCCAGATGTGCGTGTTATTGAGAAC CATGGTGTGGAAGATGAACTTCCTAACTATTGTTTTCCATTGGATGGTGTAGGTCCGCGAATAGACAGTTACAAGGG AATTGAGACAAATGGTGATGAAACCACTACTTGGAAAGATTTAGAGCCAAAGGGCATAAGTGAAATTGCTAAGGGAA ATCCGTTTGCCATGGAAATTAACCTCCAAGCTAATCTCTGGAGAAGTTTTCTTTATTCCAATGTGGCTCTGTATCTC CCAGACTCCTACAAATACACCCCAGCCAATGTCACTCTTCCAACTAACACCAACACTTATGACTACATGAATGGGCG GGTGGTTCCCCCATCCCTGGTGGATACCTACGTAAACATTGGCGCCAGATGGTCTTTGGATGCCATGGACAATGTCA ACCCCTTTAACCATCACCGCAACGCTGGCCTGCGATACCGGTCCATGCTTTTGGGCAATGGTCGTTACGTGCCTTTC CACATTCAAGTGCCTCAGAAATTCTTTGCTGTGAAGAACCTGCTGCTTCTACCCGGTTCTTACACCTACGAGTGGAA CTTCAGAAAGGATGTGAACATGGTCCTGCAGAGTTCCCTTGGTAATGATCTCCGGGTCGATGGTGCCAGCATAAGTT TTACCAGCATCAATCTCTATGCCACCTTCTTCCCCATGGCCCACAACACTGCCTCCACCCTTGAAGCCATGCTGCGC AATGACACCAATGATCAATCATTCAATGACTACCTTTCTGCTGCCAACATGCTCTACCCCATCCCGGCCAACGCTAC CAACGTTCCCATCTCCATTCCCTCTCGCAACTGGGCCGCCTTCAGAGGCTGGTCCTTCACCAGACTCAAAACCAAGG AGACTCCCTCTTTGGGATCAGGGTTCGATCCCTACTTTGTTTACTCTGGTTCTATACCCTACCTGGATGGTACCTTC TACCTTAACCACACTTTCAAGAAAGTCTCCATCATGTTTGACTCTTCAGTGAGCTGGCCTGGTAATGACAGATTGCT AAGTCCAAATGAGTTCGAAATCAAGCGCACAGTTGATGGGGAAGGCTACAATGTGGCCCAATGTAACATGACCAAAG ACTGGTTCCTGGTCCAGATGCTTGCCAACTACAACATTGGATACCAGGGCTTCTACGTTCCTGAGGGTTACAAGGAT CGCATGTACTCCTTCTTCAGAAACTTCCAGCCCATGAGTAGACAGGTGGTTGATGAGATTAACTACAAAGACTATAA AGCTGTCGCCGTACCCTACCAGCATAATAACTCTGGCTTTGTGGGTTACATGGCTCCTACCATGCGTCAGGGTCAAG CGTACCCTGCTAACTACCCATACCCCCTAATTGGAACCACTGCAGTAACCAGTGTCACCCAGAAAAAATTCCTGTGC GACAGGACCATGTGGCGCATCCCATTCTCTAGCAACTTCATGTCCATGGGTGCCCTTACAGACCTGGGACAGAACTT GCTGTATGCCAACTCGGCCCATGCGCTGGACATGACTTTTGAGGTGGATCCCATGGATGAGCCCACCCTGCTTTATC TTCTTTTCGAAGTCTTCGACGTGGTCAGAGTGCACCAGCCACACCGCGGCGTCATCGAGGCCGTCTACCTGCGCACA CCGTTCTCGGCCGGCAACGCCACCACATAAGAAGCCTCTTGCTTCTTGCAAGCAGCAGCTGCAGCCATGTCATGCGG GTCCGGAAACGGCTCCAGCGAGCAAGAGCTCAAAGCCATCGTCCGAGACCTGGGCTGCGGACCCTATTTCCTGGGAA CCTTTGACAAGCGTTTCCCGGGGTTCATGGCCCCCGACAAGCTCGCCTGCGCCATAGTCAACACTGCCGGACGCGAG ACGGGGGGAGAGCACTGGCTGGCTTTTGGTTGGAACCCGCGCTCCAACACCTGCTACCTTTTTGATCCTTTTGGGTT CTCGGATGAGCGACTCAAACAGATTTACCAGTTTGAGTACGAGGGGCTCCTGCGCCGCAGTGCCCTTGCTACCAAAG ACCGCTGCATCACCCTGGAAAAGTCCACCCAGAGCGTGCAGGGCCCGCGCTCAGCCGCCTGTGGACTTTTTTGCTGT ATGTTCCTTCATGCCTTTGTGCACTGGCCCGACCGCCCCATGAACGGAAACCCCACCATGAAGTTGCTGACTGGGGT GTCAAACAGCATGCTCCAATCACCCCAAGTCCAGCCCACCCTGCGCCGCAACCAGGAGGCGCTATATCGCTTCCTAA ACACCCACTCATCTTACTTTCGTTCTCACCGCGCACGCATTGAAAGGGCCACCGCGTTTGACCGTATGGATATGCAA TAAGTCATGTAAAACCGTGTTCAATAAAAAGCATTTTATTTTTACATGCACTAAGGCTCTGGTTTTTTGCTCATTCG TTTTCATCATTCACTCAGAAATCAAATGGGTTCTGGCGGGAGTCAGAGTGACCCGTGGGCAGGGAGACGTTGCGGAA CTGTAACCTGTTCTGCCACTTGAACTCGGGGATCACCAGCTTGGGAACTGGAATTTCGGGAAAGGTGTCTTGCCACA ACTTTCTGGTCAGTTGCAGGGCGCCAAGCAGGTCAGGAGCAGAGATCTTGAAATCACAGTTGGGGCCGGCATTCTGG ACACGGGAGTTGCGGTACACTGGGTTGCAACACTGGAACACCATCAAGGCTGGGTGTCTCACGCTTGCCAGCACGGT CGGGTCACTGATGGTAGTCACATCCAAGTCTTCAGCATTGGCCATTCCAAAGGGGGTCATCTTACAGGTCTGCCTGC CCATCACGGGAGCGCAGCCTGGCTTGTGGTTGCAATCGCAATGAATGGGGATCAGCATCATCCTGGCTTGGTCGGGG GTTATCCCTGGGTACACGGCCTTCATGAAGGCTTCGTACTGCTTGAAAGCTTCCTGAGCCTTACTTCCCTCGGTGTA AAACATCCCACAGGACTTGCTGGAAAATTGGTTAGTAGCACAGTTGGCATCATTCACACAGCAGCGGGCATCGTTGT TGGCCAACTGGACCACATTTCTGCCCCAGCGGTTCTGGGTGATCTTGGCTCTGTCTGGGTTCTCCTTCATAGCGCGC TGCCCGTTTTCGCTCGCCACATCCATCTCGATAATGTGGTCCTTCTGGATCATGATAGTGCCATGCAGGCATTTCAC CTTGCCTTCGTAATCGGTGCATCCATGAGCCCACAGAGCGCACCCGGTGCACTCCCAATTATTGTGGGCGATCTCAG AATAAGAATGCACCAATCCCTGCATGAATCTTCCCATCATCGCTGTCAGGGTCTTCATGCTACTAAATGTCAGCGGG ATGCCACGGTGCTCCTCGTTCACATACTGGTGGCAGATACGCTTGTACTGCTCGTGCTGCTCTGGCATCAGCTTGAA AGAGGTTCTCAGGTCATTATCCAGCCTATACCTCTCCATTAGCACAGCCATCACTTCCATGCCCTTCTCCCAGGCAG ATACCAGGGGCAAGCTCAAAGGATTCCTAACAGCAATAGAAGTAGCTCCTTTAGCTATAGGGTCATTCTTGTCGATC TTCTCAACACTTCTCTTGCCATCCTTCTCAATGATGCGCACCGGGGGGTAGCTGAAGCCCACGGCCACCAACTGAGC CTGTTCTCTTTCTTCTTCGCTGTCCTGGCTGATGTCTTGCAGAGGGACATGCTTGGTCTTCCTGGGCTTCTTCTTGG GAGGGATCGGGGGAGGACTGTTGCTCCGTTCCGGAGACAGGGATGACCGCGAAGTTTCGCTTACCAGTACCACCTGG CTCTCGATAGAAGAATCGGACCCCACGCGACGGTAGGTGTTCCTCTTCGGGGGCAGAGGTGGAGGCGACTGAGATGG GCTGCGGTCCGGCCTTGGAGGCGGATGGCTGGCAGAGCCCATTCCGCGTTCGGGGGTGTGCTCCCGTTGGCGGTCGC TTGACTGATTTCCTCCGCGGCTGGCCATTGTGTTCTCCTAGGCAGAGAAACAACAGACATGGAAACTCAGCCATCAC TGCCAACATCGCTGCAAGCGCCATCACACCTCGCCCCCAGCAGCGACGAGGAGGAGAGCTTAACCACCCCACCACCC AGTCCCGCTACCACCACCTCTACCCTCGATGATGAGGAGGAGGTCGACGCAGCCCAGGAGATGCAGGCGCAGGATAA TGTGAAAGCGGAAGAGATTGAGGCAGATGTCGAGCAGGACCCGGGCTATGTGACACCGGCGGAGCACGAGGAGGAGC TGAAACGTTTTCTAGACAGAGAGGATGACGACCGCCCAGAGCATCACCAGGAGGCTGGCCTCGGGGATCATGTTGCC GACTACCTCTCCGGGCTTGGGAGGGAGGACGTGCTCCTCAAACATCTAGCAAGGCAGTCGATCATAGTTAAAGACGC ACTACTCAACCTCACCGAAGTGCCTATCAGTGTGGAAGAGCTTAGCCGCGCCTACGAGCTGAACCTCTTTTCGCCTC AGATACCCCCCAAGCGGCAGCGAAACGGCACCTGCGAGGCCAACCCTCGACTCAACTTCTATCCAGCTTTTACTGTC CCCGAAGTGCTGGCCACCTACCACATCTTTTTTAAGAACCAAAAGATTCCAGTCTCCTGCCGCGCCAACCGCACCCG CGCAGATGCCCTTCTCAACTTGGGTCCGGGAGCTCGCTTACCTGATATAGCTTCCTTGGAAGAGGTTCCAAAGATCT TTGAGGGTCTGGGAAGTGATGAGACTCGGGCCGCAAATGCTCTGCAACAGGGAGAGAATGGTATGGATGAACATCAC AGCGCTCTAGTGGAACTGGAGGGTGACAATGCCCGGCTTGCAGTGCTCAAGCGCAGTATCGTGGTCACCCATTTTGC CTACCCCGCTGTTAACCTGCCGCCCAAAGTCATGAGCGCTGTCATGGACCATCTGCTCATCAAACGAGCAAGTCCAC TTTCAGAAAACCAGAACATGCAGGATCCAGACGCCTCGGAGGAGGGCAAGCCGGTAGTCAGTGACGAGCAGCTATCT CGCTGGCTGGGTACCAACTCCCCCCGAGATTTGGAAGAAAGACGCAAGCTTATGATGGCTGTAGTGCTAGTAACTGT TGAGTTGGAGTGTCTGCGCCGCTTTTTTACCGACCCCGAGACCCTGCGCAAGCTAGAGGAGAACCTGCACTACACCT TCAGACATGGCTTCGTGCGCCAGGCATGCAAGATCTCCAACGTGGAGCTCACCAACCTGGTTTCATACATGGGCATT TTGCATGAGAACCGGCTAGGGCAGAGCGTTCTGCACACCACCCTGAAGGGGGAGGCCCGCCGCGACTACATCCGAGA CTGTGTCTACCTCTACCTCTGCCATACCTGGCAGACTGGTATGGGTGTGTGGCAACAGTGTTTGGAAGAGCAGAACC TTAAAGAGCTGGACAAGCTCTTGCAGAGATCCCTCAAAGCCCTGTGGACAGGTTTTGACGAGCGCACCGTCGCCTCG GACCTGGCGGACATCATCTTCCCCGAGCGTCTTAGGGTTACTCTGCGAAACGGCCTGCCAGACTTCATGAGCCAGAG CATGCTTAACAACTTTCGCTCTTTCATCCTGGAACGCTCCGGTATCCTGCCTGCCACCTGCTGTGCGCTGCCCTCCG ACTTTGTGCCTCTCACCTACCGCGAGTGCCCACCGCCGCTATGGAGCCACTGCTACCTATTCCGCCTGGCCAACTAC CTCTCCTACCACTCGGATGTGATAGAGGATGTGAGCGGAGACGGCCTGCTGGAATGCCACTGCCGATGCAATTTATG CACACCCCACCGCTCCCTCGCCTGCAACCCCCAGTTGCTAAGCGAGACCCAGATCATCGGCACCTTCGAGTTGCAGG GTCCCAACAGTGAAGGCGAGGGGTCTTCTCCGGGGCAGAGTCTGAAACTGACACCGGGGCTGTGGACCTCCGCCTAC CTGCGCAAGTTTCATCCCGAGGACTATCATCCCTATGAGATCAGGTTCTATGAGGACCAGTCACATCCTCCCAAAGT CGAGCTCTCAGCCTGCGTCATCACCCAGGGGGCAATTCTGGCCCAATTGCAAGCCATCCAAAAATCCCGCCAAGAAT TTCTGCTGAAAAAGGGAAGCGGGGTCTACCTTGACCCCCAGACCGGTGAGGAGCTCAACACAAGGTTCCCCCAGGAT GTCCCATCGCCGAGGAAGCAAGAAGCTGAAGGTGCAGCTGTCACCCCCAGAGGATATGGAGGAAGACTGGGACAGTC AGGCAGAGGAGGAGATGGAAGATTGGGACAGCCAGGCAGAGGAGGTGGACAGCCTGGAGGAAGACAGTTTGGAGGAG GAAGACGAGGAGGCAGAGGAGGTGGAAGAAGCAACCGCCGCCAAACAGTTGTCATCGGCGGCGGAGACAAGCAAGTC CCCAGACAGCAGCACGGCTACCATCTCCGCTCCGGGTCGGGGGGCCCAGCGGCGGCCCAACAGTAGATGGGACGAGA CCGGGCGATTTCCAAACCCGACCACCGCTTCCAAGACCGGTAAGAAGGAGCGACAGGGATACAAGTCCTGGCGTGGA CATAAAAACGCTATCATCTCCTGCTTGCATGAATGCGGGGGCAACATATCCTTCACCCGGCGATACCTGCTTTTCCA CCACGGTGTGAACTTCCCCCGCAATATCTTGCATTACTACCGTCACCTCCACAGCCCCTACTGCAGTCAGCAAGTCC CGGCAACCCCGACAGAAAAAGACAGCAGCGACAACGGTGACCAGAAAAGCAGCAGTTAGAAAATCCACAACAAGTGC AGCAGGAGGAGGACTGAGGATCACAGCGAACGAGCCAGCGCAGACCAGAGAGCTGAGGAACCGGATCTTTCCAACCC TCTATGCCATCTTCCAGCAGAGTCGGGGGCAAGAGCAGGAATTGAAAGTAAAAAACCGATCTCTGCGCTCGCTCACC AGAAGTTGTTTGTATCACAAGAGCGAAGACCAACTTCAGCGCACTCTCGAGGACGCCGAGGCTCTCTTCAACAAGTA CTGCGCGCTGACTCTTAAAGAGTAGCCCTTGCCCGCGCTCATTCGAAAACGGCGGGAATCACGTCACCCTTGGCAGC TGTCCTTTGCCCTCGTCATGAGTAAAGAGATTCCCACGCCTTACATGTGGAGCTATCAGCCCCAAATGGGGTTGGCA GCAGGTGCTTCCCAGGACTACTCCACCCGCATGAATTGGCTTAGCGCCGGGCCCTCAATGATATCACGGGTTAATGA TATACGAGCTTATCGAAACCAGTTACTCCTAGAACAGTCAGCTCTTACCACCACACCCCGCCAACACCTTAATCCCC GAAATTGGCCCGCCGCCCTGGTGTACCAGGAAAATCCCGCTCCCACCACCGTACTACTTCCTCGAGACGCCCAGGCC GAAGTTCAGATGACTAACGCAGGTGTACAGCTGGCGGGCGGTTCCGCCCTATGTCGTCACCGGCCTCAACAGAGTAT AAAACGCCTGGTGATCAGAGGCCGAGGTATCCAGCTCAACGACGAGTCGGTTAGCTCTTCGCTTGGTCTGCGACCAG ACGGAGTCTTCCAGATCGCCGGCTGTGGGAGATCTTCCTTCACTCCTCGTCAGGCTGTGCTGACTTTGGAGAGTTCG TCCTCGCAGCCCCGCTCGGGCGGCATCGGAACTCTCCAGTTTGTGGAGGAGTTTACTCCCTCTGTCTACTTCAACCC CTTCTCCGGCTCTCCTGGCCAGTACCCGGACGAGTTCATACCGAACTTCGACGCAATCAGCGAGTCAGTGGATGGCT ATGATTGATGTCTAATGGTGGCGCGGCTGAGCTAGCTCGACTGCGACACCTAGACCACTGCCGCCGCTTTCGCTGTT TCGCCCGGGAACTCACCGAGTTCATCTACTTCGAACTCTCCGAGGAGCACCCTCAGGGTCCGGCCCACGGAGTGCGG ATTACCATCGAAGGGGGAATAGACTCTCGCCTGCATCGCATCTTCTCCCAGCGGCCCGTGCTGATTGAGCGCGACCA GGGAAATACAACCATCTCCATCTACTGCATCTGTAACCACCCCGGATTGCATGAAAGCCTTTGCTGTCTTGTTTGTG CTGAGTTTAATAAAAACTGAGTTAAGACCTTCCTACGGACTACCGCTTCTTCAATCAGGACTTTACAACACCAACCA GATCTTCCAGAAGACCCAGACCCTTCCTCCTCTGATCCAGGACTCTAACTCTACCTTACCAGCACCCTCCACTACTA ACCTTCCCGAAACTAACAAGCTTGGATCTCATCTGCAACACCGCCTTTCACGAAGCCTTCTTTCTGCCAATACTACC ACTCCCAAAACCGGAGGTGAGCTCCGCGGTCTTCCTACTGACGACCCCTGGGTGGTAGCGGGTTTTGTAACGTTAGG ATTAGTTGCGGGTGGGCTTGTGCTAATCCTTTGCTACCTATACACACCTTGCTGTGCATATTTAGTCATATTGTGCT GTTGGTTTAAGAAATGGGGGCCATACTAGTCGTGCTTGCTTTACTTTCGCTTTTGGGTCTGGGCTCTGCTAATCTCA ATCCTCTTGATCACAATCCATGTCTAGACTTCGACCCAGAAAATTGCACACTTACTTTTGCACCCGACACAAGCCGT CTCTGTGGAGTTCTTATTAAGTGCGGATGGGACTGCAGGTCCGTTGAAATTACACATAATAACAAAACATGGAACAA TACCTTATCCACCACATGGGAGCCAGGAGTTCCCGAGTGGTATACTGTCTCTGTCCGAGGTCCTGACGGTTCCATTC GCATTAGTAACAACACTTTCATTTTTTCTGAAATGTGCGATCTGGCCATGTTTATGAGCAAACAGTATGACCTATGG CCTCCTAGCAAAGAGAACATTGTGGCATTTTCCATTGCTTATTGCTTGGTAACATGCATCATCACTGCTATCATTTG TGTGTGCATACACTTGCTTATAGTTATTCGCCCTAGACAAAGCAATGAGGAAAAAGAGAAAATGCCTTAACCTTTTT CCTCATACCTTTTCTTTACAGCATGGCTTCTGTTACAGCTCTAATTATTGCCAGCATTGTCACTGTCGCTCACGGGC AAACAATTGTCCATATTACCTTAGGACATAATCACACTCTTGTAGGGCCCCCAATTACTTCAGAGGTTATTTGGACC AAACTTGGAAGTGTTGATTATTTTGATATAATTTGCAACAAAACTGAACCAATATTTGTAATCTGTAACAGACAAAA TCTCACGTTAATTAATGTTAGCAAAATTTATAACGGTTACTATTATGGTTATGATAGATCCAGTAGCCAATATAAAA ATTACTTAGTTCGCATAACTCAGCCCAAATCAACAGTGCCAACTATGACAATAATTAAAATGGCTAATAAAGCATTA GAAAATTTTACATTACCAACAACGCCCAATGAAAAAAACATTCCAAATTCAATGATTGCAATTATTGCGGCGGTGGC ATTGGGAATGGCACTAATAATAATATGCATGTTCCTATATGCTTGTTGCTATAAAAAGTTTCAACATAAACAGGATC CACTACTAAATTTTAACATTTAATTTTTTATACAGATGATTTCCACTACAATTTTTATCATTACTAGCCTTGCAGCT GTAACTTATGGCCGTTCACACCTAACTGTACCTGTTGGCTCAACATGTACACTACAAGGACCCCAAGAAGGCTATGT CACTTGGTGGAGAATATATGATAATGGAGGGTTCGCTAGACCATGTGATCAGCCTGGTACAAAATTTTCATGCAACG GAAGAGACTTGACCATTATTAACATAACATTAAATGAGCAAGGCTTCTATTATGGAACCAACTATAAAAATAGTTTA GATTACAACATTATTGTAGTGCCAGCCACCACTTCTGCTCCCCGCAAATCCACTTTCTCTAGCAGCAGTGCCAAAGC AAGCACAATTCCTAAAACAGCTTCTGCTATGTTAAAGCTTCGAAAAATCGCTTTAAGTAATTCCACAGCAGCTCCCA ATACAATTCCTAAATCAACAATTGGCATCATTACTGCCGTGGTAGTGGGATTAATGATTATATTTTTGTGCATAATG TACTACGCCTGCTGCTATAGAAAACATGAACAAAAAGGTGATGCATTACTAAATTTTGATATTTAATTTTTTATAGA ATTATGATATTGTTTCAATCCAATGCCACTAACACTATCAATGTGCAGACTACTTTAAAACATGACATGGAAAACCA CACTACCTCCTATGCATACACAAATATTCAGCCTAAATACGCTATGCAACTAGAAATCACCATACTAATTGTAATTG GAATTCTTATACTATCTGTTATTCTTTATTTTATATTCTGCCGTCAAATACCCAATGTTCATAGAAATTCTAAAAGA CGTCCCATCTATTCTCCTATGATTAGTCGTCCCCATATGGCTCTGAATGAAATCTAAGATCTTTTTTTTTCTTTTAC AGTATGGTGAACATCAATCATGATTCCTAGAAATTTCTTCTTCACCATACTCATCTGTGCTTTCAATGTCTGTGCTA CTTTCACAGCAGTAGCCACTGCAAGCCCAGACTGTATAGGACCATTTGCTTCCTATGCACTTTTTGCCTTTGTTACT TGCATCTGCGTGTGTAGCATAGTCTGCCTGGTTATTAATTTTTTCCAACTGGTAGACTGGATCTTTGTGCGAATTGC CTACCTACGTCACCATCCCGAATACCGCAATCAAAATGTTGCGGCACTTCTTAGGCTTATTTAAAACCATGCAGGCT ATGCTACCAGTTATTTTAATTCTGCTACTACCCTGCATTGCCCTACCTTCCACCGCCACTCGCGCTACACCTGAACA ACTTAGAAAATGCAAATTTCAACAACCATGGTCATTTCTTGATTGCTACCATGAAAAATCTGATTTTCCCACATACT GGATAGTGATTGTTGGAATAATTAACATACTTTCATGTACCTTTTTCTCAATCACAATATACCCCACATTTAATTTT GGGTGGAATTCTCCCAATGCACTGGGTTACCCACAAGAGCTAGATGAACATATCCCACTACAACACATACAACAACC ACTAGCATTGGTAGAGTATGAAAATGAGCCACAACCTTCACTGCCTCCTGCTATTAGTTACTTCAACCTAACCGGCG GAGATGACTGAAATACTCACCACCTCCAATTCCGCCGAGGATCTGCTTGATATGGACGGCCGCGCCTCAGAACAGCG ACTCGCCCAACTACGCATCCGCCAGCAGCAGGAACGCGTGACCAAAGAGCTCAGAGATGTCATCCAAATTCACCAAT GCAAAAAAGGCATATTTTGTTTGGTAAAACAAGCCAAGATATCCTACGAGATCACCGCTACTGACCATCGCCTCTCT TACGAACTTGGCCCCCAACGACAAAAATTTACATGCATGGTGGGAATCAACCCTATAGTTATCACCCAGCAAAGTGG AGATACTAAGGGTTGCATTCACTGCTCTTGCGATTCCACCGAGTGCACCTACACCCTGCTGAAGACCCTATGCGGCC TAAGAGACCTGCTACCCATGAATTAAAAATTAATAAAAAATTACTTACTTGAAATCAGCAATAAGGTCTCTGTTGAA ATTTTTTCCCAGCAGCACCTCGCTTCCCTCTTCCCAACTCTGGTATTCTAAACCCCGTTCAGCGGCATACTTTCTCC ATACTTTAAAGGGGATGTCAAATTTTAGCTCCTCTCCTGTACCCACGATCTTCATGTCTTTCTTCCCAGATGACCAA GAGAGTCCGGCTCAGTGATTCCTTCAACCCTGTCTACCCCTATGAAGACGAAAGCACCTCCCAACACCCCTTTATAA ACCCAGGGTTTATTTCCCCAAATGGCTTTACACAAAGCCCAGACGGAGTTCTTACTTTAAATTGTTTAACCCCACTA ACAACCACAGGCGGGCCTTTACAGTTAAAAGTGGGAGGGGGACTTATAGTGGATGACACTGATGGGACCTTACAAGA AAACATACGTGTTACAGCACCCATTACTAAAAATAATCATTCTGTAGAACTATCCATTGGAAATGGATTAGAAACAC AAAACAATAAACTATGTGCCAAATTGGGAAATGGGTTAAAATTTAACAACGGTGACATTTGTATAAAGGATAGTATT AACACCTTATGGACTGGAATAAAGCCTCCACCTAACTGTCAAATAGTGGAAAACACTGATACAAACGATGGCAAACT TACTTTAGTATTAGTAAAAAACGGAGGACTTGTTAATGGCTACGTATCTCTAGTTGGTGTATCAGACACTGTGAACC AAATGTTCACACAAAAGTCAGCAACCATACAATTAAGATTATATTTCGACTCTTCTGGAAATCTATTAACTGATGAA TCAAACTTAAAAATTCCACTTAAAAATAAATCTTCTACAGCAACCAGTGAAGCTGCAACCAGCAGCAAAGCCTTTAT GCCAAGTACTACAGCTTATCCCTTTAACACCACTACTAGGGATAGTGAAAACTATATTCATGGAATATGTTACTATA TGACTAGTTATGATAGAAGTCTAGTTCCCTTAAACATTTCTATAATGCTAAACAGCCGTACGATTTCTTCCAATGTT GCCTATGCCATACAATTTGAATGGAATCTAAATGCAAAAGAATCTCCAGAAAGCAACATAGCTACGCTGACCACATC CCCCTTTTTCTTTTCTTATATTAGAGAAGACGACAACTAAAAAATAAAGTTTAAGTGTTTTTATTTAAAAATCACAA AATTCGAGTAGTTATTTTGCCTCCCCCTTCCCATTTAACAGAATACACCAATCTCTCCCCACGCACAGCTTTAAACA TTTGGATACCATTAGAGATAGACATAGTTTTAGTTTCCACATTCCAAACAGTTTCAGAGCGAGCCAATCTGGGGTCA GTGATACATAAAAATGCATCGGGATAGTCTTTTAAAGCGCTTTCACAGTCCAACTGCTGCGGATGCGACTCCGGAGT CTGGATCACAGTCATCTGGAAGAAGAACGATGGGAATCATAATCCGAAAACGGAATCGGGCGATTGTGTCTCATCAA ACCCACAAGCAGCCGCTGTCTGCGTCGCTCCGTGCGACTGCTGTTTATGGGATCGGGGTCTGCAGTGTCCTGAAGCA TGATTTTAATAGCCCTTAACATTAACTTTCTGGTGCGATGCGCGCAGCAACGCATTCTGATTTCACTGAGATTACTA CAGTATGTACAGCACATTATCACAATATTGTTTAATAAACCATAATTAAAAGCGCTCCAGCCAAAACTCATATCTGA TACAATCGCCCCTGCATGACCATCATACCAAATTTTAATATAAATTAAATGTCGTTCCCTCAAAAACACACTACCCA CATACATGATCTCTTTTGGCATGTGCATATTAACAATCTGTCTGTACCATGGACAACGTTGGTTAATCATGCAACCC AATATAACCTTCCGGAACCACACTGCCAACACCGCTCCCCCAGCCATGCATTGAAGTGAACCCTGCTGATTACAATG ACAATGAAGAACCCAATTCTCTCGACCATGAATCACTTGAGACTGAAAAATATCTATAGTAGCACAACAAAGACATA AATGCATGCATCTTCTCATAATTTTTAACTCATCTGGATTTAAAAACATATCCCAAGGAATGGGAAACTCTTGCAAA ACAGTAAAGCTGGCAGAACAAGGAAGACCACGAACACAACTTACACTATGCATAGTCATAGTATCACAATCTGGCAA CAGCGGGTGGTCTTCAGTCATAGAAGCTCGGGTTTCATTTTCCTCACATCGTGGTAACTGGGCTCTGGTGTAAGGGT GATGTCTGGCGCATGATGTCGAGCGTGCGCGCAACCTTGTCATAATGGAGTTGTTTCCTGACATTCTCGTATTTTGT ATAGCAAAACGCGGCCCTGGCACAACACACTCTTCTTCGTCTTCTATCCTGCCGCTTAGTGTGTTCCGTCTGATAAT TCAAGTACAGCCACACTCTTAAGTTGGTCAAAAGAATGCTGGCTTCAGTTGTAATCAAAACTCCATCATATTTAATT GTTCTAAGGAAATCATCCACGGTAGCATATGCAAATCCCAACCAAGCAATGCAACTGGATTGCGTTTCAAGCAGCAG AGGAGAGGGAAGAGACGGAAGAATCATGTTAATTTTTATTCCAAACGATCTCGCAGTACTTCAAATTGTAGATCGCG CAGATGGCATCTATCGCCCCCACTGTGTTGGTGAAAAAGCACAGCTAAATCAAAAGAAATGCGATTTTCAAGGTGCT CAACGGTGGCTTCCAACAAAGCCTCCACGCGCACATCCAAAAACAAAAGAATACCAAAAGAAGGAGCATTTTCTAAC TCCTCAAACATCATATTACATTCCTGCACCATTCCCAGATAATTTTCAGCTTTCCAGCCTTGAATTATTCGTGTCAG TTCTTGTGGTAAATCCAAACCACACATTACAAACAGGTCCCGGAGGGCGCCCTCCACCACCATTCTTAAACACACCC TCATAATGACAAAATATCTTGCTCCTGTGTCACCTGTAGCAAATTAAGAATGGCATCATCAATTGACATGCCCTTGG CTCTAAGTTCTTCTCTAAGTTCTAGTTGTAAATACTCTCTCATATTATCACCAAACTGCTTAGCCAAAAGCCCCCCG GGAACAATAGCAGGGGACGCTACAGTGCAGTACAAGCGCAGACCTCCCCAATTGGCTCCAGCAAAAACAAGATTAGA ATAAGCATACTGGGAACCACCAGTAATATCATCAAAGTTGCTGGAAATATAATCAGGCAGAATTTCTTGTAAAAATT GAATAAAAGAAAAATTTTCCAAAGAAACATTCAAAATCTCTGGGATGCAAATGCAATAGGTTACCGCGCTGCGCTCC AACATTGTTAGTTTTGAATTAGTCTGCAAAATAAAAGAAACAAGCGTCATATCATAGTAGCCTGTCGAACAGGTGGA TAAATCAGTCTTTCCATCACAAGACAAGCCACAGGGTCTCCAGCTCGACCCTCGTAAAACCTGTCATCGTGATTAAA CAACAGCACCGAAAGTTCCTCGCGGTGGCCAGCATGAATAATTCTTGATGAAGCATATAATCCAGACATGTTAGCAT CAGTTAAAGAGAAAAAACAGCCAACATAGCCTCTGGGTATAATTATGCTTAATCTTAAGTATAGCAAAGCCACCCCT CGCGGATACAAAGTAAAAGGCACAGGAGAATAAAAAATATAATTATTTCTCTGCTGCTGTTCAGGCAACGTCGCCCC CGGTCCATCTAAATACACATACAAAGCCTCATCAGCCATGGCTTACCAGACAAAGTACAGCGGGCGCACAAAGCACA AGCTCTAAAGAAGCTCTAAAGACACTCTTCAACCTCTCCACAATATATACACAAGCCCTAAACTGACGTAATGGGAG TAAAGTGTAAAAAATCCCGCCAAGCCCAACACACACCCCGAAACTGCGTCAGCAGGGAAAAGTACAGTTTCACTTCC GCATTCCCAACAAGCGTAAGTTCCTCTTTCTCATGGTACGTCACATCCGATTAACTTGCAACGTCATTTTCCCACGG TCGCACCGCCCCTTTTAGCCGTTCACCCCGCAGCCAATCACCACACAGCGCGCACTTTTTTAAATTACCTCATTTAC ATATTGGCACCATTCCATCTATAAGGTATATTATATTGATTG

[0634] GenBank Accession No. AAW33547 MTKRVRLSDSFNPVYPYEDESTSQHPFINPGFISPNGFTQSPDGVLTLNCLTPLTTTGGPLQLKVGGGLIVDDTDGT LQENIRVTAPITKNNHSVELSIGNGLETONNKLCAKLGNGLKFNNGDICIKDSINTLWTGIKPPPNCQIVENTDTND GKLTLVLVKNGGLVNGYVSLVGVSDTVNQMFTQKSATIQLRLYFDSSGNLLTDESNLKIPLKNKSSTATSEAATSSK AFMPSTTAYPENTTTRDSENYIHGICYYMTSYDRSLVPLNISIMLNSRTISSNVAYAIQFEWNLNAKESPESNIATL TTSPFFFSYIREDDN

[0635] GenBank Accession No. AAW33525 MRRTVLGGAVVYPEGPPPSYESVMQQAAAAAMQPPLEAPFVPPRYLAPTEGRNSIRYSELAPLYDTTRLYLVDNKSA DIASLNYQNDHSNFLTTVVONNDFTPTEASTQTINFDERSRWGGQLKTIMHTNMPNVNEYMFSNKFKARVMVSRKAP EGVTVDDNYDHKQDILEYEWFEFTLPEGNFSATMTIDLMNNAIIDNYLEVGRONGVLESDIGVKFDTRNFRLGWDPE TKLIMPGVYTYEAFHPDIVLLPGCGVDFTESRLSNLLGIRKRHPFQEGFKILYEDLEGGNIPALLDVEAYKNSKKER EAKTEAAKAAAIAKANIVVSDPVRVANAEEVRGDNYTASSVATEESLLAAVAETTETKLTIKPVEKDSKSRSYNVLE DKVNTAYRSWYLSYNYGDPEKGVRSWTLLTTSDVTCGAEQVYWSLPDMMQDPVTFRSTRQVSNYPVVGAELMPVFSK SFYNEQAVYSQQLRQSTSLTHVENREPENQILIRPPAPTITTVSENVPALTDHGTLPLRSSIRGVQRVTVTDARRRT CPYVYKALGIVAPRVLSSRTF

[0636] GenBank Accession No. AAW33530 MATPSMLPQWAYMHIAGQDASEYLSPGLVQFARATDTYENLGNKERNPTVAPTHDVTTDRSQRLMLRFVPVDREDNT YAYKVRYTLAVGDNRVLDMASTFFDIRGVLDRGPSFKPYSGTAYNSLAPKGAPNTSQWLNKGDEEDGEDDQQATYTF GNAPVKAEAEITKEGLPIGLEVPSEGGPKPIYADKLYQPEPQVGEESWTDTDGTDEKYGGRALKPETKMKPCYGSFA KPTNVKGGQAKVKKEEEGKVEYDIDMNFFDLRSQMTGLKPKIVMYAENVDLETPDTHVVYKPGASDASSHANLGQQS MPNRPNYIGERDNFIGLMYYNSTGNMGVLAGQASQLNAVVDLQDRNTELSYQLLLDSLGDRTRYFSMWNQAVDSYDP DVRVIENHGVEDELPNYCFPLDGVGPRIDSYKGIETNGDETTTWKDLEPKGISEIAKGNPFAMEINLQANLWRSFLY SNVALYLPDSYKYTPANVTLPTNTNTYDYMNGRVVPPSLVDTYVNIGARWSLDAMDNVNPFNHHRNAGLRYRSMLLG NGRYVPFHIQVPQKFFAVKNLLLLPGSYTYEWNFRKDVNMVLQSSLGNDLRVDGASISFTSINLYATFFPMAHNTAS TLEAMLRNDTNDQSENDYLSAANMLYPIPANATNVPISIPSRNWAAFRGWSFTRLKTKETPSLGSGEDPYFVYSGSI PYLDGTFYLNHTFKKVSIMFDSSVSWPGNDRLLSPNEFEIKRTVDGEGYNVAQCNMTKDWFLVOMLANYNIGYQGFY VPEGYKDRMYSFFRNFQPMSROVVDEINYKDYKAVAVPYQHNNSGFVGYMAPTMROGQAYPANYPYPLIGTTAVTSV TOKKFLCDRTMWRIPFSSNFMSMGALTDLGQNLLYANSAHALDMTFEVDPMDEPTLLYLLFEVEDVVRVHOPHRGVI EAVYLRTPFSAGNATT

[0637] GenBank Accession No. AC 000008 (SEQ ID NO: 209) CATCATCAATAATATACCTTATTTTGGATTGAAGCCAATATGATAATGAGGGGGTGGAGTTTGTGACGTGGCGCGGG GCGTGGGAACGGGGGGGGTGACGTAGTAGTGTGGCGGAAGTGTGATGTTGCAAGTGTGGCGGAACACATGTAAGCGA CGGATGTGGCAAAAGTGACGTTTTTGGTGTGCGCCGGTGTACACAGGAAGTGACAATTTTCGCGCGGTTTTAGGCGG ATGTTGTAGTAAATTTGGGCGTAACCGAGTAAGATTTGGCCATTTTCGCGGGAAAACTGAATAAGAGGAAGTGAAAT CTGAATAATTTTGTGTTACTCATAGCGCGTAATATTTGTCTAGGGCCGCGGGGACTTTGACCGTTTACGTGGAGACT CGCCCAGGTGTTTTTCTCAGGTGTTTTCCGCGTTCCGGGTCAAAGTTGGCGTTTTATTATTATAGTCAGCTGACGTG TAGTGTATTTATACCCGGTGAGTTCCTCAAGAGGCCACTCTTGAGTGCCAGCGAGTAGAGTTTTCTCCTCCGAGCCG CTCCGACACCGGGACTGAAAATGAGACATATTATCTGCCACGGAGGTGTTATTACCGAAGAAATGGCCGCCAGTCTT TTGGACCAGCTGATCGAAGAGGTACTGGCTGATAATCTTCCACCTCCTAGCCATTTTGAACCACCTACCCTTCACGA ACTGTATGATTTAGACGTGACGGCCCCCGAAGATCCCAACGAGGAGGCGGTTTCGCAGATTTTTCCCGACTCTGTAA TGTTGGCGGTGCAGGAAGGGATTGACTTACTCACTTTTCCGCCGGCGCCCGGTTCTCCGGAGCCGCCTCACCTTTCC CGGCAGCCCGAGCAGCCGGAGCAGAGAGCCTTGGGTCCGGTTTCTATGCCAAACCTTGTACCGGAGGTGATCGATCT TACCTGCCACGAGGCTGGCTTTCCACCCAGTGACGACGAGGATGAAGAGGGTGAGGAGTTTGTGTTAGATTATGTGG AGCACCCCGGGCACGGTTGCAGGTCTTGTCATTATCACCGGAGGAATACGGGGGACCCAGATATTATGTGTTCGCTT TGCTATATGAGGACCTGTGGCATGTTTGTCTACAGTAAGTGAAAATTATGGGCAGTGGGTGATAGAGTGGTGGGTTT GGTGTGGTAATTTTTTTTTTAATTTTTACAGTTTTGTGGTTTAAAGAATTTTGTATTGTGATTTTTTTAAAAGGTCC TGTGTCTGAACCTGAGCCTGAGCCCGAGCCAGAACCGGAGCCTGCAAGACCTACCCGCCGTCCTAAAATGGCGCCTG CTATCCTGAGACGCCCGACATCACCTGTGTCTAGAGAATGCAATAGTAGTACGGATAGCTGTGACTCCGGTCCTTCT AACACACCTCCTGAGATACACCCGGTGGTCCCGCTGTGCCCCATTAAACCAGTTGCCGTGAGAGTTGGTGGGCGTCG CCAGGCTGTGGAATGTATCGAGGACTTGCTTAACGAGCCTGGGCAACCTTTGGACTTGAGCTGTAAACGCCCCAGGC CATAAGGTGTAAACCTGTGATTGCGTGTGTGGTTAACGCCTTTGTTTGCTGAATGAGTTGATGTAAGTTTAATAAAG GGTGAGATAATGTTTAACTTGCATGGCGTGTTAAATGGGGCGGGGCTTAAAGGGTATATAATGCGCCGTGGGCTAAT CTTGGTTACATCTGACCTCATGGAGGCTTGGGAGTGTTTGGAAGATTTTTCTGCTGTGCGTAACTTGCTGGAACAGA GCTCTAACAGTACCTCTTGGTTTTGGAGGTTTCTGTGGGGCTCATCCCAGGCAAAGTTAGTCTGCAGAATTAAGGAG GATTACAAGTGGGAATTTGAAGAGCTTTTGAAATCCTGTGGTGAGCTGTTTGATTCTTTGAATCTGGGTCACCAGGC GCTTTTCCAAGAGAAGGTCATCAAGACTTTGGATTTTTCCACACCGGGGCGCGCTGCGGCTGCTGTTGCTTTTTTGA GTTTTATAAAGGATAAATGGAGCGAAGAAACCCATCTGAGCGGGGGGTACCTGCTGGATTTTCTGGCCATGCATCTG TGGAGAGCGGTTGTGAGACACAAGAATCGCCTGCTACTGTTGTCTTCCGTCCGCCCGGCGATAATACCGACGGAGGA GCAGCAGCAGCAGCAGGAGGAAGCCAGGCGGCGGCGGCAGGAGCAGAGCCCATGGAACCCGAGAGCCGGCCTGGACC CTCGGGAATGAATGTTGTACAGGTGGCTGAACTGTATCCAGAACTGAGACGCATTTTGACAATTACAGAGGATGGGC AGGGGCTAAAGGGGGTAAAGAGGGAGCGGGGGGCTTGTGAGGCTACAGAGGAGGCTAGGAATCTAGCTTTTAGCTTA ATGACCAGACACCGTCCTGAGTGTATTACTTTTCAACAGATCAAGGATAATTGCGCTAATGAGCTTGATCTGCTGGC GCAGAAGTATTCCATAGAGCAGCTGACCACTTACTGGCTGCAGCCAGGGGATGATTTTGAGGAGGCTATTAGGGTAT ATGCAAAGGTGGCACTTAGGCCAGATTGCAAGTACAAGATCAGCAAACTTGTAAATATCAGGAATTGTTGCTACATT TCTGGGAACGGGGCCGAGGTGGAGATAGATACGGAGGATAGGGTGGCCTTTAGATGTAGCATGATAAATATGTGGCC GGGGGTGCTTGGCATGGACGGGGTGGTTATTATGAATGTAAGGTTTACTGGCCCCAATTTTAGCGGTACGGTTTTCC TGGCCAATACCAACCTTATCCTACACGGTGTAAGCTTCTATGGGTTTAACAATACCTGTGTGGAAGCCTGGACCGAT GTAAGGGTTCGGGGCTGTGCCTTTTACTGCTGCTGGAAGGGGGTGGTGTGTCGCCCCAAAAGCAGGGCTTCAATTAA GAAATGCCTCTTTGAAAGGTGTACCTTGGGTATCCTGTCTGAGGGTAACTCCAGGGTGCGCCACAATGTGGCCTCCG ACTGTGGTTGCTTCATGCTAGTGAAAAGCGTGGCTGTGATTAAGCATAACATGGTATGTGGCAACTGCGAGGACAGG GCCTCTCAGATGCTGACCTGCTCGGACGGCAACTGTCACCTGCTGAAGACCATTCACGTAGCCAGCCACTCTCGCAA GGCCTGGCCAGTGTTTGAGCATAACATACTGACCCGCTGTTCCTTGCATTTGGGTAACAGGAGGGGGGTGTTCCTAC CTTACCAATGCAATTTGAGTCACACTAAGATATTGCTTGAGCCCGAGAGCATGTCCAAGGTGAACCTGAACGGGGTG TTTGACATGACCATGAAGATCTGGAAGGTGCTGAGGTACGATGAGACCCGCACCAGGTGCAGACCCTGCGAGTGTGG CGGTAAACATATTAGGAACCAGCCTGTGATGCTGGATGTGACCGAGGAGCTGAGGCCCGATCACTTGGTGCTGGCCT GCACCCGCGCTGAGTTTGGCTCTAGCGATGAAGATACAGATTGAGGTACTGAAATGTGTGGGCGTGGCTTAAGGGTG GGAAAGAATATATAAGGTGGGGGTCTTATGTAGTTTTGTATCTGTTTTGCAGCAGCCGCCGCCGCCATGAGCACCAA CTCGTTTGATGGAAGCATTGTGAGCTCATATTTGACAACGCGCATGCCCCCATGGGCCGGGGTGCGTCAGAATGTGA TGGGCTCCAGCATTGATGGTCGCCCCGTCCTGCCCGCAAACTCTACTACCTTGACCTACGAGACCGTGTCTGGAACG CCGTTGGAGACTGCAGCCTCCGCCGCCGCTTCAGCCGCTGCAGCCACCGCCCGCGGGATTGTGACTGACTTTGCTTT CCTGAGCCCGCTTGCAAGCAGTGCAGCTTCCCGTTCATCCGCCCGCGATGACAAGTTGACGGCTCTTTTGGCACAAT TGGATTCTTTGACCCGGGAACTTAATGTCGTTTCTCAGCAGCTGTTGGATCTGCGCCAGCAGGTTTCTGCCCTGAAG GCTTCCTCCCCTCCCAATGCGGTTTAAAACATAAATAAAAAACCAGACTCTGTTTGGATTTGGATCAAGCAAGTGTC TTGCTGTCTTTATTTAGGGGTTTTGCGCGCGCGGTAGGCCCGGGACCAGCGGTCTCGGTCGTTGAGGGTCCTGTGTA TTTTTTCCAGGACGTGGTAAAGGTGACTCTGGATGTTCAGATACATGGGCATAAGCCCGTCTCTGGGGTGGAGGTAG CACCACTGCAGAGCTTCATGCTGCGGGGTGGTGTTGTAGATGATCCAGTCGTAGCAGGAGCGCTGGGCGTGGTGCCT AAAAATGTCTTTCAGTAGCAAGCTGATTGCCAGGGGCAGGCCCTTGGTGTAAGTGTTTACAAAGCGGTTAAGCTGGG ATGGGTGCATACGTGGGGATATGAGATGCATCTTGGACTGTATTTTTAGGTTGGCTATGTTCCCAGCCATATCCCTC CGGGGATTCATGTTGTGCAGAACCACCAGCACAGTGTATCCGGTGCACTTGGGAAATTTGTCATGTAGCTTAGAAGG AAATGCGTGGAAGAACTTGGAGACGCCCTTGTGACCTCCAAGATTTTCCATGCATTCGTCCATAATGATGGCAATGG GCCCACGGGCGGCGGCCTGGGCGAAGATATTTCTGGGATCACTAACGTCATAGTTGTGTTCCAGGATGAGATCGTCA TAGGCCATTTTTACAAAGCGCGGGCGGAGGGTGCCAGACTGCGGTATAATGGTTCCATCCGGCCCAGGGGCGTAGTT ACCCTCACAGATTTGCATTTCCCACGCTTTGAGTTCAGATGGGGGGATCATGTCTACCTGCGGGGCGATGAAGAAAA CGGTTTCCGGGGTAGGGGAGATCAGCTGGGAAGAAAGCAGGTTCCTGAGCAGCTGCGACTTACCGCAGCCGGTGGGC CCGTAAATCACACCTATTACCGGGTGCAACTGGTAGTTAAGAGAGCTGCAGCTGCCGTCATCCCTGAGCAGGGGGGC CACTTCGTTAAGCATGTCCCTGACTCGCATGTTTTCCCTGACCAAATCCGCCAGAAGGCGCTCGCCGCCCAGCGATA GCAGTTCTTGCAAGGAAGCAAAGTTTTTCAACGGTTTGAGACCGTCCGCCGTAGGCATGCTTTTGAGCGTTTGACCA AGCAGTTCCAGGCGGTCCCACAGCTCGGTCACCTGCTCTACGGCATCTCGATCCAGCATATCTCCTCGTTTCGCGGG TTGGGGCGGCTTTCGCTGTACGGCAGTAGTCGGTGCTCGTCCAGACGGGCCAGGGTCATGTCTTTCCACGGGCGCAG GGTCCTCGTCAGCGTAGTCTGGGTCACGGTGAAGGGGTGCGCTCCGGGCTGCGCGCTGGCCAGGGTGCGCTTGAGGC TGGTCCTGCTGGTGCTGAAGCGCTGCCGGTCTTCGCCCTGCGCGTCGGCCAGGTAGCATTTGACCATGGTGTCATAG TCCAGCCCCTCCGCGGCGTGGCCCTTGGCGCGCAGCTTGCCCTTGGAGGAGGCGCCGCACGAGGGGCAGTGCAGACT TTTGAGGGCGTAGAGCTTGGGCGCGAGAAATACCGATTCCGGGGAGTAGGCATCCGCGCCGCAGGCCCCGCAGACGG TCTCGCATTCCACGAGCCAGGTGAGCTCTGGCCGTTCGGGGTCAAAAACCAGGTTTCCCCCATGCTTTTTGATGCGT TTCTTACCTCTGGTTTCCATGAGCCGGTGTCCACGCTCGGTGACGAAAAGGCTGTCCGTGTCCCCGTATACAGACTT GAGAGGCCTGTCCTCGAGCGGTGTTCCGCGGTCCTCCTCGTATAGAAACTCGGACCACTCTGAGACAAAGGCTCGCG TCCAGGCCAGCACGAAGGAGGCTAAGTGGGAGGGGTAGCGGTCGTTGTCCACTAGGGGGTCCACTCGCTCCAGGGTG TGAAGACACATGTCGCCCTCTTCGGCATCAAGGAAGGTGATTGGTTTGTAGGTGTAGGCCACGTGACCGGGTGTTCC TGAAGGGGGGCTATAAAAGGGGGTGGGGGCGCGTTCGTCCTCACTCTCTTCCGCATCGCTGTCTGCGAGGGCCAGCT GTTGGGGTGAGTACTCCCTCTGAAAAGCGGGCATGACTTCTGCGCTAAGATTGTCAGTTTCCAAAAACGAGGAGGAT TTGATATTCACCTGGCCCGCGGTGATGCCTTTGAGGGTGGCCGCATCCATCTGGTCAGAAAAGACAATCTTTTTGTT GTCAAGCTTGGTGGCAAACGACCCGTAGAGGGCGTTGGACAGCAACTTGGCGATGGAGCGCAGGGTTTGGTTTTTGT CGCGATCGGCGCGCTCCTTGGCCGCGATGTTTAGCTGCACGTATTCGCGCGCAACGCACCGCCATTCGGGAAAGACG GTGGTGCGCTCGTCGGGCACCAGGTGCACGCGCCAACCGCGGTTGTGCAGGGTGACAAGGTCAACGCTGGTGGCTAC CTCTCCGCGTAGGCGCTCGTTGGTCCAGCAGAGGCGGCCGCCCTTGCGCGAGCAGAATGGCGGTAGGGGGTCTAGCT GCGTCTCGTCCGGGGGGTCTGCGTCCACGGTAAAGACCCCGGGCAGCAGGCGCGCGTCGAAGTAGTCTATCTTGCAT CCTTGCAAGTCTAGCGCCTGCTGCCATGCGCGGGCGGCAAGCGCGCGCTCGTATGGGTTGAGTGGGGGACCCCATGG CATGGGGTGGGTGAGCGCGGAGGCGTACATGCCGCAAATGTCGTAAACGTAGAGGGGCTCTCTGAGTATTCCAAGAT ATGTAGGGTAGCATCTTCCACCGCGGATGCTGGCGCGCACGTAATCGTATAGTTCGTGCGAGGGAGCGAGGAGGTCG GGACCGAGGTTGCTACGGGCGGGCTGCTCTGCTCGGAAGACTATCTGCCTGAAGATGGCATGTGAGTTGGATGATAT GGTTGGACGCTGGAAGACGTTGAAGCTGGCGTCTGTGAGACCTACCGCGTCACGCACGAAGGAGGCGTAGGAGTCGC GCAGCTTGTTGACCAGCTCGGCGGTGACCTGCACGTCTAGGGCGCAGTAGTCCAGGGTTTCCTTGATGATGTCATAC TTATCCTGTCCCTTTTTTTTCCACAGCTCGCGGTTGAGGACAAACTCTTCGCGGTCTTTCCAGTACTCTTGGATCGG AAACCCGTCGGCCTCCGAACGGTAAGAGCCTAGCATGTAGAACTGGTTGACGGCCTGGTAGGCGCAGCATCCCTTTT CTACGGGTAGCGCGTATGCCTGCGCGGCCTTCCGGAGCGAGGTGTGGGTGAGCGCAAAGGTGTCCCTGACCATGACT TTGAGGTACTGGTATTTGAAGTCAGTGTCGTCGCATCCGCCCTGCTCCCAGAGCAAAAAGTCCGTGCGCTTTTTGGA ACGCGGATTTGGCAGGGCGAAGGTGACATCGTTGAAGAGTATCTTTCCCGCGCGAGGCATAAAGTTGCGTGTGATGC GGAAGGGTCCCGGCACCTCGGAACGGTTGTTAATTACCTGGGCGGCGAGCACGATCTCGTCAAAGCCGTTGATGTTG TGGCCCACAATGTAAAGTTCCAAGAAGCGCGGGATGCCCTTGATGGAAGGCAATTTTTTAAGTTCCTCGTAGGTGAG CTCTTCAGGGGAGCTGAGCCCGTGCTCTGAAAGGGCCCAGTCTGCAAGATGAGGGTTGGAAGCGACGAATGAGCTCC ACAGGTCACGGGCCATTAGCATTTGCAGGTGGTCGCGAAAGGTCCTAAACTGGCGACCTATGGCCATTTTTTCTGGG GTGATGCAGTAGAAGGTAAGCGGGTCTTGTTCCCAGCGGTCCCATCCAAGGTTCGCGGCTAGGTCTCGCGCGGCAGT CACTAGAGGCTCATCTCCGCCGAACTTCATGACCAGCATGAAGGGCACGAGCTGCTTCCCAAAGGCCCCCATCCAAG TATAGGTCTCTACATCGTAGGTGACAAAGAGACGCTCGGTGCGAGGATGCGAGCCGATCGGGAAGAACTGGATCTCC CGCCACCAATTGGAGGAGTGGCTATTGATGTGGTGAAAGTAGAAGTCCCTGCGACGGGCCGAACACTCGTGCTGGCT TTTGTAAAAACGTGCGCAGTACTGGCAGCGGTGCACGGGCTGTACATCCTGCACGAGGTTGACCTGACGACCGCGCA CAAGGAAGCAGAGTGGGAATTTGAGCCCCTCGCCTGGCGGGTTTGGCTGGTGGTCTTCTACTTCGGCTGCTTGTCCT TGACCGTCTGGCTGCTCGAGGGGAGTTACGGTGGATCGGACCACCACGCCGCGCGAGCCCAAAGTCCAGATGTCCGC GCGCGGCGGTCGGAGCTTGATGACAACATCGCGCAGATGGGAGCTGTCCATGGTCTGGAGCTCCCGCGGCGTCAGGT CAGGCGGGAGCTCCTGCAGGTTTACCTCGCATAGACGGGTCAGGGCGCGGGCTAGATCCAGGTGATACCTAATTTCC AGGGGCTGGTTGGTGGCGGCGTCGATGGCTTGCAAGAGGCCGCATCCCCGCGGCGCGACTACGGTACCGCGCGGCGG GCGGTGGGCCGCGGGGGTGTCCTTGGATGATGCATCTAAAAGCGGTGACGCGGGCGAGCCCCCGGAGGTAGGGGGGG CTCCGGACCCGCCGGGAGAGGGGGCAGGGGCACGTCGGCGCCGCGCGCGGGCAGGAGCTGGTGCTGCGCGCGTAGGT TGCTGGCGAACGCGACGACGCGGCGGTTGATCTCCTGAATCTGGCGCCTCTGCGTGAAGACGACGGGCCCGGTGAGC TTGAGCCTGAAAGAGAGTTCGACAGAATCAATTTCGGTGTCGTTGACGGCGGCCTGGCGCAAAATCTCCTGCACGTC TCCTGAGTTGTCTTGATAGGCGATCTCGGCCATGAACTGCTCGATCTCTTCCTCCTGGAGATCTCCGCGTCCGGCTC GCTCCACGGTGGCGGCGAGGTCGTTGGAAATGCGGGCCATGAGCTGCGAGAAGGCGTTGAGGCCTCCCTCGTTCCAG ACGCGGCTGTAGACCACGCCCCCTTCGGCATCGCGGGCGCGCATGACCACCTGCGCGAGATTGAGCTCCACGTGCCG GGCGAAGACGGCGTAGTTTCGCAGGCGCTGAAAGAGGTAGTTGAGGGTGGTGGCGGTGTGTTCTGCCACGAAGAAGT ACATAACCCAGCGTCGCAACGTGGATTCGTTGATATCCCCCAAGGCCTCAAGGCGCTCCATGGCCTCGTAGAAGTCC ACGGCGAAGTTGAAAAACTGGGAGTTGCGCGCCGACACGGTTAACTCCTCCTCCAGAAGACGGATGAGCTCGGCGAC AGTGTCGCGCACCTCGCGCTCAAAGGCTACAGGGGCCTCTTCTTCTTCTTCAATCTCCTCTTCCATAAGGGCCTCCC CTTCTTCTTCTTCTGGCGGCGGTGGGGGAGGGGGGACACGGCGGCGACGACGGCGCACCGGGAGGCGGTCGACAAAG CGCTCGATCATCTCCCCGCGGCGACGGCGCATGGTCTCGGTGACGGCGCGGCCGTTCTCGCGGGGGCGCAGTTGGAA GACGCCGCCCGTCATGTCCCGGTTATGGGTTGGCGGGGGGCTGCCATGCGGCAGGGATACGGCGCTAACGATGCATC TCAACAATTGTTGTGTAGGTACTCCGCCGCCGAGGGACCTGAGCGAGTCCGCATCGACCGGATCGGAAAACCTCTCG AGAAAGGCGTCTAACCAGTCACAGTCGCAAGGTAGGCTGAGCACCGTGGCGGGCGGCAGCGGGCGGCGGTCGGGGTT GTTTCTGGCGGAGGTGCTGCTGATGATGTAATTAAAGTAGGCGGTCTTGAGACGGCGGATGGTCGACAGAAGCACCA TGTCCTTGGGTCCGGCCTGCTGAATGCGCAGGCGGTCGGCCATGCCCCAGGCTTCGTTTTGACATCGGCGCAGGTCT TTGTAGTAGTCTTGCATGAGCCTTTCTACCGGCACTTCTTCTTCTCCTTCCTCTTGTCCTGCATCTCTTGCATCTAT CGCTGCGGCGGCGGCGGAGTTTGGCCGTAGGTGGCGCCCTCTTCCTCCCATGCGTGTGACCCCGAAGCCCCTCATCG GCTGAAGCAGGGCTAGGTCGGCGACAACGCGCTCGGCTAATATGGCCTGCTGCACCTGCGTGAGGGTAGACTGGAAG TCATCCATGTCCACAAAGCGGTGGTATGCGCCCGTGTTGATGGTGTAAGTGCAGTTGGCCATAACGGACCAGTTAAC GGTCTGGTGACCCGGCTGCGAGAGCTCGGTGTACCTGAGACGCGAGTAAGCCCTCGAGTCAAATACGTAGTCGTTGC AAGTCCGCACCAGGTACTGGTATCCCACCAAAAAGTGCGGCGGCGGCTGGCGGTAGAGGGGCCAGCGTAGGGTGGCC GGGGCTCCGGGGGCGAGATCTTCCAACATAAGGCGATGATATCCGTAGATGTACCTGGACATCCAGGTGATGCCGGC GGCGGTGGTGGAGGCGCGCGGAAAGTCGCGGACGCGGTTCCAGATGTTGCGCAGCGGCAAAAAGTGCTCCATGGTCG GGACGCTCTGGCCGGTCAGGCGCGCGCAATCGTTGACGCTCTAGACCGTGCAAAAGGAGAGCCTGTAAGCGGGCACT CTTCCGTGGTCTGGTGGATAAATTCGCAAGGGTATCATGGCGGACGACCGGGGTTCGAGCCCCGTATCCGGCCGTCC GCCGTGATCCATGCGGTTACCGCCCGCGTGTCGAACCCAGGTGTGCGACGTCAGACAACGGGGGAGTGCTCCTTTTG GCTTCCTTCCAGGCGCGGCGGCTGCTGCGCTAGCTTTTTTGGCCACTGGCCGCGCGCAGCGTAAGCGGTTAGGCTGG AAAGCGAAAGCATTAAGTGGCTCGCTCCCTGTAGCCGGAGGGTTATTTTCCAAGGGTTGAGTCGCGGGACCCCCGGT TCGAGTCTCGGACCGGCCGGACTGCGGCGAACGGGGGTTTGCCTCCCCGTCATGCAAGACCCCGCTTGCAAATTCCT CCGGAAACAGGGACGAGCCCCTTTTTTGCTTTTCCCAGATGCATCCGGTGCTGCGGCAGATGCGCCCCCCTCCTCAG CAGCGGCAAGAGCAAGAGCAGCGGCAGACATGCAGGGCACCCTCCCCTCCTCCTACCGCGTCAGGAGGGGCGACATC CGCGGTTGACGCGGCAGCAGATGGTGATTACGAACCCCCGCGGCGCCGGGCCCGGCACTACCTGGACTTGGAGGAGG GCGAGGGCCTGGCGCGGCTAGGAGCGCCCTCTCCTGAGCGGTACCCAAGGGTGCAGCTGAAGCGTGATACGCGTGAG GCGTACGTGCCGCGGCAGAACCTGTTTCGCGACCGCGAGGGAGAGGAGCCCGAGGAGATGCGGGATCGAAAGTTCCA CGCAGGGCGCGAGCTGCGGCATGGCCTGAATCGCGAGCGGTTGCTGCGCGAGGAGGACTTTGAGCCCGACGCGCGAA CCGGGATTAGTCCCGCGCGCGCACACGTGGCGGCCGCCGACCTGGTAACCGCATACGAGCAGACGGTGAACCAGGAG ATTAACTTTCAAAAAAGCTTTAACAACCACGTGCGTACGCTTGTGGCGCGCGAGGAGGTGGCTATAGGACTGATGCA TCTGTGGGACTTTGTAAGCGCGCTGGAGCAAAACCCAAATAGCAAGCCGCTCATGGCGCAGCTGTTCCTTATAGTGC AGCACAGCAGGGACAACGAGGCATTCAGGGATGCGCTGCTAAACATAGTAGAGCCCGAGGGCCGCTGGCTGCTCGAT TTGATAAACATCCTGCAGAGCATAGTGGTGCAGGAGCGCAGCTTGAGCCTGGCTGACAAGGTGGCCGCCATCAACTA TTCCATGCTTAGCCTGGGCAAGTTTTACGCCCGCAAGATATACCATACCCCTTACGTTCCCATAGACAAGGAGGTAA AGATCGAGGGGTTCTACATGCGCATGGCGCTGAAGGTGCTTACCTTGAGCGACGACCTGGGCGTTTATCGCAACGAG CGCATCCACAAGGCCGTGAGCGTGAGCCGGCGGCGCGAGCTCAGCGACCGCGAGCTGATGCACAGCCTGCAAAGGGC CCTGGCTGGCACGGGCAGCGGCGATAGAGAGGCCGAGTCCTACTTTGACGCGGGCGCTGACCTGCGCTGGGCCCCAA GCCGACGCGCCCTGGAGGCAGCTGGGGCCGGACCTGGGCTGGCGGTGGCACCCGCGCGCGCTGGCAACGTCGGCGGC GTGGAGGAATATGACGAGGACGATGAGTACGAGCCAGAGGACGGCGAGTACTAAGCGGTGATGTTTCTGATCAGATG ATGCAAGACGCAACGGACCCGGCGGTGCGGGCGGCGCTGCAGAGCCAGCCGTCCGGCCTTAACTCCACGGACGACTG GCGCCAGGTCATGGACCGCATCATGTCGCTGACTGCGCGCAATCCTGACGCGTTCCGGCAGCAGCCGCAGGCCAACC GGCTCTCCGCAATTCTGGAAGCGGTGGTCCCGGCGCGCGCAAACCCCACGCACGAGAAGGTGCTGGCGATCGTAAAC GCGCTGGCCGAAAACAGGGCCATCCGGCCCGACGAGGCCGGCCTGGTCTACGACGCGCTGCTTCAGCGCGTGGCTCG TTACAACAGCGGCAACGTGCAGACCAACCTGGACCGGCTGGTGGGGGATGTGCGCGAGGCCGTGGCGCAGCGTGAGC GCGCGCAGCAGCAGGGCAACCTGGGCTCCATGGTTGCACTAAACGCCTTCCTGAGTACACAGCCCGCCAACGTGCCG CGGGGACAGGAGGACTACACCAACTTTGTGAGCGCACTGCGGCTAATGGTGACTGAGACACCGCAAAGTGAGGTGTA CCAGTCTGGGCCAGACTATTTTTTCCAGACCAGTAGACAAGGCCTGCAGACCGTAAACCTGAGCCAGGCTTTCAAAA ACTTGCAGGGGCTGTGGGGGGTGCGGGCTCCCACAGGCGACCGCGCGACCGTGTCTAGCTTGCTGACGCCCAACTCG CGCCTGTTGCTGCTGCTAATAGCGCCCTTCACGGACAGTGGCAGCGTGTCCCGGGACACATACCTAGGTCACTTGCT GACACTGTACCGCGAGGCCATAGGTCAGGCGCATGTGGACGAGCATACTTTCCAGGAGATTACAAGTGTCAGCCGCG CGCTGGGGCAGGAGGACACGGGCAGCCTGGAGGCAACCCTAAACTACCTGCTGACCAACCGGCGGCAGAAGATCCCC TCGTTGCACAGTTTAAACAGCGAGGAGGAGCGCATTTTGCGCTACGTGCAGCAGAGCGTGAGCCTTAACCTGATGCG CGACGGGGTAACGCCCAGCGTGGCGCTGGACATGACCGCGCGCAACATGGAACCGGGCATGTATGCCTCAAACCGGC CGTTTATCAACCGCCTAATGGACTACTTGCATCGCGCGGCCGCCGTGAACCCCGAGTATTTCACCAATGCCATCTTG AACCCGCACTGGCTACCGCCCCCTGGTTTCTACACCGGGGGATTCGAGGTGCCCGAGGGTAACGATGGATTCCTCTG GGACGACATAGACGACAGCGTGTTTTCCCCGCAACCGCAGACCCTGCTAGAGTTGCAACAGCGCGAGCAGGCAGAGG CGGCGCTGCGAAAGGAAAGCTTCCGCAGGCCAAGCAGCTTGTCCGATCTAGGCGCTGCGGCCCCGCGGTCAGATGCT AGTAGCCCATTTCCAAGCTTGATAGGGTCTCTTACCAGCACTCGCACCACCCGCCCGCGCCTGCTGGGCGAGGAGGA GTACCTAAACAACTCGCTGCTGCAGCCGCAGCGCGAAAAAAACCTGCCTCCGGCATTTCCCAACAACGGGATAGAGA GCCTAGTGGACAAGATGAGTAGATGGAAGACGTACGCGCAGGAGCACAGGGACGTGCCAGGCCCGCGCCCGCCCACC CGTCGTCAAAGGCACGACCGTCAGCGGGGTCTGGTGTGGGAGGACGATGACTCGGCAGACGACAGCAGCGTCCTGGA TTTGGGAGGGAGTGGCAACCCGTTTGCGCACCTTCGCCCCAGGCTGGGGAGAATGTTTTAAAAAAAAAAAAGCATGA TGCAAAATAAAAAACTCACCAAGGCCATGGCACCGAGCGTTGGTTTTCTTGTATTCCCCTTAGTATGCGGCGCGCGG CGATGTATGAGGAAGGTCCTCCTCCCTCCTACGAGAGTGTGGTGAGCGCGGCGCCAGTGGCGGCGGCGCTGGGTTCT CCCTTCGATGCTCCCCTGGACCCGCCGTTTGTGCCTCCGCGGTACCTGCGGCCTACCGGGGGGAGAAACAGCATCCG TTACTCTGAGTTGGCACCCCTATTCGACACCACCCGTGTGTACCTGGTGGACAACAAGTCAACGGATGTGGCATCCC TGAACTACCAGAACGACCACAGCAACTTTCTGACCACGGTCATTCAAAACAATGACTACAGCCCGGGGGAGGCAAGC ACACAGACCATCAATCTTGACGACCGGTCGCACTGGGGCGGCGACCTGAAAACCATCCTGCATACCAACATGCCAAA TGTGAACGAGTTCATGTTTACCAATAAGTTTAAGGCGCGGGTGATGGTGTCGCGCTTGCCTACTAAGGACAATCAGG TGGAGCTGAAATACGAGTGGGTGGAGTTCACGCTGCCCGAGGGCAACTACTCCGAGACCATGACCATAGACCTTATG AACAACGCGATCGTGGAGCACTACTTGAAAGTGGGCAGACAGAACGGGGTTCTGGAAAGCGACATCGGGGTAAAGTT TGACACCCGCAACTTCAGACTGGGGTTTGACCCCGTCACTGGTCTTGTCATGCCTGGGGTATATACAAACGAAGCCT TCCATCCAGACATCATTTTGCTGCCAGGATGCGGGGTGGACTTCACCCACAGCCGCCTGAGCAACTTGTTGGGCATC CGCAAGCGGCAACCCTTCCAGGAGGGCTTTAGGATCACCTACGATGATCTGGAGGGTGGTAACATTCCCGCACTGTT GGATGTGGACGCCTACCAGGCGAGCTTGAAAGATGACACCGAACAGGGGGGGGGTGGCGCAGGCGGCAGCAACAGCA GTGGCAGCGGCGCGGAAGAGAACTCCAACGCGGCAGCCGCGGCAATGCAGCCGGTGGAGGACATGAACGATCATGCC ATTCGCGGCGACACCTTTGCCACACGGGCTGAGGAGAAGCGCGCTGAGGCCGAAGCAGCGGCCGAAGCTGCCGCCCC CGCTGCGCAACCCGAGGTCGAGAAGCCTCAGAAGAAACCGGTGATCAAACCCCTGACAGAGGACAGCAAGAAACGCA GTTACAACCTAATAAGCAATGACAGCACCTTCACCCAGTACCGCAGCTGGTACCTTGCATACAACTACGGCGACCCT CAGACCGGAATCCGCTCATGGACCCTGCTTTGCACTCCTGACGTAACCTGCGGCTCGGAGCAGGTCTACTGGTCGTT GCCAGACATGATGCAAGACCCCGTGACCTTCCGCTCCACGCGCCAGATCAGCAACTTTCCGGTGGTGGGCGCCGAGC TGTTGCCCGTGCACTCCAAGAGCTTCTACAACGACCAGGCCGTCTACTCCCAACTCATCCGCCAGTTTACCTCTCTG ACCCACGTGTTCAATCGCTTTCCCGAGAACCAGATTTTGGCGCGCCCGCCAGCCCCCACCATCACCACCGTCAGTGA AAACGTTCCTGCTCTCACAGATCACGGGACGCTACCGCTGCGCAACAGCATCGGAGGAGTCCAGCGAGTGACCATTA CTGACGCCAGACGCCGCACCTGCCCCTACGTTTACAAGGCCCTGGGCATAGTCTCGCCGCGCGTCCTATCGAGCCGC ACTTTTTGAGCAAGCATGTCCATCCTTATATCGCCCAGCAATAACACAGGCTGGGGCCTGCGCTTCCCAAGCAAGAT GTTTGGCGGGGCCAAGAAGCGCTCCGACCAACACCCAGTGCGCGTGCGCGGGCACTACCGCGCGCCCTGGGGCGCGC ACAAACGCGGCCGCACTGGGCGCACCACCGTCGATGACGCCATCGACGCGGTGGTGGAGGAGGCGCGCAACTACACG CCCACGCCGCCACCAGTGTCCACAGTGGACGCGGCCATTCAGACCGTGGTGCGCGGAGCCCGGCGCTATGCTAAAAT GAAGAGACGGCGGAGGCGCGTAGCACGTCGCCACCGCCGCCGACCCGGCACTGCCGCCCAACGCGCGGCGGCGGCCC TGCTTAACCGCGCACGTCGCACCGGCCGACGGGCGGCCATGCGGGCCGCTCGAAGGCTGGCCGCGGGTATTGTCACT GTGCCCCCCAGGTCCAGGCGACGAGCGGCCGCCGCAGCAGCCGCGGCCATTAGTGCTATGACTCAGGGTCGCAGGGG CAACGTGTATTGGGTGCGCGACTCGGTTAGCGGCCTGCGCGTGCCCGTGCGCACCCGCCCCCCGCGCAACTAGATTG CAAGAAAAAACTACTTAGACTCGTACTGTTGTATGTATCCAGCGGCGGCGGCGCGCAACGAAGCTATGTCCAAGCGC AAAATCAAAGAAGAGATGCTCCAGGTCATCGCGCCGGAGATCTATGGCCCCCCGAAGAAGGAAGAGCAGGATTACAA GCCCCGAAAGCTAAAGCGGGTCAAAAAGAAAAAGAAAGATGATGATGATGAACTTGACGACGAGGTGGAACTGCTGC ACGCTACCGCGCCCAGGCGACGGGTACAGTGGAAAGGTCGACGCGTAAAACGTGTTTTGCGACCCGGCACCACCGTA GTCTTTACGCCCGGTGAGCGCTCCACCCGCACCTACAAGCGCGTGTATGATGAGGTGTACGGCGACGAGGACCTGCT TGAGCAGGCCAACGAGCGCCTCGGGGAGTTTGCCTACGGAAAGCGGCATAAGGACATGCTGGCGTTGCCGCTGGACG AGGGCAACCCAACACCTAGCCTAAAGCCCGTAACACTGCAGCAGGTGCTGCCCGCGCTTGCACCGTCCGAAGAAAAG CGCGGCCTAAAGCGCGAGTCTGGTGACTTGGCACCCACCGTGCAGCTGATGGTACCCAAGCGCCAGCGACTGGAAGA TGTCTTGGAAAAAATGACCGTGGAACCTGGGCTGGAGCCCGAGGTCCGCGTGCGGCCAATCAAGCAGGTGGCGCCGG GACTGGGCGTGCAGACCGTGGACGTTCAGATACCCACTACCAGTAGCACCAGTATTGCCACCGCCACAGAGGGCATG GAGACACAAACGTCCCCGGTTGCCTCAGCGGTGGCGGATGCCGCGGTGCAGGCGGTCGCTGCGGCCGCGTCCAAGAC CTCTACGGAGGTGCAAACGGACCCGTGGATGTTTCGCGTTTCAGCCCCCCGGCGCCCGCGCGGTTCGAGGAAGTACG GCGCCGCCAGCGCGCTACTGCCCGAATATGCCCTACATCCTTCCATTGCGCCTACCCCCGGCTATCGTGGCTACACC TACCGCCCCAGAAGACGAGCAACTACCCGACGCCGAACCACCACTGGAACCCGCCGCCGCCGTCGCCGTCGCCAGCC CGTGCTGGCCCCGATTTCCGTGCGCAGGGTGGCTCGCGAAGGAGGCAGGACCCTGGTGCTGCCAACAGCGCGCTACC ACCCCAGCATCGTTTAAAAGCCGGTCTTTGTGGTTCTTGCAGATATGGCCCTCACCTGCCGCCTCCGTTTCCCGGTG CCGGGATTCCGAGGAAGAATGCACCGTAGGAGGGGCATGGCCGGCCACGGCCTGACGGGCGGCATGCGTCGTGCGCA CCACCGGCGGCGGCGCGCGTCGCACCGTCGCATGCGCGGCGGTATCCTGCCCCTCCTTATTCCACTGATCGCCGCGG CGATTGGCGCCGTGCCCGGAATTGCATCCGTGGCCTTGCAGGCGCAGAGACACTGATTAAAAACAAGTTGCATGTGG AAAAATCAAAATAAAAAGTCTGGACTCTCACGCTCGCTTGGTCCTGTAACTATTTTGTAGAATGGAAGACATCAACT TTGCGTCTCTGGCCCCGCGACACGGCTCGCGCCCGTTCATGGGAAACTGGCAAGATATCGGCACCAGCAATATGAGC GGTGGCGCCTTCAGCTGGGGCTCGCTGTGGAGCGGCATTAAAAATTTCGGTTCCACCGTTAAGAACTATGGCAGCAA GGCCTGGAACAGCAGCACAGGCCAGATGCTGAGGGATAAGTTGAAAGAGCAAAATTTCCAACAAAAGGTGGTAGATG GCCTGGCCTCTGGCATTAGCGGGGTGGTGGACCTGGCCAACCAGGCAGTGCAAAATAAGATTAACAGTAAGCTTGAT CCCCGCCCTCCCGTAGAGGAGCCTCCACCGGCCGTGGAGACAGTGTCTCCAGAGGGGCGTGGCGAAAAGCGTCCGCG CCCCGACAGGGAAGAAACTCTGGTGACGCAAATAGACGAGCCTCCCTCGTACGAGGAGGCACTAAAGCAAGGCCTGC CCACCACCCGTCCCATCGCGCCCATGGCTACCGGAGTGCTGGGCCAGCACACACCCGTAACGCTGGACCTGCCTCCC CCCGCCGACACCCAGCAGAAACCTGTGCTGCCAGGCCCGACCGCCGTTGTTGTAACCCGTCCTAGCCGCGCGTCCCT GCGCCGCGCCGCCAGCGGTCCGCGATCGTTGCGGCCCGTAGCCAGTGGCAACTGGCAAAGCACACTGAACAGCATCG TGGGTCTGGGGGTGCAATCCCTGAAGCGCCGACGATGCTTCTGAATAGCTAACGTGTCGTATGTGTGTCATGTATGC GTCCATGTCGCCGCCAGAGGAGCTGCTGAGCCGCCGCGCGCCCGCTTTCCAAGATGGCTACCCCTTCGATGATGCCG CAGTGGTCTTACATGCACATCTCGGGCCAGGACGCCTCGGAGTACCTGAGCCCCGGGCTGGTGCAGTTTGCCCGCGC CACCGAGACGTACTTCAGCCTGAATAACAAGTTTAGAAACCCCACGGTGGCGCCTACGCACGACGTGACCACAGACC GGTCCCAGCGTTTGACGCTGCGGTTCATCCCTGTGGACCGTGAGGATACTGCGTACTCGTACAAGGCGCGGTTCACC CTAGCTGTGGGTGATAACCGTGTGCTGGACATGGCTTCCACGTACTTTGACATCCGCGGCGTGCTGGACAGGGGCCC TACTTTTAAGCCCTACTCTGGCACTGCCTACAACGCCCTGGCTCCCAAGGGTGCCCCAAATCCTTGCGAATGGGATG AAGCTGCTACTGCTCTTGAAATAAACCTAGAAGAAGAGGACGATGACAACGAAGACGAAGTAGACGAGCAAGCTGAG CAGCAAAAAACTCACGTATTTGGGCAGGCGCCTTATTCTGGTATAAATATTACAAAGGAGGGTATTCAAATAGGTGT CGAAGGTCAAACACCTAAATATGCCGATAAAACATTTCAACCTGAACCTCAAATAGGAGAATCTCAGTGGTACGAAA CTGAAATTAATCATGCAGCTGGGAGAGTCCTTAAAAAGACTACCCCAATGAAACCATGTTACGGTTCATATGCAAAA CCCACAAATGAAAATGGAGGGCAAGGCATTCTTGTAAAGCAACAAAATGGAAAGCTAGAAAGTCAAGTGGAAATGCA ATTTTTCTCAACTACTGAGGCGACCGCAGGCAATGGTGATAACTTGACTCCTAAAGTGGTATTGTACAGTGAAGATG TAGATATAGAAACCCCAGACACTCATATTTCTTACATGCCCACTATTAAGGAAGGTAACTCACGAGAACTAATGGGC CAACAATCTATGCCCAACAGGCCTAATTACATTGCTTTTAGGGACAATTTTATTGGTCTAATGTATTACAACAGCAC GGGTAATATGGGTGTTCTGGCGGGCCAAGCATCGCAGTTGAATGCTGTTGTAGATTTGCAAGACAGAAACACAGAGC TTTCATACCAGCTTTTGCTTGATTCCATTGGTGATAGAACCAGGTACTTTTCTATGTGGAATCAGGCTGTTGACAGC TATGATCCAGATGTTAGAATTATTGAAAATCATGGAACTGAAGATGAACTTCCAAATTACTGCTTTCCACTGGGAGG TGTGATTAATACAGAGACTCTTACCAAGGTAAAACCTAAAACAGGTCAGGAAAATGGATGGGAAAAAGATGCTACAG AATTTTCAGATAAAAATGAAATAAGAGTTGGAAATAATTTTGCCATGGAAATCAATCTAAATGCCAACCTGTGGAGA AATTTCCTGTACTCCAACATAGCGCTGTATTTGCCCGACAAGCTAAAGTACAGTCCTTCCAACGTAAAAATTTCTGA TAACCCAAACACCTACGACTACATGAACAAGCGAGTGGTGGCTCCCGGGTTAGTGGACTGCTACATTAACCTTGGAG CACGCTGGTCCCTTGACTATATGGACAACGTCAACCCATTTAACCACCACCGCAATGCTGGCCTGCGCTACCGCTCA ATGTTGCTGGGCAATGGTCGCTATGTGCCCTTCCACATCCAGGTGCCTCAGAAGTTCTTTGCCATTAAAAACCTCCT TCTCCTGCCGGGCTCATACACCTACGAGTGGAACTTCAGGAAGGATGTTAACATGGTTCTGCAGAGCTCCCTAGGAA ATGACCTAAGGGTTGACGGAGCCAGCATTAAGTTTGATAGCATTTGCCTTTACGCCACCTTCTTCCCCATGGCCCAC AACACCGCCTCCACGCTTGAGGCCATGCTTAGAAACGACACCAACGACCAGTCCTTTAACGACTATCTCTCCGCCGC CAACATGCTCTACCCTATACCCGCCAACGCTACCAACGTGCCCATATCCATCCCCTCCCGCAACTGGGCGGCTTTCC GCGGCTGGGCCTTCACGCGCCTTAAGACTAAGGAAACCCCATCACTGGGCTCGGGCTACGACCCTTATTACACCTAC TCTGGCTCTATACCCTACCTAGATGGAACCTTTTACCTCAACCACACCTTTAAGAAGGTGGCCATTACCTTTGACTC TTCTGTCAGCTGGCCTGGCAATGACCGCCTGCTTACCCCCAACGAGTTTGAAATTAAGCGCTCAGTTGACGGGGAGG GTTACAACGTTGCCCAGTGTAACATGACCAAAGACTGGTTCCTGGTACAAATGCTAGCTAACTACAACATTGGCTAC CAGGGCTTCTATATCCCAGAGAGCTACAAGGACCGCATGTACTCCTTCTTTAGAAACTTCCAGCCCATGAGCCGTCA GGTGGTGGATGATACTAAATACAAGGACTACCAACAGGTGGGCATCCTACACCAACACAACAACTCTGGATTTGTTG GCTACCTTGCCCCCACCATGCGCGAAGGACAGGCCTACCCTGCTAACTTCCCCTATCCGCTTATAGGCAAGACCGCA GTTGACAGCATTACCCAGAAAAAGTTTCTTTGCGATCGCACCCTTTGGCGCATCCCATTCTCCAGTAACTTTATGTC CATGGGCGCACTCACAGACCTGGGCCAAAACCTTCTCTACGCCAACTCCGCCCACGCGCTAGACATGACTTTTGAGG TGGATCCCATGGACGAGCCCACCCTTCTTTATGTTTTGTTTGAAGTCTTTGACGTGGTCCGTGTGCACCGGCCGCAC CGCGGCGTCATCGAAACCGTGTACCTGCGCACGCCCTTCTCGGCCGGCAACGCCACAACATAAAGAAGCAAGCAACA TCAACAACAGCTGCCGCCATGGGCTCCAGTGAGCAGGAACTGAAAGCCATTGTCAAAGATCTTGGTTGTGGGCCATA TTTTTTGGGCACCTATGACAAGCGCTTTCCAGGCTTTGTTTCTCCACACAAGCTCGCCTGCGCCATAGTCAATACGG CCGGTCGCGAGACTGGGGGCGTACACTGGATGGCCTTTGCCTGGAACCCGCACTCAAAAACATGCTACCTCTTTGAG CCCTTTGGCTTTTCTGACCAGCGACTCAAGCAGGTTTACCAGTTTGAGTACGAGTCACTCCTGCGCCGTAGCGCCAT TGCTTCTTCCCCCGACCGCTGTATAACGCTGGAAAAGTCCACCCAAAGCGTACAGGGGCCCAACTCGGCCGCCTGTG GACTATTCTGCTGCATGTTTCTCCACGCCTTTGCCAACTGGCCCCAAACTCCCATGGATCACAACCCCACCATGAAC CTTATTACCGGGGTACCCAACTCCATGCTCAACAGTCCCCAGGTACAGCCCACCCTGCGTCGCAACCAGGAACAGCT CTACAGCTTCCTGGAGCGCCACTCGCCCTACTTCCGCAGCCACAGTGCGCAGATTAGGAGCGCCACTTCTTTTTGTC ACTTGAAAAACATGTAAAAATAATGTACTAGAGACACTTTCAATAAAGGCAAATGCTTTTATTTGTACACTCTCGGG TGATTATTTACCCCCACCCTTGCCGTCTGCGCCGTTTAAAAATCAAAGGGGTTCTGCCGCGCATCGCTATGCGCCAC TGGCAGGGACACGTTGCGATACTGGTGTTTAGTGCTCCACTTAAACTCAGGCACAACCATCCGCGGCAGCTCGGTGA AGTTTTCACTCCACAGGCTGCGCACCATCACCAACGCGTTTAGCAGGTCGGGCGCCGATATCTTGAAGTCGCAGTTG GGGCCTCCGCCCTGCGCGCGCGAGTTGCGATACACAGGGTTGCAGCACTGGAACACTATCAGCGCCGGGTGGTGCAC GCTGGCCAGCACGCTCTTGTCGGAGATCAGATCCGCGTCCAGGTCCTCCGCGTTGCTCAGGGCGAACGGAGTCAACT TTGGTAGCTGCCTTCCCAAAAAGGGCGCGTGCCCAGGCTTTGAGTTGCACTCGCACCGTAGTGGCATCAAAAGGTGA CCGTGCCCGGTCTGGGCGTTAGGATACAGCGCCTGCATAAAAGCCTTGATCTGCTTAAAAGCCACCTGAGCCTTTGC GCCTTCAGAGAAGAACATGCCGCAAGACTTGCCGGAAAACTGATTGGCCGGACAGGCCGCGTCGTGCACGCAGCACC TTGCGTCGGTGTTGGAGATCTGCACCACATTTCGGCCCCACCGGTTCTTCACGATCTTGGCCTTGCTAGACTGCTCC TTCAGCGCGCGCTGCCCGTTTTCGCTCGTCACATCCATTTCAATCACGTGCTCCTTATTTATCATAATGCTTCCGTG TAGACACTTAAGCTCGCCTTCGATCTCAGCGCAGCGGTGCAGCCACAACGCGCAGCCCGTGGGCTCGTGATGCTTGT AGGTCACCTCTGCAAACGACTGCAGGTACGCCTGCAGGAATCGCCCCATCATCGTCACAAAGGTCTTGTTGCTGGTG AAGGTCAGCTGCAACCCGCGGTGCTCCTCGTTCAGCCAGGTCTTGCATACGGCCGCCAGAGCTTCCACTTGGTCAGG CAGTAGTTTGAAGTTCGCCTTTAGATCGTTATCCACGTGGTACTTGTCCATCAGCGCGCGCGCAGCCTCCATGCCCT TCTCCCACGCAGACACGATCGGCACACTCAGCGGGTTCATCACCGTAATTTCACTTTCCGCTTCGCTGGGCTCTTCC TCTTCCTCTTGCGTCCGCATACCACGCGCCACTGGGTCGTCTTCATTCAGCCGCCGCACTGTGCGCTTACCTCCTTT GCCATGCTTGATTAGCACCGGTGGGTTGCTGAAACCCACCATTTGTAGCGCCACATCTTCTCTTTCTTCCTCGCTGT CCACGATTACCTCTGGTGATGGCGGGCGCTCGGGCTTGGGAGAAGGGCGCTTCTTTTTCTTCTTGGGCGCAATGGCC AAATCCGCCGCCGAGGTCGATGGCCGCGGGCTGGGTGTGCGCGGCACCAGCGCGTCTTGTGATGAGTCTTCCTCGTC CTCGGACTCGATACGCCGCCTCATCCGCTTTTTTGGGGGCGCCCGGGGAGGCGGCGGCGACGGGGACGGGGACGACA CGTCCTCCATGGTTGGGGGACGTCGCGCCGCACCGCGTCCGCGCTCGGGGGTGGTTTCGCGCTGCTCCTCTTCCCGA CTGGCCATTTCCTTCTCCTATAGGCAGAAAAAGATCATGGAGTCAGTCGAGAAGAAGGACAGCCTAACCGCCCCCTC TGAGTTCGCCACCACCGCCTCCACCGATGCCGCCAACGCGCCTACCACCTTCCCCGTCGAGGCACCCCCGCTTGAGG AGGAGGAAGTGATTATCGAGCAGGACCCAGGTTTTGTAAGCGAAGACGACGAGGACCGCTCAGTACCAACAGAGGAT AAAAAGCAAGACCAGGACAACGCAGAGGCAAACGAGGAACAAGTCGGGCGGGGGGACGAAAGGCATGGCGACTACCT AGATGTGGGAGACGACGTGCTGTTGAAGCATCTGCAGCGCCAGTGCGCCATTATCTGCGACGCGTTGCAAGAGCGCA GCGATGTGCCCCTCGCCATAGCGGATGTCAGCCTTGCCTACGAACGCCACCTATTCTCACCGCGCGTACCCCCCAAA CGCCAAGAAAACGGCACATGCGAGCCCAACCCGCGCCTCAACTTCTACCCCGTATTTGCCGTGCCAGAGGTGCTTGC CACCTATCACATCTTTTTCCAAAACTGCAAGATACCCCTATCCTGCCGTGCCAACCGCAGCCGAGCGGACAAGCAGC TGGCCTTGCGGCAGGGCGCTGTCATACCTGATATCGCCTCGCTCAACGAAGTGCCAAAAATCTTTGAGGGTCTTGGA CGCGACGAGAAGCGCGCGGCAAACGCTCTGCAACAGGAAAACAGCGAAAATGAAAGTCACTCTGGAGTGTTGGTGGA ACTCGAGGGTGACAACGCGCGCCTAGCCGTACTAAAACGCAGCATCGAGGTCACCCACTTTGCCTACCCGGCACTTA ACCTACCCCCCAAGGTCATGAGCACAGTCATGAGTGAGCTGATCGTGCGCCGTGCGCAGCCCCTGGAGAGGGATGCA AATTTGCAAGAACAAACAGAGGAGGGCCTACCCGCAGTTGGCGACGAGCAGCTAGCGCGCTGGCTTCAAACGCGCGA GCCTGCCGACTTGGAGGAGCGACGCAAACTAATGATGGCCGCAGTGCTCGTTACCGTGGAGCTTGAGTGCATGCAGC GGTTCTTTGCTGACCCGGAGATGCAGCGCAAGCTAGAGGAAACATTGCACTACACCTTTCGACAGGGCTACGTACGC CAGGCCTGCAAGATCTCCAACGTGGAGCTCTGCAACCTGGTCTCCTACCTTGGAATTTTGCACGAAAACCGCCTTGG GCAAAACGTGCTTCATTCCACGCTCAAGGGCGAGGCGCGCCGCGACTACGTCCGCGACTGCGTTTACTTATTTCTAT GCTACACCTGGCAGACGGCCATGGGCGTTTGGCAGCAGTGCTTGGAGGAGTGCAACCTCAAGGAGCTGCAGAAACTG CTAAAGCAAAACTTGAAGGACCTATGGACGGCCTTCAACGAGCGCTCCGTGGCCGCGCACCTGGCGGACATCATTTT CCCCGAACGCCTGCTTAAAACCCTGCAACAGGGTCTGCCAGACTTCACCAGTCAAAGCATGTTGCAGAACTTTAGGA ACTTTATCCTAGAGCGCTCAGGAATCTTGCCCGCCACCTGCTGTGCACTTCCTAGCGACTTTGTGCCCATTAAGTAC CGCGAATGCCCTCCGCCGCTTTGGGGCCACTGCTACCTTCTGCAGCTAGCCAACTACCTTGCCTACCACTCTGACAT AATGGAAGACGTGAGCGGTGACGGTCTACTGGAGTGTCACTGTCGCTGCAACCTATGCACCCCGCACCGCTCCCTGG TTTGCAATTCGCAGCTGCTTAACGAAAGTCAAATTATCGGTACCTTTGAGCTGCAGGGTCCCTCGCCTGACGAAAAG TCCGCGGCTCCGGGGTTGAAACTCACTCCGGGGCTGTGGACGTCGGCTTACCTTCGCAAATTTGTACCTGAGGACTA CCACGCCCACGAGATTAGGTTCTACGAAGACCAATCCCGCCCGCCAAATGCGGAGCTTACCGCCTGCGTCATTACCC AGGGCCACATTCTTGGCCAATTGCAAGCCATCAACAAAGCCCGCCAAGAGTTTCTGCTACGAAAGGGACGGGGGGTT TACTTGGACCCCCAGTCCGGCGAGGAGCTCAACCCAATCCCCCCGCCGCCGCAGCCCTATCAGCAGCAGCCGCGGGC CCTTGCTTCCCAGGATGGCACCCAAAAAGAAGCTGCAGCTGCCGCCGCCACCCACGGACGAGGAGGAATACTGGGAC AGTCAGGCAGAGGAGGTTTTGGACGAGGAGGAGGAGGACATGATGGAAGACTGGGAGAGCCTAGACGAGGAAGCTTC CGAGGTCGAAGAGGTGTCAGACGAAACACCGTCACCCTCGGTCGCATTCCCCTCGCCGGCGCCCCAGAAATCGGCAA CCGGTTCCAGCATGGCTACAACCTCCGCTCCTCAGGCGCCGCCGGCACTGCCCGTTCGCCGACCCAACCGTAGATGG GACACCACTGGAACCAGGGCCGGTAAGTCCAAGCAGCCGCCGCCGTTAGCCCAAGAGCAACAACAGCGCCAAGGCTA CCGCTCATGGCGCGGGCACAAGAACGCCATAGTTGCTTGCTTGCAAGACTGTGGGGGCAACATCTCCTTCGCCCGCC GCTTTCTTCTCTACCATCACGGCGTGGCCTTCCCCCGTAACATCCTGCATTACTACCGTCATCTCTACAGCCCATAC TGCACCGGCGGCAGCGGCAGCGGCAGCAACAGCAGCGGCCACACAGAAGCAAAGGCGACCGGATAGCAAGACTCTGA CAAAGCCCAAGAAATCCACAGCGGCGGCAGCAGCAGGAGGAGGAGCGCTGCGTCTGGCGCCCAACGAACCCGTATCG ACCCGCGAGCTTAGAAACAGGATTTTTCCCACTCTGTATGCTATATTTCAACAGAGCAGGGGCCAAGAACAAGAGCT GAAAATAAAAAACAGGTCTCTGCGATCCCTCACCCGCAGCTGCCTGTATCACAAAAGCGAAGATCAGCTTCGGCGCA CGCTGGAAGACGCGGAGGCTCTCTTCAGTAAATACTGCGCGCTGACTCTTAAGGACTAGTTTCGCGCCCTTTCTCAA ATTTAAGCGCGAAAACTACGTCATCTCCAGCGGCCACACCCGGCGCCAGCACCTGTCGTCAGCGCCATTATGAGCAA GGAAATTCCCACGCCCTACATGTGGAGTTACCAGCCACAAATGGGACTTGCGGCTGGAGCTGCCCAAGACTACTCAA CCCGAATAAACTACATGAGCGCGGGACCCCACATGATATCCCGGGTCAACGGAATCCGCGCCCACCGAAACCGAATT CTCTTGGAACAGGCGGCTATTACCACCACACCTCGTAATAACCTTAATCCCCGTAGTTGGCCCGCTGCCCTGGTGTA CCAGGAAAGTCCCGCTCCCACCACTGTGGTACTTCCCAGAGACGCCCAGGCCGAAGTTCAGATGACTAACTCAGGGG CGCAGCTTGCGGGCGGCTTTCGTCACAGGGTGCGGTCGCCCGGGCAGGGTATAACTCACCTGACAATCAGAGGGCGA GGTATTCAGCTCAACGACGAGTCGGTGAGCTCCTCGCTTGGTCTCCGTCCGGACGGGACATTTCAGATCGGCGGCGC CGGCCGTCCTTCATTCACGCCTCGTCAGGCAATCCTAACTCTGCAGACCTCGTCCTCTGAGCCGCGCTCTGGAGGCA TTGGAACTCTGCAATTTATTGAGGAGTTTGTGCCATCGGTCTACTTTAACCCCTTCTCGGGACCTCCCGGCCACTAT CCGGATCAATTTATTCCTAACTTTGACGCGGTAAAGGACTCGGCGGACGGCTACGACTGAATGTTAAGTGGAGAGGC AGAGCAACTGCGCCTGAAACACCTGGTCCACTGTCGCCGCCACAAGTGCTTTGCCCGCGACTCCGGTGAGTTTTGCT ACTTTGAATTGCCCGAGGATCATATCGAGGGCCCGGCGCACGGCGTCCGGCTTACCGCCCAGGGAGAGCTTGCCCGT AGCCTGATTCGGGAGTTTACCCAGCGCCCCCTGCTAGTTGAGCGGGACAGGGGACCCTGTGTTCTCACTGTGATTTG CAACTGTCCTAACCTTGGATTACATCAAGATCTTTGTTGCCATCTCTGTGCTGAGTATAATAAATACAGAAATTAAA ATATACTGGGGCTCCTATCGCCATCCTGTAAACGCCACCGTCTTCACCCGCCCAAGCAAACCAAGGCGAACCTTACC TGGTACTTTTAACATCTCTCCCTCTGTGATTTACAACAGTTTCAACCCAGACGGAGTGAGTCTACGAGAGAACCTCT CCGAGCTCAGCTACTCCATCAGAAAAAACACCACCCTCCTTACCTGCCGGGAACGTACGAGTGCGTCACCGGCCGCT GCACCACACCTACCGCCTGACCGTAAACCAGACTTTTTCCGGACAGACCTCAATAACTCTGTTTACCAGAACAGGAG GTGAGCTTAGAAAACCCTTAGGGTATTAGGCCAAAGGCGCAGCTACTGTGGGGTTTATGAACAATTCAAGCAACTCT ACGGGCTATTCTAATTCAGGTTTCTCTAGAATCGGGGTTGGGGTTATTCTCTGTCTTGTGATTCTCTTTATTCTTAT ACTAACGCTTCTCTGCCTAAGGCTCGCCGCCTGCTGTGTGCACATTTGCATTTATTGTCAGCTTTTTAAACGCTGGG GTCGCCACCCAAGATGATTAGGTACATAATCCTAGGTTTACTCACCCTTGCGTCAGCCCACGGTACCACCCAAAAGG TGGATTTTAAGGAGCCAGCCTGTAATGTTACATTCGCAGCTGAAGCTAATGAGTGCACCACTCTTATAAAATGCACC ACAGAACATGAAAAGCTGCTTATTCGCCACAAAAACAAAATTGGCAAGTATGCTGTTTATGCTATTTGGCAGCCAGG TGACACTACAGAGTATAATGTTACAGTTTTCCAGGGTAAAAGTCATAAAACTTTTATGTATACTTTTCCATTTTATG AAATGTGCGACATTACCATGTACATGAGCAAACAGTATAAGTTGTGGCCCCCACAAAATTGTGTGGAAAACACTGGC ACTTTCTGCTGCACTGCTATGCTAATTACAGTGCTCGCTTTGGTCTGTACCCTACTCTATATTAAATACAAAAGCAG ACGCAGCTTTATTGAGGAAAAGAAAATGCCTTAATTTACTAAGTTACAAAGCTAATGTCACCACTAACTGCTTTACT CGCTGCTTGCAAAACAAATTCAAAAAGTTAGCATTATAATTAGAATAGGATTTAAACCCCCCGGTCATTTCCTGCTC AATACCATTCCCCTGAACAATTGACTCTATGTGGGATATGCTCCAGCGCTACAACCTTGAAGTCAGGCTTCCTGGAT GTCAGCATCTGACTTTGGCCAGCACCTGTCCCGCGGATTTGTTCCAGTCCAACTACAGCGACCCACCCTAACAGAGA TGACCAACACAACCAACGCGGCCGCCGCTACCGGACTTACATCTACCACAAATACACCCCAAGTTTCTGCCTTTGTC AATAACTGGGATAACTTGGGCATGTGGTGGTTCTCCATAGCGCTTATGTTTGTATGCCTTATTATTATGTGGCTCAT CTGCTGCCTAAAGCGCAAACGCGCCCGACCACCCATCTATAGTCCCATCATTGTGCTACACCCAAACAATGATGGAA TCCATAGATTGGACGGACTGAAACACATGTTCTTTTCTCTTACAGTATGATTAAATGAGACATGATTCCTCGAGTTT TTATATTACTGACCCTTGTTGCGCTTTTTTGTGCGTGCTCCACATTGGCTGCGGTTTCTCACATCGAAGTAGACTGC ATTCCAGCCTTCACAGTCTATTTGCTTTACGGATTTGTCACCCTCACGCTCATCTGCAGCCTCATCACTGTGGTCAT CGCCTTTATCCAGTGCATTGACTGGGTCTGTGTGCGCTTTGCATATCTCAGACACCATCCCCAGTACAGGGACAGGA CTATAGCTGAGCTTCTTAGAATTCTTTAATTATGAAATTTACTGTGACTTTTCTGCTGATTATTTGCACCCTATCTG CGTTTTGTTCCCCGACCTCCAAGCCTCAAAGACATATATCATGCAGATTCACTCGTATATGGAATATTCCAAGTTGC TACAATGAAAAAAGCGATCTTTCCGAAGCCTGGTTATATGCAATCATCTCTGTTATGGTGTTCTGCAGTACCATCTT AGCCCTAGCTATATATCCCTACCTTGACATTGGCTGGAAACGAATAGATGCCATGAACCACCCAACTTTCCCCGCGC CCGCTATGCTTCCACTGCAACAAGTTGTTGCCGGCGGCTTTGTCCCAGCCAATCAGCCTCGCCCCACTTCTCCCACC CCCACTGAAATCAGCTACTTTAATCTAACAGGAGGAGATGACTGACACCCTAGATCTAGAAATGGACGGAATTATTA CAGAGCAGCGCCTGCTAGAAAGACGCAGGGCAGCGGCCGAGCAACAGCGCATGAATCAAGAGCTCCAAGACATGGTT AACTTGCACCAGTGCAAAAGGGGTATCTTTTGTCTGGTAAAGCAGGCCAAAGTCACCTACGACAGTAATACCACCGG ACACCGCCTTAGCTACAAGTTGCCAACCAAGCGTCAGAAATTGGTGGTCATGGTGGGAGAAAAGCCCATTACCATAA CTCAGCACTCGGTAGAAACCGAAGGCTGCATTCACTCACCTTGTCAAGGACCTGAGGATCTCTGCACCCTTATTAAG ACCCTGTGCGGTCTCAAAGATCTTATTCCCTTTAACTAATAAAAAAAAATAATAAAGCATCACTTACTTAAAATCAG TTAGCAAATTTCTGTCCAGTTTATTCAGCAGCACCTCCTTGCCCTCCTCCCAGCTCTGGTATTGCAGCTTCCTCCTG GCTGCAAACTTTCTCCACAATCTAAATGGAATGTCAGTTTCCTCCTGTTCCTGTCCATCCGCACCCACTATCTTCAT GTTGTTGCAGATGAAGCGCGCAAGACCGTCTGAAGATACCTTCAACCCCGTGTATCCATATGACACGGAAACCGGTC CTCCAACTGTGCCTTTTCTTACTCCTCCCTTTGTATCCCCCAATGGGTTTCAAGAGAGTCCCCCTGGGGTACTCTCT TTGCGCCTATCCGAACCTCTAGTTACCTCCAATGGCATGCTTGCGCTCAAAATGGGCAACGGCCTCTCTCTGGACGA GGCCGGCAACCTTACCTCCCAAAATGTAACCACTGTGAGCCCACCTCTCAAAAAAACCAAGTCAAACATAAACCTGG AAATATCTGCACCCCTCACAGTTACCTCAGAAGCCCTAACTGTGGCTGCCGCCGCACCTCTAATGGTCGCGGGCAAC ACACTCACCATGCAATCACAGGCCCCGCTAACCGTGCACGACTCCAAACTTAGCATTGCCACCCAAGGACCCCTCAC AGTGTCAGAAGGAAAGCTAGCCCTGCAAACATCAGGCCCCCTCACCACCACCGATAGCAGTACCCTTACTATCACTG CCTCACCCCCTCTAACTACTGCCACTGGTAGCTTGGGCATTGACTTGAAAGAGCCCATTTATACACAAAATGGAAAA CTAGGACTAAAGTACGGGGCTCCTTTGCATGTAACAGACGACCTAAACACTTTGACCGTAGCAACTGGTCCAGGTGT GACTATTAATAATACTTCCTTGCAAACTAAAGTTACTGGAGCCTTGGGTTTTGATTCACAAGGCAATATGCAACTTA ATGTAGCAGGAGGACTAAGGATTGATTCTCAAAACAGACGCCTTATACTTGATGTTAGTTATCCGTTTGATGCTCAA AACCAACTAAATCTAAGACTAGGACAGGGCCCTCTTTTTATAAACTCAGCCCACAACTTGGATATTAACTACAACAA AGGCCTTTACTTGTTTACAGCTTCAAACAATTCCAAAAAGCTTGAGGTTAACCTAAGCACTGCCAAGGGGTTGATGT TTGACGCTACAGCCATAGCCATTAATGCAGGAGATGGGCTTGAATTTGGTTCACCTAATGCACCAAACACAAATCCC CTCAAAACAAAAATTGGCCATGGCCTAGAATTTGATTCAAACAAGGCTATGGTTCCTAAACTAGGAACTGGCCTTAG TTTTGACAGCACAGGTGCCATTACAGTAGGAAACAAAAATAATGATAAGCTAACTTTGTGGACCACACCAGCTCCAT CTCCTAACTGTAGACTAAATGCAGAGAAAGATGCTAAACTCACTTTGGTCTTAACAAAATGTGGCAGTCAAATACTT GCTACAGTTTCAGTTTTGGCTGTTAAAGGCAGTTTGGCTCCAATATCTGGAACAGTTCAAAGTGCTCATCTTATTAT AAGATTTGACGAAAATGGAGTGCTACTAAACAATTCCTTCCTGGACCCAGAATATTGGAACTTTAGAAATGGAGATC TTACTGAAGGCACAGCCTATACAAACGCTGTTGGATTTATGCCTAACCTATCAGCTTATCCAAAATCTCACGGTAAA ACTGCCAAAAGTAACATTGTCAGTCAAGTTTACTTAAACGGAGACAAAACTAAACCTGTAACACTAACCATTACACT AAACGGTACACAGGAAACAGGAGACACAACTCCAAGTGCATACTCTATGTCATTTTCATGGGACTGGTCTGGCCACA ACTACATTAATGAAATATTTGCCACATCCTCTTACACTTTTTCATACATTGCCCAAGAATAAAGAATCGTTTGTGTT ATGTTTCAACGTGTTTATTTTTCAATTGCAGAAAATTTCAAGTCATTTTTCATTCAGTAGTATAGCCCCACCACCAC ATAGCTTATACAGATCACCGTACCTTAATCAAACTCACAGAACCCTAGTATTCAACCTGCCACCTCCCTCCCAACAC ACAGAGTACACAGTCCTTTCTCCCCGGCTGGCCTTAAAAAGCATCATATCATGGGTAACAGACATATTCTTAGGTGT TATATTCCACACGGTTTCCTGTCGAGCCAAACGCTCATCAGTGATATTAATAAACTCCCCGGGCAGCTCACTTAAGT TCATGTCGCTGTCCAGCTGCTGAGCCACAGGCTGCTGTCCAACTTGCGGTTGCTTAACGGGCGGCGAAGGAGAAGTC CACGCCTACATGGGGGTAGAGTCATAATCGTGCATCAGGATAGGGCGGTGGTGCTGCAGCAGCGCGCGAATAAACTG CTGCCGCCGCCGCTCCGTCCTGCAGGAATACAACATGGCAGTGGTCTCCTCAGCGATGATTCGCACCGCCCGCAGCA TAAGGCGCCTTGTCCTCCGGGCACAGCAGCGCACCCTGATCTCACTTAAATCAGCACAGTAACTGCAGCACAGCACC ACAATATTGTTCAAAATCCCACAGTGCAAGGCGCTGTATCCAAAGCTCATGGCGGGGACCACAGAACCCACGTGGCC ATCATACCACAAGCGCAGGTAGATTAAGTGGCGACCCCTCATAAACACGCTGGACATAAACATTACCTCTTTTGGCA TGTTGTAATTCACCACCTCCCGGTACCATATAAACCTCTGATTAAACATGGCGCCATCCACCACCATCCTAAACCAG CTGGCCAAAACCTGCCCGCCGGCTATACACTGCAGGGAACCGGGACTGGAACAATGACAGTGGAGAGCCCAGGACTC GTAACCATGGATCATCATGCTCGTCATGATATCAATGTTGGCACAACACAGGCACACGTGCATACACTTCCTCAGGA TTACAAGCTCCTCCCGCGTTAGAACCATATCCCAGGGAACAACCCATTCCTGAATCAGCGTAAATCCCACACTGCAG GGAAGACCTCGCACGTAACTCACGTTGTGCATTGTCAAAGTGTTACATTCGGGCAGCAGCGGATGATCCTCCAGTAT GGTAGCGCGGGTTTCTGTCTCAAAAGGAGGTAGACGATCCCTACTGTACGGAGTGCGCCGAGACAACCGAGATCGTG TTGGTCGTAGTGTCATGCCAAATGGAACGCCGGACGTAGTCATATTTCCTGAAGCAAAACCAGGTGCGGGCGTGACA AACAGATCTGCGTCTCCGGTCTCGCCGCTTAGATCGCTCTGTGTAGTAGTTGTAGTATATCCACTCTCTCAAAGCAT CCAGGCGCCCCCTGGCTTCGGGTTCTATGTAAACTCCTTCATGCGCCGCTGCCCTGATAACATCCACCACCGCAGAA TAAGCCACACCCAGCCAACCTACACATTCGTTCTGCGAGTCACACACGGGAGGAGCGGGAAGAGCTGGAAGAACCAT GTTTTTTTTTTTATTCCAAAAGATTATCCAAAACCTCAAAATGAAGATCTATTAAGTGAACGCGCTCCCCTCCGGTG GCGTGGTCAAACTCTACAGCCAAAGAACAGATAATGGCATTTGTAAGATGTTGCACAATGGCTTCCAAAAGGCAAAC GGCCCTCACGTCCAAGTGGACGTAAAGGCTAAACCCTTCAGGGTGAATCTCCTCTATAAACATTCCAGCACCTTCAA CCATGCCCAAATAATTCTCATCTCGCCACCTTCTCAATATATCTCTAAGCAAATCCCGAATATTAAGTCCGGCCATT GTAAAAATCTGCTCCAGAGCGCCCTCCACCTTCAGCCTCAAGCAGCGAATCATGATTGCAAAAATTCAGGTTCCTCA CAGACCTGTATAAGATTCAAAAGCGGAACATTAACAAAAATACCGCGATCCCGTAGGTCCCTTCGCAGGGCCAGCTG AACATAATCGTGCAGGTCTGCACGGACCAGCGCGGCCACTTCCCCGCCAGGAACCATGACAAAAGAACCCACACTGA TTATGACACGCATACTCGGAGCTATGCTAACCAGCGTAGCCCCGATGTAAGCTTGTTGCATGGGCGGCGATATAAAA TGCAAGGTGCTGCTCAAAAAATCAGGCAAAGCCTCGCGCAAAAAAGAAAGCACATCGTAGTCATGCTCATGCAGATA AAGGCAGGTAAGCTCCGGAACCACCACAGAAAAAGACACCATTTTTCTCTCAAACATGTCTGCGGGTTTCTGCATAA ACACAAAATAAAATAACAAAAAAACATTTAAACATTAGAAGCCTGTCTTACAACAGGAAAAACAACCCTTATAAGCA TAAGACGGACTACGGCCATGCCGGCGTGACCGTAAAAAAACTGGTCACCGTGATTAAAAAGCACCACCGACAGCTCC TCGGTCATGTCCGGAGTCATAATGTAAGACTCGGTAAACACATCAGGTTGATTCACATCGGTCAGTGCTAAAAAGCG ACCGAAATAGCCCGGGGGAATACATACCCGCAGGCGTAGAGACAACATTACAGCCCCCATAGGAGGTATAACAAAAT TAATAGGAGAGAAAAACACATAAACACCTGAAAAACCCTCCTGCCTAGGCAAAATAGCACCCTCCCGCTCCAGAACA ACATACAGCGCTTCCACAGCGGCAGCCATAACAGTCAGCCTTACCAGTAAAAAAGAAAACCTATTAAAAAAACACCA CTCGACACGGCACCAGCTCAATCAGTCACAGTGTAAAAAAGGGCCAAGTGCAGAGCGAGTATATATAGGACTAAAAA ATGACGTAACGGTTAAAGTCCACAAAAAACACCCAGAAAACCGCACGCGAACCTACGCCCAGAAACGAAAGCCAAAA AACCCACAACTTCCTCAAATCGTCACTTCCGTTTTCCCACGTTACGTAACTTCCCATTTTAAGAAAACTACAATTCC CAACACATACAAGTTACTCCGCCCTAAAACCTACGTCACCCGCCCCGTTCCCACGCCCCGCGCCACGTCACAAACTC CACCCCCTCATTATCATATTGGCTTCAATCCAAAATAAGGTATATTATTGATGATG

[0638] GenBank Accession No. AP_000226 MKRARPSEDTFNPVYPYDTETGPPTVPFLTPPFVSPNGFQESPPGVLSLRLSEPLVTSNGMLALKMGNGLSLDEAGN LTSQNVTTVSPPLKKTKSNINLEISAPLTVTSEALTVAAAAPLMVAGNTLTMQSQAPLTVHDSKLSIATQGPLTVSE GKLALQTSGPLTTTDSSTLTITASPPLTTATGSLGIDLKEPIYTONGKLGLKYGAPLHVTDDLNTLTVATGPGVTIN NTSLQTKVTGALGFDSQGNMOLNVAGGLRIDSQNRRLILDVSYPFDAQNQLNLRLGQGPLFINSAHNLDINYNKGLY LFTASNNSKKLEVNLSTAKGLMFDATAIAINAGDGLEFGSPNAPNTNPLKTKIGHGLEFDSNKAMVPKLGTGLSFDS TGAITVGNKNNDKLTLWTTPAPSPNCRLNAEKDAKLTLVLTKCGSQILATVSVLAVKGSLAPISGTVQSAHLIIRED ENGVLLNNSFLDPEYWNFRNGDLTEGTAYTNAVGEMPNLSAYPKSHGKTAKSNIVSQVYLNGDKTKPVTLTITLNGT QETGDTTPSAYSMSFSWDWSGHNYINEIFATSSYTFSYIAQE

[0639] GenBank Accession No. AP_000206 MRRAAMYEEGPPPSYESVVSAAPVAAALGSPFDAPLDPPFVPPRYLRPTGGRNSIRYSELAPLFDTTRVYLVDNKST DVASLNYONDHSNFLTTVIQNNDYSPGEASTQTINLDDRSHWGGDLKTILHTNMPNVNEFMFTNKEKARVMVSRLPT KDNQVELKYEWVEFTLPEGNYSETMTIDLMNNAIVEHYLKVGRONGVLESDIGVKFDTRNFRLGFDPVTGLVMPGVY TNEAFHPDIILLPGCGVDFTHSRLSNLLGIRKROPFQEGFRITYDDLEGGNIPALLDVDAYQASLKDDTEQGGGGAG GSNSSGSGAEENSNAAAAAMQPVEDMNDHAIRGDTFATRAEEKRAEAEAAAEAAAPAAQPEVEKPQKKPVIKPLTED SKKRSYNLISNDSTFTQYRSWYLAYNYGDPQTGIRSWTLLCTPDVTCGSEQVYWSLPDMMQDPVTFRSTRQISNFPV VGAELLPVHSKSFYNDQAVYSQLIROFTSLTHVFNRFPENQILARPPAPTITTVSENVPALTDHGTLPLRNSIGGVQ RVTITDARRRTCPYVYKALGIVSPRVLSSRTF

[0640] GenBank Accession No. AP_000211 MATPSMMPQWSYMHISGQDASEYLSPGLVQFARATETYFSLNNKERNPTVAPTHDVTTDRSQRLTLRFIPVDREDTA YSYKARFTLAVGDNRVLDMASTYFDIRGVLDRGPTFKPYSGTAYNALAPKGAPNPCEWDEAATALEINLEEEDDDNE DEVDEQAEQQKTHVFGQAPYSGINITKEGIQIGVEGOTPKYADKTFQPEPQIGESQWYETEINHAAGRVLKKTTPMK PCYGSYAKPTNENGGQGILVKOONGKLESQVEMQFFSTTEATAGNGDNLTPKVVLYSEDVDIETPDTHISYMPTIKE GNSRELMGQQSMPNRPNYIAFRDNFIGLMYYNSTGNMGVLAGQASQLNAVVDLQDRNTELSYQLLLDSIGDRTRYFS MWNQAVDSYDPDVRIIENHGTEDELPNYCFPLGGVINTETLTKVKPKTGQENGWEKDATEFSDKNEIRVGNNFAMEI NLNANLWRNFLYSNIALYLPDKLKYSPSNVKISDNPNTYDYMNKRVVAPGLVDCYINLGARWSLDYMDNVNPFNHHR NAGLRYRSMLLGNGRYVPFHIQVPQKFFAIKNLLLLPGSYTYEWNFRKDVNMVLQSSLGNDLRVDGASIKEDSICLY ATFFPMAHNTASTLEAMLRNDTNDOSFNDYLSAANMLYPIPANATNVPISIPSRNWAAFRGWAFTRLKTKETPSLGS GYDPYYTYSGSIPYLDGTFYLNHTFKKVAITFDSSVSWPGNDRLLTPNEFEIKRSVDGEGYNVAQCNMTKDWFLVQM LANYNIGYQGFYIPESYKDRMYSFFRNFQPMSRQVVDDTKYKDYQQVGILHQHNNSGFVGYLAPTMREGQAYPANFP YPLIGKTAVDSITQKKFLCDRTLWRIPFSSNFMSMGALTDLGQNLLYANSAHALDMTFEVDPMDEPTLLYVLFEVED VVRVHRPHRGVIETVYLRTPFSAGNATT

[0641] GenBank Accession No. AY128640 (SEQ ID NO: 216) CATCATCAATAATATACCTTATAGATGGAATGGTGCCAATATGTAAATGAGGTGATTTTAAAAAGTGTGGGCCGTGT GGTGATTGGCTGTGGGGTTAACGGTTAAAAGGGGCGGCGCGGCCGTGGGAAAATGACGTTTTATGGGGGTGGAGTTT TTTTGCAAGTTGTCGCGGGAAATGTTACGCATAAAAAGGCTTCTTTTCTCACGGAACTACTTAGTTTTCCCACGGTA TTTAACAGGAAATGAGGTAGTTTTGACCGGATGCAAGTGAAAATTGCTGATTTTCGCGCGAAAACTGAATGAGGAAG TGTTTTTCTGAATAATGTGGTATTTATGGCAGGGTGGAGTATTTGTTCAGGGCCAGGTAGACTTTGACCCATTACGT GGAGGTTTCGATTACCGTGTTTTTTACCTGAATTTCCGCGTACCGTGTCAAAGTCTTCTGTTTTTACGTAGGTGTCA GCTGATCGCTAGGGTATTTATACCTCAGGGTTTGTGTCAAGAGGCCACTCTTGAGTGCCAGCGAGAAGAGTTTTCTC CTCTGCGCCGGCAGTTTAATAATAAAAAAATGAGAGATTTGCGATTTCTGCCTCAGGAAATAATCTCTGCTGAGACT GGAAATGAAATATTGGAGCTTGTGGTGCACGCCCTGATGGGAGACGATCCGGAGCCACCTGTGCAGCTTTTTGAGCC TCCTACGCTTCAGGAACTGTATGATTTAGAGGTAGAGGGATCGGAGGATTCTAATGAGGAAGCTGTGAATGGCTTTT TTACCGATTCTATGCTTTTAGCTGCTAATGAAGGATTAGAATTAGATCCGCCTTTGGACACTTTCAATACTCCAGGG GTGATTGTGGAAAGCGGTACAGGTGTAAGAAAATTACCTGATTTGAGTTCCGTGGACTGTGATTTGCACTGCTATGA AGACGGGTTTCCTCCGAGTGATGAGGAGGACCATGAAAAGGAGCAGTCCATGCAGACTGCAGCGGGTGAGGGAGTGA AGGCTGCCAATGTTGGTTTTCAGTTGGATTGCCCGGAGCTTCCTGGACATGGCTGTAAGTCTTGTGAATTTCACAGG AAAAATACTGGAGTAAAGGAACTGTTATGTTCGCTTTGTTATATGAGAACGCACTGCCACTTTATTTACAGTAAGTG TGTTTAAGTTAAAATTTAAAGGAATATGCTGTTTTTCACATGTATATTGAGTGTGAGTTTTGTGCTTCTTATTATAG GTCCTGTGTCTGATGCTGATGAATCACCATCTCCTGATTCTACTACCTCACCTCCTGATATTCAAGCACCTGTTCCT GTGGACGTGCGCAAGCCCATTCCTGTGAAGCTTAAGCCTGGGAAACGTCCAGCAGTGGAGAAACTTGAGGACTTGTT ACAGGGTGGGGACGGACCTTTGGACTTGAGTACACGGAAACGTCCAAGACAATAAGTGTTCCATATCCGTGTTTACT TAAGGTGACGTCAATATTTGTGTGAGAGTGCAATGTAATAAAAATATGTTAACTGTTCACTGGTTTTTATTGCTTTT TGGGCGGGGACTCAGGTATATAAGTAGAAGCAGACCTGTGTGGTTAGCTCATAGGAGCTGGCTTTCATCCATGGAGG TTTGGGCCATTTTGGAAGACCTTAGGAAGACTAGGCAACTGTTAGAGAGCGCTTCGGACGGAGTCTCCGGTTTTTGG AGATTCTGGTTCGCTAGTGAATTAGCTAGGGTAGTTTTTAGGATAAAACAGGACTATAAACAAGAATTTGAAAAGTT GTTGGTAGATTGCCCAGGACTTTTTGAAGCTCTTAATTTGGGCCATCAGGTTCACTTTAAAGAAAAAGTTTTATCAG TTTTAGACTTTTCAACCCCAGGTAGAACTGCTGCTGCTGTGGCTTTTCTTACTTTTATATTAGATAAATGGATCCCG CAGACTCATTTCAGCAGGGGATACGTTTTGGATTTCATAGCCACAGCATTGTGGAGAACATGGAAGGTTCGCAAGAT GAGGACAATCTTAGGTTACTGGCCAGTGCAGCCTTTGGGTGTAGCGGGAATCCTGAGGCATCCACCGGTCATGCCAG CGGTTCTGGAGGAGGAACAGCAAGAGGACAACCCGAGAGCCGGCCTGGACCCTCCAGTGGAGGAGGCGGAGTAGCTG ACTTGTCTCCTGAACTGCAACGGGTGCTTACTGGATCTACGTCCACTGGACGGGATAGGGGCGTTAAGAGGGAGAGG GCATCCAGTGGTACTGATGCTAGATCTGAGTTGGCTTTAAGTTTAATGAGTCGCAGACGTCCTGAAACCATTTGGTG GCATGAGGTTCAGAAAGAGGGAAGGGATGAAGTTTCTGTATTGCAGGAGAAATATTCACTGGAACAGGTGAAAACAT GTTGGTTGGAGCCAGAGGATGATTGGGAGGTGGCCATTAAAAATTATGCCAAGATAGCTTTGAGGCCTGATAAACAG TATAAGATCAGTAGACGGATTAATATCCGGAATGCTTGTTACATATCTGGAAATGGGGCTGAGGTGGTAATAGATAC TCAAGACAAGACAGTTATTAGATGCTGCATGATGGATATGTGGCCTGGAGTAGTCGGTATGGAAGCAGTCACTTTTG TAAATGTTAAGTTTAGGGGAGATGGTTATAATGGAATAGTGTTTATGGCCAATACCAAACTTATATTGCATGGTTGT AGCTTTTTTGGTTTCAACAATACCTGTGTAGATGCCTGGGGACAGGTTAGTGTACGGGGGTGTAGTTTCTATGCGTG TTGGATTGCCACAGCTGGCAGAACCAAGAGTCAATTGTCTCTGAAGAAATGCATATTCCAAAGATGTAACCTGGGCA TTCTGAATGAAGGCGAAGCAAGGGTCCGTCACTGCGCTTCTACAGATACTGGATGTTTTATTTTAATTAAGGGAAAT GCCAGCGTAAAGCATAACATGATTTGTGGTGCTTCCGATGAGAGGCCTTATCAAATGCTCACTTGTGCTGGTGGGCA TTGTAATATGCTGGCTACTGTGCATATTGTTTCCCATCAACGCAAAAAATGGCCTGTTTTTGATCACAATGTGTTGA CCAAGTGCACCATGCATGCAGGTGGGCGTAGAGGAATGTTTATGCCTTACCAGTGTAACATGAATCATGTGAAAGTG TTGTTGGAACCAGATGCCTTTTCCAGAATGAGCCTAACAGGAATCTTTGACATGAACACGCAAATCTGGAAGATCCT GAGGTATGATGATACGAGATCGAGGGTGCGCGCATGCGAATGCGGAGGCAAGCATGCCAGGTTCCAGCCGGTGTGTG TAGATGTGACCGAAGATCTCAGACCGGATCATTTGGTTATTGCCCGCACTGGAGCAGAGTTCGGATCCAGTGGAGAA GAAACTGACTAAGGTGAGTATTGGGAAAACTTTGGGGTGGGATTTTCAGATGGACAGATTGAGTAAAAATTTGTTTT TTCTGTCTTGCAGCTGACATGAGTGGAAATGCTTCTTTTAAGGGGGGAGTCTTCAGCCCTTATCTGACAGGGCGTCT CCCATCCTGGGCAGGAGTTCGTCAGAATGTTATGGGATCTACTGTGGATGGAAGACCCGTTCAACCCGCCAATTCTT CAACGCTGACCTATGCTACTTTAAGTTCTTCACCTTTGGACGCAGCTGCAGCCGCTGCCGCCGCCTCTGTCGCCGCT AACACTGTGCTTGGAATGGGTTACTATGGAAGCATCGTGGCTAATTCCACTTCCTCTAATAACCCTTCTACACTGAC TCAGGACAAGTTACTTGTCCTTTTGGCCCAGCTGGAGGCTTTGACCCAACGTCTGGGTGAACTTTCTCAGCAGGTGG CCGAGTTGCGAGTACAAACTGAGTCTGCTGTCGGCACGGCAAAGTCTAAATAAAAAAAATTCCAGAATCAATGAATA AATAAACGAGCTTGTTGTTGATTTAAAATCAAGTGTTTTTATTTCATTTTTCGCGCACGGTATGCCCTGGACCACCG ATCTCGATCATTGAGAACTCGGTGGATTTTTTCCAGAATCCTATAGAGGTGGGATTGAATGTTTAGATACATGGGCA TTAGGCCGTCTTTGGGGTGGAGATAGCTCCATTGAAGGGATTCATGCTCCGGGGTAGTGTTGTAAATCACCCAGTCA TAACAAGGTCGCAGTGCATGGTGTTGCACAATATCTTTTAGAAGTAGGCTGATTGCCACAGATAAGCCCTTGGTGTA GGTGTTTACAAACCGGTTGAGCTGGGAGGGGTGCATTCGAGGTGAAATTATGTGCATTTTGGATTGGATTTTTAAGT TGGCAATATTGCCGCCAAGATCCCGTCTTGGGTTCATGTTATGAAGGACTACCAAGACGGTGTATCCGGTACATTTA GGAAATTTATCGTGCAGCTTGGATGGAAAAGCGTGGAAAAATTTGGAGACACCCTTGTGTCCTCCGAGATTTTCCAT GCACTCATCCATGATAATAGCAATGGGGCCGTGGGCAGCGGCGCGGGCAAACACGTTCCGTGGGTCTGACACATCAT AGTTATGTTCCTGAGTTAAATCATCATAAGCCATTTTAATGAATTTGGGGCGGAGCGTACCAGATTGGGGTATGAAT GTTCCTTCGGGCCCCGGAGCATAGTTCCCCTCACAGATTTGCATTTCCCAAGCTTTCAGTTCTGAGGGTGGAATCAT GTCCACCTGGGGGGCTATGAAGAACACCGTTTCGGGGGCGGGGGTGATTAGTTGGGATGATAGCAAGTTTCTGAGCA ATTGAGATTTGCCACATCCGGTGGGGCCATAAATAATTCCGATTACAGGTTGCAGGTGGTAGTTTAGGGAACGGCAA CTGCCGTCTTCTCGAAGCAAGGGGGCCACCTCGTTCATCATTTCCCTTACATGCATATTTTCCCGCACCAAATCCAT TAGGAGGCGCTCTCCTCCTAGTGATAGAAGTTCTTGTAGTGAGGAAAAGTTTTTCAGCGGTTTTAGACCGTCAGCCA TGGGCATTTTGGAAAGAGTTTGCTGCAAAAGTTCTAGTCTGTTCCACAGTTCAGTGATGTGTTCTATGGCATCTCGA TCCAGCAGACCTCCTCGTTTCGCGGGTTTGGACGGCTCCTGGAGTAGGGTATGAGACGATGGGCGTCCAGCGCTGCC AGGGTTCGGTCCTTCCAGGGTCTCAGTGTTCGAGTCAGGGTTGTTTCCGTCACAGTGAAGGGGTGTGCGCCTGCTTG GGCGCTTGCCAGGGTGCGCTTCAGACTCATTCTGCTGGTGGAGAACTTCTGTCGCTTGGCGCCCTGTATGTCGGCCA AGTAGCAGTTTACCATGAGTTCGTAGTTGAGCGCCTCGGCTGCGTGGCCTTTGGCGCGGAGCTTACCTTTGGAAGTT TTCTTGCATACCGGGCAGTATAGGCATTTCAGCGCATACAGCTTGGGCGCAAGGAAAATGGATTCTGGGGAGTATGC ATCCGCGCCGCAGGAGGCGCAAACAGTTTCACATTCCACCAGCCAGGTTAAATCCGGTTCATTGGGGTCAAAAACAA GTTTTCCGCCATATTTTTTGATGCGTTTCTTACCTTTGGTCTCCATAAGTTCGTGTCCTCGTTGAGTGACAAACAGG CTGTCCGTATCTCCGTAGACTGATTTTACAGGCCTCTTCTCCAGTGGAGTGCCTCGGTCTTCTTCGTACAGGAACTC TGACCACTCTGATACAAAGGCGCGCGTCCAGGCCAGCACAAAGGAGGCTATGTGGGAGGGGTAGCGATCGTTGTCAA CCAGGGGGTCCACCTTTTCCAAAGTATGCAAACACATGTCACCCTCTTCAACATCCAGGAATGTGATTGGCTTGTAG GTGTATTTCACGTGACCTGGGGTCCCCGCTGGGGGGGTATAAAAGGGGGGGGTTCTTTGCTCTTCCTCACTGTCTTC CGGATCGCTGTCCAGGAACGTCAGCTGTTGGGGTAGGTATTCCCTCTCGAAGGCGGGCATGACCTCTGCACTCAGGT TGTCAGTTTCTAAGAACGAGGAGGATTTGATATTGACAGTGCCGGTTGAGATGCCTTTCATGAGGTTTTCGTCCATT TGGTCAGAAAACACAATTTTTTTATTGTCAAGTTTGGTGGCAAATGATCCATACAGGGCGTTGGATAAAAGTTTGGC AATGGATCGCATGGTTTGGTTCTTTTCCTTGTCCGCGCGCTCTTTGGCGGCGATGTTGAGTTGGACATACTCGCGTG CCAGGCACTTCCATTCGGGGAAGATAGTTGTTAATTCATCTGGCACGATTCTCACTTGCCACCCTCGATTATGCAAG GTAATTAAATCCACACTGGTGGCCACCTCGCCTCGAAGGGGTTCATTGGTCCAACAGAGCCTACCTCCTTTCCTAGA ACAGAAAGGGGGAAGTGGGTCTAGCATAAGTTCATCGGGAGGGTCTGCATCCATGGTAAAGATTCCCGGAAGTAAAT CCTTATCAAAATAGCTGATGGGAGTGGGGTCATCTAAGGCCATTTGCCATTCTCGAGCTGCCAGTGCGCGCTCATAT GGGTTAAGGGGACTGCCCCAGGGCATGGGATGGGTGAGAGCAGAGGCATACATGCCACAGATGTCATAGACGTAGAT GGGATCCTCAAAGATGCCTATGTAGGTTGGATAGCATCGCCCCCCTCTGATACTTGCTCGCACATAGTCATATAGTT CATGTGATGGCGCTAGCAGCCCCGGACCCAAGTTGGTGCGATTGGGTTTTTCTGTTCTGTAGACGATCTGGCGAAAG ATGGCGTGAGAATTGGAAGAGATGGTGGGTCTTTGAAAAATGTTGAAATGGGCATGAGGTAGACCTACAGAGTCTCT GACAAAGTGGGCATAAGATTCTTGAAGCTTGGTTACCAGTTCGGCGGTGACAAGTACGTCTAGGGCGCAGTAGTCAA GTGTTTCTTGAATGATGTCATAACCTGGTTGGTTTTTCTTTTCCCACAGTTCGCGGTTGAGAAGGTATTCTTCGCGA TCCTTCCAGTACTCTTCTAGCGGAAACCCGTCTTTGTCTGCACGGTAAGATCCTAGCATGTAGAACTGATTAACTGC CTTGTAAGGGCAGCAGCCCTTCTCTACGGGTAGAGAGTATGCTTGAGCAGCTTTTCGTAGCGAAGCGTGAGTAAGGG CAAAGGTGTCTCTGACCATGACTTTGAGAAATTGGTATTTGAAGTCCATGTCGTCACAGGCTCCCTGTTCCCAGAGT TGGAAGTCTACCCGTTTCTTGTAGGCGGGGTTGGGCAAAGCGAAAGTAACATCATTGAAGAGAATCTTACCGGCTCT GGGCATAAAATTGCGAGTGATGCGGAAAGGCTGTGGTACTTCCGCTCGATTGTTGATCACCTGGGCAGCTAGGACGA TTTCGTCGAAACCGTTGATGTTGTGTCCTACGATGTATAATTCTATGAAACGCGGCGTGCCTCTGACGTGAGGTAGC TTACTGAGCTCATCAAAGGTTAGGTCTGTGGGGTCAGATAAGGCGTAGTGTTCGAGAGCCCATTCGTGCAGGTGAGG ATTTGCATGTAGGAATGATGACCAAAGATCTACCGCCAGTGCTGTTTGTAACTGGTCCCGATACTGACGAAAATGCC GGCCAATTGCCATTTTTTCTGGAGTGACACAGTAGAAGGTTCTGGGGTCTTGTTGCCATCGATCCCACTTGAGTTTA ATGGCTAGATCGTGGGCCATGTTGACGAGACGCTCTTCTCCTGAGAGTTTCATGACCAGCATGAAAGGAACTAGTTG TTTGCCAAAGGATCCCATCCAGGTGTAAGTTTCCACATCGTAGGTCAGGAAGAGTCTTTCTGTGCGAGGATGAGAGC CGATCGGGAAGAACTGGATTTCCTGCCACCAGTTGGAGGATTGGCTGTTGATGTGATGGAAGTAGAAGTTTCTGCGG CGCGCCGAGCATTCGTGTTTGTGCTTGTACAGACGGCCGCAGTAGTCGCAGCGTTGCACGGGTTGTATCTCGTGAAT GAGCTGTACCTGGCTTCCCTTGACGAGAAATTTCAGTGGGAAGCCGAGGCCTGGCGATTGTATCTCGTGCTCTTCTA TATTCGCTGTATCGGCCTGTTCATCTTCTGTTTCGATGGTGGTCATGCTGACGAGCCCCCGCGGGAGGCAAGTCCAG ACCTCGGCGCGGGAGGGGCGGAGCTGAAGGACGAGAGCGCGCAGGCTGGAGCTGTCCAGAGTCCTGAGACGCTGCGG ACTCAGGTTAGTAGGTAGGGACAGAAGATTAACTTGCATGATCTTTTCCAGGGCGTGCGGGAGGTTCAGATGGTACT TGATTTCCACAGGTTCGTTTGTAGAGACGTCAATGGCTTGCAGGGTTCCGTGTCCTTTGGGCGCCACTACCGTACCT TTGTTTTTTCTTTTGATCGGTGGTGGCTCTCTTGCTTCTTGCATGCTCAGAAGCGGTGACGGGGACGCGCGCCGGGC GGCAGCGGTTGTTCCGGACCCGGGGGCATGGCTGGTAGTGGCACGTCGGCGCCGCGCACGGGCAGGTTCTGGTATTG CGCTCTGAGAAGACTTGCGTGCGCCACCACGCGTCGATTGACGTCTTGTATCTGACGTCTCTGGGTGAAAGCTACCG GCCCCGTGAGCTTGAACCTGAAAGAGAGTTCAACAGAATCAATTTCGGTATCGTTAACGGCAGCTTGTCTCAGTATT TCTTGTACGTCACCAGAGTTGTCCTGGTAGGCGATCTCCGCCATGAACTGCTCGATTTCTTCCTCCTGAAGATCTCC GCGACCCGCTCTTTCGACGGTGGCCGCGAGGTCATTGGAGATACGGCCCATGAGTTGGGAGAATGCATTCATGCCCG CCTCGTTCCAGACGCGGCTGTAAACCACGGCCCCCTCGGAGTCTCTTGCGCGCATCACCACCTGAGCGAGGTTAAGC TCCACGTGTCTGGTTAAGACCGCATAGTTGCATAGGCGCTGAAAAAGGTAGTTGAGTGTGGTGGCAATGTGTTCGGC GACGAAGAAATACATGATCCATCGTCTCAGCGGCATTTCGCTAACATCGCCCAGAGCTTCCAAGCGCTCCATGGCCT CGTAGAAGTCCACGGCAAAATTAAAAAACTGGGAGTTTCGCGCGGACACGGTCAATTCCTCCTCGAGAAGACGGATG AGTTCGGCTATGGTGGCCCGTACTTCGCGTTCGAAGGCTCCCGGGATCTCTTCTTCCTCTTCTATCTCTTCTTCCAC TAACATCTCTTCTTCGTCTTCAGGCGGGGGCGGAGGGGGCACGCGGCGACGTCGACGGCGCACGGGCAAACGGTCGA TGAATCGTTCAATGACCTCTCCGCGGCGGCGGCGCATGGTTTCAGTGACGGCGCGGCCGTTCTCGCGCGGTCGCAGA GTAAAAACACCGCCGCGCATCTCCTTAAAGTGGTGACTGGGAGGTTCTCCGTTTGGGAGGGAGAGGGCGCTGATTAT CGACGAAAGCGTCTAACCAGTCACAGTCACAAGGTAGGCTGAGTACGGCTTCTTGTGGGCGGGGGTGGTTATGTGTT CGGTCTGGGTCTTCTGTTTCTTCTTCATCTCGGGAAGGTGAGACGATGCTGCTGGTGATGAAATTAAAGTAGGCAGT TCTAAGACGGCGGATGGTGGCGAGGAGCACCAGGTCTTTGGGTCCGGCTTGCTGGATACGCAGGCGATTGGCCATTC CCCAAGCATTATCCTGACATCTAGCAAGATCTTTGTAGTAGTCTTGCATGAGCCGTTCTACGGGCACTTCTTCCTCA CCCGTTCTGCCATGCATACGTGTGAGTCCAAATCCGCGCATTGGTTGTACCAGTGCCAAGTCAGCTACGACTCTTTC GGCGAGGATGGCTTGCTGTACTTGGGTAAGGGTGGCTTGAAAGTCATCAAAATCCACAAAGCGGTGGTAAGCCCCTG TATTAATGGTGTAAGCACAGTTGGCCATGACTGACCAGTTAACTGTCTGGTGACCAGGGCGCACGAGCTCGGTGTAT TTAAGGCGCGAATAGGCGCGGGTGTCAAAGATGTAATCGTTGCAGGTGCGCACCAGATACTGGTACCCTATAAGAAA ATGCGGCGGTGGTTGGCGGTAGAGAGGCCATCGTTCTGTAGCTGGAGCGCCAGGGGCGAGGTCTTCCAACATAAGGC GGTGATAGCCGTAGATGTACCTGGACATCCAGGTGATTCCTGCGGCGGTAGTAGAAGCCCGAGGAAACTCGCGTACG CGGTTCCAAATGTTGCGTAGCGGCATGAAGTAGTTCATTGTAGGCACGGTTTGACCAGTGAGGCGCGCGCAGTCATT GATGCTCTATAGACACGGAGAAAATGAAAGCGTTCAGCGACTCGACTCCGTAGCCTGGAGGAACGTGAACGGGTTGG GTCGCGGTGTACCCCGGTTCGAGACTTGTACTCGAGCCGGCCGGAGCCGCGGCTAACGTGGTATTGGCACTCCCGTC TCGACCCAGCCTACAAAAATCCAGGATACGGAATCGAGTCGTTTTGCTGGTTTCCGAATGGCAGGGAAGTGAGTCCT ATTTTTTTTTTTTTTTGCCGCTCAGAATGCATCCCGTGCTGCGACAGATGCGCCCCCAACAACAGCCCCCCTCGCAG CAGCAGCAGCAGCAACCACAAAAGGCTGTCCCTGCAACTACTGCAACTGCCGCCGTGAGCGGTGCGGGACAGCCCGC CTATGATCTGGACTTGGAAGAGGGCGAAGGACTGGCACGTCTAGGTGCGCCTTCGCCCGAGCGGCATCCGCGAGTTC AACTGAAAAAAGATTCTCGCGAGGCGTATGTGCCCCAACAGAACCTATTTAGAGACAGAAGCGGCGAGGAGCCGGAG GAGATGCGAGCTTCCCGCTTTAACGCGGGTCGTGAGCTGCGTCACGGTTTGGACCGAAGACGAGTGTTGCGAGACGA GGATTTCGAAGTTGATGAAGTGACAGGGATCAGTCCTGCCAGGGCACACGTGGCTGCAGCCAACCTTGTATCGGCTT ACGAGCAGACAGTAAAGGAAGAGCGTAACTTCCAAAAGTCTTTTAATAATCATGTGCGAACCCTGATTGCCCGCGAA GAAGTTACCCTTGGTTTGATGCATTTGTGGGATTTGATGGAAGCTATCATTCAGAACCCTACTAGCAAACCTCTGAC CGCCCAGCTGTTTCTGGTGGTGCAACACAGCAGAGACAATGAGGCTTTCAGAGAGGCGCTGCTGAACATCACCGAAC CCGAGGGGAGATGGTTGTATGATCTTATCAACATTCTACAGAGTATCATAGTGCAGGAGCGGAGCCTGGGCCTGGCC GAGAAGGTAGCTGCCATCAATTACTCGGTTTTGAGCTTGGGAAAATATTACGCTCGCAAAATCTACAAGACTCCATA CGTTCCCATAGACAAGGAGGTGAAGATAGATGGGTTCTACATGCGCATGACGCTCAAGGTCTTGACCCTGAGCGATG ATCTTGGGGTGTATCGCAATGACAGAATGCATCGCGCGGTTAGCGCCAGCAGGAGGCGCGAGTTAAGCGACAGGGAA CTGATGCACAGTTTGCAAAGAGCTCTGACTGGAGCTGGAACCGAGGGTGAGAATTACTTCGACATGGGAGCTGACTT GCAGTGGCAGCCTAATCGCAGGGCTCTGAGCGCCGCGACGGCAGGATGTGAGCTTCCTTACATAGAAGAGGCGGATG AAGGCGAGGAGGAAGAGGGCGAGTACTTGGAAGACTGATGGCACAACCCGTGTTTTTTGCTAGATGGAACAGCAAGC ACCGGATCCCGCAATGCGGGCGGCGCTGCAGAGCCAGCCGTCCGGCATTAACTCCTCGGACGATTGGACCCAGGCCA TGCAACGTATCATGGCGTTGACGACTCGCAACCCCGAAGCCTTTAGACAGCAACCCCAGGCCAACCGTCTATCGGCC ATCATGGAAGCTGTAGTGCCTTCCCGATCTAATCCCACTCATGAGAAGGTCCTGGCCATCGTGAACGCGTTGGTGGA GAACAAAGCTATTCGTCCAGATGAGGCCGGACTGGTATACAACGCTCTCTTAGAACGCGTGGCTCGCTACAACAGTA GCAATGTGCAAACCAATTTGGACCGTATGATAACAGATGTACGCGAAGCCGTGTCTCAGCGCGAAAGGTTCCAGCGT GATGCCAACCTGGGTTCGCTGGTGGCGTTAAATGCTTTCTTGAGTACTCAGCCTGCTAATGTGCCGCGTGGTCAACA GGATTATACTAACTTTTTAAGTGCTTTGAGACTGATGGTATCAGAAGTACCTCAGAGCGAAGTGTATCAGTCCGGTC CTGATTACTTCTTTCAGACTAGCAGACAGGGCTTGCAGACGGTAAATCTGAGCCAAGCTTTTAAAAACCTTAAAGGT TTGTGGGGAGTGCATGCCCCGGTAGGAGAAAGAGCAACCGTGTCTAGCTTGTTAACTCCGAACTCCCGCCTGTTATT ACTGTTGGTAGCTCCTTTCACCGACAGCGGTAGCATCGACCGTAATTCCTATTTGGGTTACCTACTAAACCTGTATC GCGAAGCCATAGGGCAAAGTCAGGTGGACGAGCAGACCTATCAAGAAATTACCCAAGTCAGTCGCGCTTTGGGACAG GAAGACACTGGCAGTTTGGAAGCCACTCTGAACTTCTTGCTTACCAATCGGTCTCAAAAGATCCCTCCTCAATATGC TCTTACTGCGGAGGAGGAGAGGATCCTTAGATATGTGCAGCAGAGCGTGGGATTGTTTCTGATGCAAGAGGGGGCAA CTCCGACTGCAGCACTGGACATGACAGCGCGAAATATGGAGCCCAGCATGTATGCCAGTAACCGACCTTTCATTAAC AAACTGCTGGACTACTTGCACAGAGCTGCCGCTATGAACTCTGATTATTTCACCAATGCCATCTTAAACCCGCACTG GCTGCCCCCACCTGGTTTCTACACGGGCGAATATGACATGCCCGACCCTAATGACGGATTTCTGTGGGACGACGTGG ACAGCGATGTTTTTTCACCTCTTTCTGATCATCGCACGTGGAAAAAGGAAGGCGGTGATAGAATGCATTCTTCTGCA TCGCTGTCCGGGGTCATGGGTGCTACCGCGGCTGAGCCCGAGTCTGCAAGTCCTTTTCCTAGTCTACCCTTTTCTCT ACACAGTGTACGTAGCAGCGAAGTGGGTAGAATAAGTCGCCCGAGTTTAATGGGCGAAGAGGAGTACCTAAACGATT CCTTGCTCAGACCGGCAAGAGAAAAAAATTTCCCAAACAATGGAATAGAAAGTTTGGTGGATAAAATGAGTAGATGG AAGACTTATGCTCAGGATCACAGAGACGAGCCTGGGATCATGGGGACTACAAGTAGAGCGAGCCGTAGACGCCAGCG CCATGACAGACAGAGGGGTCTTGTGTGGGACGATGAGGATTCGGCCGATGATAGCAGCGTGTTGGACTTGGGTGGGA GAGGAAGGGGCAACCCGTTTGCTCATTTGCGCCCTCGCTTGGGTGGTATGTTGTGAAAAAAAATAAAAAAGAAAAAC TCACCAAGGCCATGGCGACGAGCGTACGTTCGTTCTTCTTTATTATCTGTGTCTAGTATAATGAGGCGAGTCGTGCT AGGCGGAGCGGTGGTGTATCCGGAGGGTCCTCCTCCTTCGTACGAGAGCGTGATGCAGCAGCAGCAGGCGACGGCGG TGATGCAATCCCCACTGGAGGCTCCCTTTGTGCCTCCGCGATACCTGGCACCTACGGAGGGCAGAAACAGCATTCGT TACTCGGAACTGGCACCTCAGTACGATACCACCAGGTTGTATCTGGTGGACAACAAGTCGGCGGACATTGCTTCTCT GAACTATCAGAATGACCACAGCAACTTCTTGACCACGGTGGTGCAGAACAATGACTTTACCCCTACGGAAGCCAGCA CCCAGACCATTAACTTTGATGAACGATCGCGGTGGGGCGGTCAGCTAAAGACCATCATGCATACTAACATGCCAAAC GTGAACGAGTATATGTTTAGTAACAAGTTCAAAGCGCGTGTGATGGTGTCCAGAAAACCTCCCGACGGTGCTGCAGT TGGGGATACTTATGATCACAAGCAGGATATTTTGGAATATGAGTGGTTCGAGTTTACTTTGCCAGAAGGCAACTTTT CAGTTACTATGACTATTGATTTGATGAACAATGCCATCATAGATAATTACTTGAAAGTGGGTAGACAGAATGGAGTG CTTGAAAGTGACATTGGTGTTAAGTTCGACACCAGGAACTTCAAGCTGGGATGGGATCCCGAAACCAAGTTGATCAT GCCTGGAGTGTATACGTATGAAGCCTTCCATCCTGACATTGTCTTACTGCCTGGCTGCGGAGTGGATTTTACCGAGA GTCGTTTGAGCAACCTTCTTGGTATCAGAAAAAAACAGCCATTTCAAGAGGGTTTTAAGATTTTGTATGAAGATTTA GAAGGTGGTAATATTCCGGCCCTCTTGGATGTAGATGCCTATGAGAACAGTAAGAAAGAACAAAAAGCCAAAATAGA AGCTGCTACAGCTGCTGCAGAAGCTAAGGCAAACATAGTTGCCAGCGACTCTACAAGGGTTGCTAACGCTGGAGAGG TCAGAGGAGACAATTTTGCGCCAACACCTGTTCCGACTGCAGAATCATTATTGGCCGATGTGTCTGAAGGAACGGAC GTGAAACTCACTATTCAACCTGTAGAAAAAGATAGTAAGAATAGAAGCTATAATGTGTTGGAAGACAAAATCAACAC AGCCTATCGCAGTTGGTATCTTTCGTACAATTATGGCGATCCCGAAAAAGGAGTGCGTTCCTGGACATTGCTCACCA CCTCAGATGTCACCTGCGGAGCAGAGCAGGTTTACTGGTCGCTTCCAGACATGATGAAGGATCCTGTCACTTTCCGC TCCACTAGACAAGTCAGTAACTACCCTGTGGTGGGTGCAGAGCTTATGCCCGTCTTCTCAAAGAGCTTCTACAACGA ACAAGCTGTGTACTCCCAGCAGCTCCGCCAGTCCACCTCGCTTACGCACGTCTTCAACCGCTTTCCTGAGAACCAGA TTTTAATCCGTCCGCCGGCGCCCACCATTACCACCGTCAGTGAAAACGTTCCTGCTCTCACAGATCACGGGACCCTG CCGTTGCGCAGCAGTATCCGGGGAGTCCAACGTGTGACCGTTACTGACGCCAGACGCCGCACCTGTCCCTACGTGTA CAAGGCACTGGGCATAGTCGCACCGCGCGTCCTTTCAAGCCGCACTTTCTAAAAAAAAAATGTCCATTCTTATCTCG CCCAGTAATAACACCGGTTGGGGTCTGCGCGCTCCAAGCAAGATGTACGGAGGCGCACGCAAACGTTCTACCCAACA TCCCGTGCGTGTTCGCGGACATTTTCGCGCTCCATGGGGTGCCCTCAAGGGCCGCACTCGCGTTCGAACCACCGTCG ATGATGTAATCGATCAGGTGGTTGCCGACGCCCGTAATTATACTCCTACTGCGCCTACATCTACTGTGGATGCAGTT ATTGACAGTGTAGTGGCTGACGCTCGCAACTATGCTCGACGTAAGAGCCGGCGAAGGCGCATTGCCAGACGCCACCG AGCTACCACTGCCATGCGAGCCGCAAGAGCTCTGCTACGAAGAGCTAGACGCGTGGGGCGAAGAGCCATGCTTAGGG CGGCCAGACGTGCAGCTTCGGGCGCCAGCGCCGGCAGGTCCCGCAGGCAAGCAGCCGCTGTCGCAGCGGCGACTATT GCCGACATGGCCCAATCGCGAAGAGGCAATGTATACTGGGTGCGTGACGCTGCCACCGGTCAACGTGTACCCGTGCG CACCCGTCCCCCTCGCACTTAGAAGATACTGAGCAGTCTCCGATGTTGTGTCCCAGCGGCGAGGATGTCCAAGCGCA AATACAAGGAAGAAATGCTGCAGGTTATCGCACCTGAAGTCTACGGCCAACCGTTGAAGGATGAAAAAAAACCCCGC AAAATCAAGCGGGTTAAAAAGGACAAAAAAGAAGAGGAAGATGGCGATGATGGGCTGGCGGAGTTTGTGCGCGAGTT TGCCCCACGGCGACGCGTGCAATGGCGTGGGCGCAAAGTTCGACATGTGTTGAGACCTGGAACTTCGGTGGTCTTTA CACCCGGCGAGCGTTCAAGCGCTACTTTTAAGCGTTCCTATGATGAGGTGTACGGGGATGATGATATTCTTGAGCAG GCGGCTGACCGATTAGGCGAGTTTGCTTATGGCAAGCGTAGTAGAATAACTTCCAAGGATGAGACAGTGTCAATACC CTTGGATCATGGAAATCCCACCCCTAGTCTTAAACCGGTCACTTTGCAGCAAGTGTTACCCGTAACTCCGCGAACAG GTGTTAAACGCGAAGGTGAAGATTTGTATCCCACTATGCAACTGATGGTACCCAAACGCCAGAAGTTGGAGGACGTT TTGGAGAAAGTAAAAGTGGATCCAGATATTCAACCTGAGGTTAAAGTGAGACCCATTAAGCAGGTAGCGCCTGGTCT GGGGGTACAAACTGTAGACATTAAGATTCCCACTGAAAGTATGGAAGTGCAAACTGAACCCGCAAAGCCTACTGCCA CCTCCACTGAAGTGCAAACGGATCCATGGATGCCCATGCCTATTACAACTGACGCCGCCGGTCCCACTCGAAGATCC CGACGAAAGTACGGTCCAGCAAGTCTGTTGATGCCCAATTATGTTGTACACCCATCTATTATTCCTACTCCTGGTTA CCGAGGCACTCGCTACTATCGCAGCCGAAACAGTACCTCCCGCCGTCGCCGCAAGACACCTGCAAATCGCAGTCGTC GCCGTAGACGCACAAGCAAACCGACTCCCGGCGCCCTGGTGCGGCAAGTGTACCGCAATGGTAGTGCGGAACCTTTG ACACTGCCGCGTGCGCGTTACCATCCGAGTATCATCACTTAATCAATGTTGCCGCTGCCTCCTTGCAGATATGGCCC TCACTTGTCGCCTTCGCGTTCCCATCACTGGTTACCGAGGAAGAAACTCGCGCCGTAGAAGAGGGATGTTGGGACGC GGAATGCGACGCTACAGGCGACGGCGTGCTATCCGCAAGCAATTGCGGGGTGGTTTTTTACCAGCCTTAATTCCAAT TATCGCTGCTGCAATTGGCGCGATACCAGGCATAGCTTCCGTGGCGGTTCAGGCCTCGCAACGACATTGACATTGGA AAAAAAACGTATAAATAAAAAAAAATACAATGGACTCTGACACTCCTGGTCCTGTGACTATGTTTTCTTAGAGATGG AAGACATCAATTTTTCATCCTTGGCTCCGCGACACGGCACGAAGCCGTACATGGGCACCTGGAGCGACATCGGCACG AGCCAACTGAACGGGGGCGCCTTCAATTGGAGCAGTATCTGGAGCGGGCTTAAAAATTTTGGCTCAACCATAAAAAC ATACGGGAACAAAGCTTGGAACAGCAGTACAGGACAGGCGCTTAGAAATAAACTTAAAGACCAGAACTTCCAACAAA AAGTAGTCGATGGGATAGCTTCCGGCATCAATGGAGTGGTAGATTTGGCTAACCAGGCTGTGCAGAAAAAGATAAAC AGTCGTTTGGACCCGCCGCCAGCAACCCCAGGTGAAATGCAAGTGGAGGAAGAAATTCCTCCGCCAGAAAAACGAGG CGACAAGCGTCCGCGTCCCGATTTGGAAGAGACGCTGGTGACGCGCGTAGATGAACCGCCTTCTTATGAGGAAGCAA CGAAGCTTGGAATGCCCACCACTAGACCGATAGCCCCAATGGCCACCGGGGTGATGAAACCTTCTCAGTTGCATCGA CCCGTCACCTTGGATTTGCCCCCTCCCCCTGCTGCTACTGCTGTACCCGCTTCTAAGCCTGTCGCTGCCCCGAAACC AGTCGCCGTAGCCAGGTCACGTCCCGGGGGCGCTCCTCGTCCAAATGCGCACTGGCAAAATACTCTGAACAGCATCG TGGGTCTAGGCGTGCAAAGTGTAAAACGCCGTCGCTGCTTTTAATTAAATATGGAGTAGCGCTTAACTTGCCTATCT GTGTATATGTGTCATTACACGCCGTCACAGCAGCAGAGGAAAAAAGGAAGAGGTCGTGCGTCGACGCTGAGTTACTT TCAAGATGGCCACCCCATCGATGCTGCCCCAATGGGCATACATGCACATCGCCGGACAGGATGCTTCGGAGTACCTG AGTCCGGGTCTGGTGCAGTTCGCCCGCGCCACAGACACCTACTTCAATCTGGGAAATAAGTTTAGAAATCCCACCGT AGCGCCGACCCACGATGTGACCACCGACCGTAGCCAGCGGCTCATGTTGCGCTTCGTGCCCGTTGACCGGGAGGACA ATACATACTCTTACAAAGTGCGGTACACCCTGGCCGTGGGCGACAACAGAGTGCTGGATATGGCCAGCACGTTCTTT GACATTAGGGGCGTGTTGGACAGAGGTCCCAGTTTCAAACCCTATTCTGGTACGGCTTACAACTCTCTGGCTCCTAA AGGCGCTCCAAATGCATCTCAATGGATTGCAAAAGGCGTACCAACTGCAGCAGCCGCAGGCAATGGTGAAGAAGAAC ATGAAACAGAGGAGAAAACTGCTACTTACACTTTTGCCAATGCTCCTGTAAAAGCCGAGGCTCAAATTACAAAAGAG GGCTTACCAATAGGTTTGGAGATTTCAGCTGAAAACGAATCTAAACCCATCTATGCAGATAAACTTTATCAGCCAGA ACCTCAAGTGGGAGATGAAACTTGGACTGACCTAGACGGAAAAACCGAAGAGTATGGAGGCAGGGCTCTAAAGCCTA CTACTAACATGAAACCCTGTTACGGGTCCTATGCGAAGCCTACTAATTTAAAAGGTGGTCAGGCAAAACCGAAAAAC TCGGAACCGTCGAGTGAAAAAATTGAATATGATATTGACATGGAATTTTTTGATAACTCATCGCAAAGAACAAACTT CAGTCCTAAAATTGTCATGTATGCAGAAAATGTAGGTTTGGAAACGCCAGACACTCATGTAGTGTACAAACCTGGAA CAGAAGACACAAGTTCCGAAGCTAATTTGGGACAACAGTCTATGCCCAACAGACCCAACTACATTGGCTTCAGAGAT AACTTTATTGGACTCATGTACTATAACAGTACTGGTAACATGGGGGTGCTGGCTGGTCAAGCGTCTCAGTTAAATGC AGTGGTTGACTTGCAGGACAGAAACACAGAACTTTCTTACCAACTCTTGCTTGACTCTCTGGGCGACAGAACCAGAT ACTTTAGCATGTGGAATCAGGCTGTGGACAGTTATGATCCTGATGTACGTGTTATTGAAAATCATGGTGTGGAAGAT GAACTTCCCAACTATTGTTTTCCACTGGACGGCATAGGTGTTCCAACAACCAGTTACAAATCAATAGTTCCAAATGG AGAAGATAATAATAATTGGAAAGAACCTGAAGTAAATGGAACAAGTGAGATCGGACAGGGTAATTTGTTTGCCATGG AAATTAACCTTCAAGCCAATCTATGGCGAAGTTTCCTTTATTCCAATGTGGCTCTGTATCTCCCAGACTCGTACAAA TACACCCCGTCCAATGTCACTCTTCCAGAAAACAAAAACACCTACGACTACATGAACGGGCGGGTGGTGCCGCCATC TCTAGTAGACACCTATGTGAACATTGGTGCCAGGTGGTCTCTGGATGCCATGGACAATGTCAACCCATTCAACCACC ACCGTAACGCTGGCTTGCGTTACCGATCTATGCTTCTGGGTAACGGACGTTATGTGCCTTTCCACATACAAGTGCCT CAAAAATTCTTCGCTGTTAAAAACCTGCTGCTTCTCCCAGGCTCCTACACTTATGAGTGGAACTTTAGGAAGGATGT GAACATGGTTCTACAGAGTTCCCTCGGTAACGACCTGCGGGTAGATGGCGCCAGCATCAGTTTCACGAGCATCAACC TCTATGCTACTTTTTTCCCCATGGCTCACAACACCGCTTCCACCCTTGAAGCCATGCTGCGGAATGACACCAATGAT CAGTCATTCAACGACTACCTATCTGCAGCTAACATGCTCTACCCCATTCCTGCCAATGCAACCAATATTCCCATTTC CATTCCTTCTCGCAACTGGGCGGCTTTCAGAGGCTGGTCATTTACCAGACTGAAAACCAAAGAAACTCCCTCTTTGG GGTCTGGATTTGACCCCTACTTTGTCTATTCTGGTTCTATTCCCTACCTGGATGGTACCTTCTACCTGAACCACACT TTTAAGAAGGTTTCCATCATGTTTGACTCTTCAGTGAGCTGGCCTGGAAATGACAGGTTACTATCTCCTAACGAATT TGAAATAAAGCGCACTGTGGATGGCGAAGGCTACAACGTAGCCCAATGCAACATGACCAAAGACTGGTTCTTGGTAC AGATGCTCGCCAACTACAACATCGGCTATCAGGGCTTCTACATTCCAGAAGGATACAAAGATCGCATGTATTCATTT TTCAGAAACTTCCAGCCCATGAGCAGGCAGGTGGTTGATGAGGTCAATTACAAAGACTTCAAGGCCGTCGCCATACC CTACCAACACAACAACTCTGGCTTTGTGGGTTACATGGCTCCGACCATGCGCCAAGGTCAACCCTATCCCGCTAACT ATCCCTATCCACTCATTGGAACAACTGCCGTAAATAGTGTTACGCAGAAAAAGTTCTTGTGTGACAGAACCATGTGG CGCATACCGTTCTCGAGCAACTTCATGTCTATGGGGGCCCTTACAGACTTGGGACAGAATATGCTCTATGCCAACTC AGCTCATGCTCTGGACATGACCTTTGAGGTGGATCCCATGGATGAGCCCACCCTGCTTTATCTTCTCTTCGAAGTTT TCGACGTGGTCAGAGTGCATCAGCCACACCGCGGCATCATCGAGGCAGTCTACCTGCGTACACCGTTCTCGGCCGGT AACGCTACCACGTAAGAAGCTTCTTGCTTCTTGCAAATAGCAGCTGCAACCATGGCCTGCGGATCCCAAAACGGCTC CAGCGAGCAAGAGCTCAGAGCCATTGTCCAAGACCTGGGTTGCGGACCCTATTTTTTGGGAACCTACGATAAGCGCT TCCCGGGGTTCATGGCCCCCGATAAGCTCGCCTGTGCCATTGTAAATACGGCCGGACGTGAGACGGGGGGAGAGCAC TGGTTGGCTTTCGGTTGGAACCCACGTTCTAACACCTGCTACCTTTTTGATCCTTTTGGATTCTCGGATGATCGTCT CAAACAGATTTACCAGTTTGAATATGAGGGTCTCCTGCGCCGCAGCGCTCTTGCTACCAAGGACCGCTGTATTACGC TGGAAAAATCTACCCAGACCGTGCAGGGCCCCCGTTCTGCCGCCTGCGGACTTTTCTGCTGCATGTTCCTTCACGCC TTTGTGCACTGGCCTGACCGTCCCATGGACGGAAACCCCACCATGAAATTGCTAACTGGAGTGCCAAACAACATGCT TCATTCTCCTAAAGTCCAGCCCACCCTGTGTGACAATCAAAAAGCACTCTACCATTTTCTTAATACCCATTCGCCTT ATTTTCGCTCTCATCGTACACACATCGAAAGGGCCACTGCGTTCGACCGTATGGATGTTCAATAATGACTCATGTAA ACAACGTGTTCAATAAACATCACTTTATTTTTTTACATGTATCAAGGCTCTGGATTACTTATTTATTTACAAGTCGA ATGGGTTCTGACGAGAATCAGAATGACCCGCAGGCAGTGATACGTTGCGGAACTGATACTTGGGTTGCCACTTGAAT TCGGGAATCACCAACTTGGGAACCGGTATATCGGGCAGGATGTCACTCCACAGCTTTCTGGTCAGCTGCAAAGCTCC AAGCAGGTCAGGAGCCGAAATCTTGAAATCACAATTAGGACCAGTGCTCTGAGCGCGAGAGTTGCGGTACACCGGAT TGCAGCACTGAAACACCATCAGCGACGGATGTCTCACGCTTGCCAGCACGGTGGGATCTGCAATCATGCCCACATCC AGATCTTCAGCATTGGCAATGCTGAACGGGGTCATCTTGCAGGTCTGCCTACCCATGGCGGGCACCCAATTAGGCTT GTGGTTGCAATCGCAGTGCAGGGGGATCAGTATCATCTTGGCCTGATCCTGTCTGATTCCTGGATACACGGCTCTCA TGAAAGCATCATATTGCTTGAAAGCCTGCTGGGCTTTACTACCCTCGGGATAAAACATCCCGCAGGACCTGCTCGAA AACTGGTTAGCCTGCACAGCCGGCATCATTCACACAGCAGCGGGCGTCATTGTTGGCTATTTGCACCACACTTCTGC CCCAGCGGTTTTGGGTGATTTTGGTTCGCTCGGGATTCTCCTTTAAGGCTCGTTGTCCGTTCTCGCTGGCCACATCC ATCTCGATAATCTGCTCCTTCTGAATCATAATATTGCCATGCAGGCACTTCAGCTTGCCCTCATAATCATTGCAGCC ATGAGGCCACAACGCACAGCCTGTACATTCCCAATTATGGTGGGCGATCTGAGAAAAAGAATGTATCATTCCCTGCA GAAATCTTCCCATCATCGTGCTCAGTGTCTTGTGACTAGTGAAAGTTAACTGGATGCCTCGGTGCTCTTCGTTTACG TACTGGTGACAGATGCGCTTGTATTGTTCGTGTTGCTCAGGCATTAGTTTAAAACAGGTTCTAAGTTCGTTATCCAG CCTGTACTTCTCCATCAGCAGACACATCACTTCCATGCCTTTCTCCCAAGCAGACACCAGGGGCAAGCTAATCGGAT TCTTAACAGTGCAGGCAGCAGCTCCTTTAGCCAGAGGGTCATCTTTAGCGATCTTCTCAATGCTTCTTTTGCCATCC TTCTCAACGATGCGCACGGGCGGGTAGCTGAAACCCACTGCTACAAGTTGCGCCTCTTCTCTTTCTTCTTCGCTGTC TTGACTGATGTCTTGCATGGGGATATGTTTGGTCTTCCTTGGCTTCTTTTTGGGGGGTATCGGAGGAGGAGGACTGT CGCTCCGTTCCGGAGACAGGGAGGATTGTGACGTTTCGCTCACCATTACCAACTGACTGTCGGTAGAAGAACCTGAC CCCACACGGCGACAGGTGTTTTTCTTCGGGGGCAGAGGTGGAGGCGATTGCGAAGGGCTGCGGTCCGACCTGGAAGG CGGATGACTGGCAGAACCCCTTCCGCGTTCGGGGGTGTGCTCCCTGTGGCGGTCGCTTAACTGATTTCCTTCGCGGC TGGCCATTGTGTTCTCCTAGGCAGAGAAACAACAGACATGGAAACTCAGCCATTGCTGTCAACATCGCCACGAGTGC CATCACATCTCGTCCTCAGCGACGAGGAAAAGGAGCAGAGCTTAAGCATTCCACCGCCCAGTCCTGCCACCACCTCT ACCCTAGAAGATAAGGAGGTCGACGCATCTCATGACATGCAGAATAAAAAAGCGAAAGAGTCTGAGACAGACATCGA GCAAGACCCGGGCTATGTGACACCGGTGGAACACGAGGAAGAGTTGAAACGCTTTCTAGAGAGAGAGGATGAAAACT GCCCAAAACAGCGAGCAGATAACTATCACCAAGATGCTGGAAATAGGGATCAGAACACCGACTACCTCATAGGGCTT GACGGGGAAGACGCGCTCCTTAAACATCTAGCAAGACAGTCGCTCATAGTCAAGGATGCATTATTGGACAGAACTGA AGTGCCCATCAGTGTGGAAGAGCTCAGCTGCGCCTACGAGCTTAACCTTTTTTCACCTCGTACTCCCCCCAAACGTC AGCCAAACGGCACCTGCGAGCCAAATCCTCGCTTAAACTTTTATCCAGCTTTTGCTGTGCCAGAAGTACTGGCTACC TATCACATCTTTTTTAAAAATCAAAAAATTCCAGTCTCCTGCCGCGCTAATCGCACCCGCGCCGATGCCCTACTCAA TCTGGGACCTGGTTCACGCTTACCTGATATAGCTTCCTTGGAAGAGGTTCCAAAGATCTTCGAGGGTCTGGGCAATA ATGAGACTCGGGCCGCAAATGCTCTGCAAAAGGGAGAAAATGGCATGGATGAGCATCACAGCGTTCTGGTGGAATTG GAAGGCGATAATGCCAGACTCGCAGTACTCAAGCGAAGCGTCGAGGTCACACACTTCGCATATCCCGCTGTCAACCT GCCCCCTAAAGTCATGACGGCGGTCATGGACCAGTTACTCATTAAGCGCGCAAGTCCCCTTTCAGAAGACATGCATG ACCCAGATGCCTGTGATGAGGGTAAACCAGTGGTCAGTGATGAGCAGCTAACCCGATGGCTGGGCACCGACTCTCCC CGGGATTTGGAAGAGCGTCGCAAGCTTATGATGGCCGTGGTGCTGGTTACCGTAGAACTAGAGTGTCTCCGACGTTT CTTTACCGATTCAGAAACCTTGCGCAAACTCGAAGAGAATCTGCACTACACTTTTAGACACGGCTTTGTGCGGCAGG CATGCAAGATATCTAACGTGGAACTCACCAACCTGGTTTCCTACATGGGTATTCTGCATGAGAATCGCCTAGGACAA AGCGTGCTGCACAGCACCCTTAAGGGGGAAGCCCGCCGTGATTACATCCGCGATTGTGTCTATCTCTACCTGTGCCA CACGTGGCAAACCGGCATGGGTGTATGGCAGCAATGTTTAGAAGAACAGAACTTGAAAGAGCTTGACAAGCTCTTAC AGAAATCTCTTAAGGTTCTGTGGACAGGGTTCGACGAGCGCACCGTCGCTTCCGACCTGGCAGACCTCATCTTCCCA GAGCGTCTCAGGGTTACTTTGCGAAACGGATTGCCTGACTTTATGAGCCAGAGCATGCTTAACAATTTTCGCTCTTT CATCCTGGAACGCTCCGGTATCCTGCCCGCCACCTGCTGCGCACTGCCCTCCGACTTTGTGCCTCTCACCTACCGCG AGTGCCCCCCGCCGCTATGGAGTCACTGCTACCTGTTCCGTCTGGCCAACTATCTCTCCTACCACTCGGATGTGATC GAGGATGTGAGCGGAGACGGCTTGCTGGAGTGCCACTGCCGCTGCAATCTGTGCACGCCCCACCGGTCCCTAGCTTG CAACCCCCAGTTGATGAGCGAAACCCAGATAATAGGCACCTTTGAATTGCAAGGCCCCAGCAGCCAAGGCGATGGGT CTTCTCCTGGGCAAAGTTTAAAACTGACCCCGGGACTGTGGACCTCCGCCTACTTGCGCAAGTTTGCTCCGGAAGAT TACCACCCCTATGAAATCAAGTTCTATGAGGACCAATCACAGCCTCCAAAGGCCGAACTTTCGGCTTGCGTCATCAC CCAGGGGGCAATTCTGGCCCAATTGCAAGCCATCCAAAAATCCCGCCAAGAATTTCTACTGAAAAAGGGTAAGGGGG TCTACCTTGACCCCCAGACCGGCGAGGAACTCAACACAAGGTTCCCTCAGGATGTCCCAACGACGAGAAAACAAGAA GTTGAAGGTGCAGCCGCCGCCCCCAGAAGATATGGAGGAAGATTGGGACAGTCAGGCAGAGGAGGCGGAGGAGGACA GTCTGGAGGACAGTCTGGAGGAAGACAGTTTGGAGGAGGAAAACGAGGAGGCAGAGGAGGTGGAAGAAGTAACCGCC GACAAACAGTTATCCTCGGCTGCGGAGACAAGCAACAGCGCTACCATCTCCGCTCCGAGTCGAGGAACCCGGCGGCG TCCCAGCAGTAGATGGGACGAGACCGGACGCTTCCCGAACCCAACCAGCGCTTCCAAGACCGGTAAGAAGGATCGGC AGGGATACAAGTCCTGGCGGGGGCATAAGAATGCCATCATCTCCTGCTTGCATGAGTGCGGGGGCAACATATCCTTC ACGCGGCGCTACTTGCTATTCCACCATGGGGTGAACTTTCCGCGCAATGTTTTGCATTACTACCGTCACCTCCACAG CCCCTACTATAGCCAGCAAATCCCGACAGTCTCGACAGATAAAGACAGCGGCGGCGACCTCCAACAGAAAACCAGCA GCGGCAGTTAGAAAATACACAACAAGTGCAGCAACAGGAGGATTAAAGATTACAGCCAACGAGCCAGCGCAAACCCG AGAGTTAAGAAATCGGATCTTTCCAACCCTGTATGCCATCTTCCAGCAGAGTCGGGGTCAAGAGCAGGAACTGAAAA TAAAAAACCGATCTCTGCGTTCGCTCACCAGAAGTTGTTTGTATCACAAGAGCGAAGATCAACTTCAGCGCACTCTC GAGGACGCCGAGGCTCTCTTCAACAAGTACTGCGCGCTGACTCTTAAAGAGTAGGCAGCGACCGCGCTTATTCAAAA AAGGCGGGAATTACATCATCCTCGACATGAGTAAAGAAATTCCCACGCCTTACATGTGGAGTTATCAACCCCAAATG GGATTGGCAGCAGGCGCCTCCCAGGACTACTCCACCCGCATGAATTGGCTCAGCGCCGGGCCTTCTATGATTTCTCG AGTTAATGATATACGCGCCTACCGAAACCAAATACTTTTGGAACAGTCAGCTCTTACCACCACGCCCCGCCAACACC TTAATCCCAGAAATTGGCCCGCCGCCCTAGTGTACCAGGAAAGTCCCGCTCCCACCACTGTATTACTTCCTCGAGAC GCCCAGGCCGAAGTCCAAATGACTAATGCAGGTGCGCAGTTAGCTGGCGGCTCCACCCTATGTCGTCACAGGCCTCG GCATAATATAAAACGCCTGATGATCAGAGGCCGAGGTATCCAGCTCAACGACGAGTCGGTGAGCTCTCCGCTTGGTC TACGACCAGACGGAATCTTTCAGATTGCCGGCTGCGGGAGATCTTCCTTCACCCCTCGTCAGGCTGTTCTGACTTTG GAAAGTTCGTCTTCGCAACCCCGCTCGGGCGGAATCGGGACCGTTCAATTTGTAGAGGAGTTTACTCCCTCTGTCTA CTTCAACCCCTTCTCCGGATCTCCTGGGCACTACCCGGACGAGTTCATACCGAACTTCGACGCGATTAGCGAGTCAG TGGACGGCTACGATTGATGTCTGGTGACGCGGCTGAGCTATCTCGGCTGCGACATCTAGACCACTGCCGCCGCTTTC GCTGCTTTGCCCGGGAACTTATTGAGTTCATCTACTTCGAACTCCCCAAGGATCACCCTCAAGGTCCGGCCCACGGA GTGCGGATTACTATCGAAGGCAAAATAGACTCTCGCCTGCAACGAATTTTCTCCCAGCGGCCCGTGCTGATCGAGCG AGACCAGGGAAACACCACGGTTTCCATCTACTGCATTTGTAATCACCCCGGATTGCATGAAAGCCTTTGCTGTCTTA TGTGTACTGAGTTTAATAAAAACTGAATTAAGACTCTCCTACGGACTGCCGCTTCTTCAACCCGGATTTTACAACCA GAAGAACAAAACTTTTCCTGTCGTCCAGGACTCTGTTAACTTCACCTTTCCTACTCACAAACTAGAAGCTCAACGAC TACACCGCTTTTCCAGAAGCATTTTCCCTACTAATACTACTTTCAAAACCGGAGGTGAGCTCCACGGTCTCCCTACA GAAAACCCTTGGGTGGAAGCGGGCCTTGTAGTACTAGGAATTCTTGCGGGTGGGCTTGTGATTATTCTTTGCTACCT ATACACACCTTGCTTCACTTTCCTAGTGGTGTTGTGGTATTGGTTTAAAAAATGGGGCCCATACTAGTCTTGCTTGT TTTACTTTCGCTTTTGGAACCGGGTTCTGCCAATTACGATCCATGTCTAGACTTTGACCCAGAAAACTGCACACTTA CTTTTGCACCCGACACAAGCCGCATCTGTGGAGTTCTTATTAAGTGCGGATGGGAATGCAGGTCCGTTGAAATTACA CACAATAACAAAACCTGGAACAATACCTTATCCACCACATGGGAGCCAGGAGTTCCCGAGTGGTACACTGTCTCTGT CCGAGGTCCTGACGGTTCCATCCGCATTAGTAACAACACTTTCATTTTTTCTGAAATGTGCGATCTGGCCATGTTCA TGAGCAAACAGTATTCTCTATGGCCTCCTAGCAAGGACAACATCGTAACGTTCTCCATTGCTTATTGCTTGTGCGCT TGCCTTCTTACTGCTTTACTGTGCGTATGCATACACCTGCTTGTAACCACTCGCATCAAAAACGCCAATAACAAAGA AAAAATGCCTTAACCTCTTTCTGTTTACAGACATGGCTTCTCTTACATCTCTCATATTTGTCAGCATTGTCACTGCC GCTCACGGACAAACAGTCGTCTCTATCCCACTAGGACATAATTACACTCTCATAGGACCCCCAATCACTTCAGAGGT CATCTGGACCAAACTGGGAAGCGTTGATTACTTTGATATAATCTGTAACAAAACAAAACCAATAATAGTAACTTGCA ACATACAAAATCTTACATTGATTAATGTTAGCAAAGTTTACAGCGGTTACTATTATGGTTATGACAGATACAGTAGT CAATATAGAAATTACTTGGTTCGTGTTACCCAGTTGAAAACCACGAAAATGCCAAATATGGCAAAGATTCGATCCGA TGACAATTCTCTAGAAACTTTTACATCTCCCACCACACCCGACGAAAAAAACATCCCAGATTCAATGATTGCAATTG TTGCAGCGGTGGCAGTGGTGATGGCACTAATAATAATATGCATGCTTTTATATGCTTGTCGCTACAAAAAGTTTCAT CCTAAAAAACAAGATCTCCTACTAAGGCTTAACATTTAATTTCTTTTTATACAGCCATGGTTTCCACTACCACATTC CTTATGCTTACTAGTCTCGCAACTCTGACTTCTGCTCGCTCACACCTCACTGTAACTATAGGCTCAAACTGCACACT AAAAGGACCTCAAGGTGGTCATGTCTTTTGGTGGAGAATATATGACAATGGATGGTTTACAAAACCATGTGACCAAC CTGGTAGATTTTTCTGCAACGGCAGAGACCTAACCATTATCAACGTGACAGCAAATGACAAAGGCTTCTATTATGGA ACCGACTATAAAAGTAGTTTAGATTATAACATTATTGTACTGCCATCTACCACTCCACCACCCCGCACAACTACTTT CTCTAGCAGCAGTGTCGCTAACAATACAATTTCCAATCCAACCTTTGCCGCGCTTTTAAAACGCACTGTGAATAATT CTACAACTTCACATACAACAATTTCCACTTCAACAATCAGCATCATCGCTGCAGTGACAATTGGAATATCTATTCTT GTTTTTACCATAACCTACTACGCCTGCTGCTATAGAAAAGACAAACATAAAGGTGATCCATTACTTAGATTTGATAT TTAATTTGTTCTTTTTTTTTATTTACAGTATGGTGAACACCAATCATGGTACCTAGAAATTTCTTCTTCACCATACT CATCTGTGCTTTTAATGTTTGCGCTACTTTCACAGCAGTAGCCACAGCAACCCCAGACTGTATAGGAGCATTTGCTT CCTATGCACTTTTTGCTTTTGTTACTTGCATCTGCGTATGTAGCATAGTCTGCCTGGTTATTAATTTTTTCCAACTT CTAGACTGGATCCTTGTGCGAATTGCCTACCTGCGCCACCATCCCGAATACCGCAACCAAAATATCGCGGCACTTCT TAGACTCATCTAAAACCATGCAGGCTATACTACCAATATTTTTGCTTCTATTGCTTCCCTACGCTGTCTCAACCCCA GCTGCCTATAGTACTCCACCAGAACACCTTAGAAAATGCAAATTCCAACAACCGTGGTCATTTCTTGCTTGCTATCG AGAAAAATCAGAAATCCCCCCAAATTTAATAATGATTGCTGGAATAATTAATATAATCTGTTGCACCATAATTTCAT TTTTGATATACCCCCTATTTGATTTTGGCTGGAATGCTCCCAATGCACATGATCATCCACAAGACCCAGAGGAACAC ATTCCCCCACAAAACATGCAACATCCAATAGCGCTAATAGATTACGAAAGTGAACCACAACCCCCACTACTCCCTGC TATTAGTTACTTCAACCTAACCGGCGGAGATGACTGAAACACTCACCACCTCCAATTCCGCCGAGGATCTGCTCGAT ATGGACGGCCGCGTCTCAGAACAACGACTTGCCCAACTACGCATCCGCCAGCAGCAGGAACGCGTGGCCAAAGAGCT CAGAGATGTCATCCAAATTCACCAATGCAAAAAAGGCATATTCTGTTTGGTAAAACAAGCCAAGATATCCTACGAGA TCACCGCTACTGACCATCGCCTCTCTTACGAACTTGGCCCCCAACGACAAAAATTTACCTGCATGGTGGGAATCAAC CCCATAGTTATCACCCAACAAAGTGGAGATACTAAGGGTTGCATTCACTGTTCCTGCGATTCCATCGAGTGCACCTA CACCCTGCTGAAGACCCTATGCGGCCTAAGAGACCTGCTACCAATGAATTAAAAAAAAATGATTAATAAAAAATCAC TTACTTGAAATCAGCAATAAGGTCTCTGTTGAAATTTTCTCCCAGCAGCACCTCACTTCCCTCTTCCCAACTCTGGT ATTCTAAACCCCGTTCAGCGGCATACTTTCTCCATACTTTAAAGGGGATGTCAAATTTTAGCTCCTCTCCTGTACCC ACAATCTTCATGTCTTTCTTCCCAGATGACCAAGAGAGTCCGGCTCAGTGACTCCTTCAACCCTGTCTACCCCTATG AAGATGAAAGCACCTCCCAACACCCCTTTTATAACCCAGGGTTTATTTCCCCAAATGGCTTCACACAAAGCCCAGAC GGAGTTCTTACTTTAAAATGTTTAACCCCACTAACAACCACAGGCGGATCTCTACAGCTAAAAGTGGGAGGGGGACT TACAGTGGATGACACTGATGGTACCTTACAAGAAAACATACGTGCTACAGCACCCATTACTAAAAATAATCACTCTG TAGAACTATCCATTGGAAATGGATTAGAAACTCAAAACAATAAACTATGTGCCAAATTGGGAAATGGGTTAAAATTT AACAACGGTGACATTTGTATAAAGGATAGTATTAACACCTTATGGACTGGAATAAACCCTCCACCTAACTGTCAAAT TGTGGAAAACACTAATACAAATGATGGCAAACTTACTTTAGTATTAGTAAAAAATGGAGGGCTTGTTAATGGCTACG TGTCTCTAGTTGGTGTATCAGACACTGTGAACCAAATGTTCACACAAAAGACAGCAAACATCCAATTAAGATTATAT TTTGACTCTTCTGGAAATCTATTAACTGAGGAATCAGACTTAAAAATTCCACTTAAAAATAAATCTTCTACAGCGAC CAGTGAAACTGTAGCCAGCAGCAAAGCCTTTATGCCAAGTACTACAGCTTATCCCTTCAACACCACTACTAGGGATA GTGAAAACTACATTCATGGAATATGTTACTACATGACTAGTTATGATAGAAGTCTATTTCCCTTGAACATTTCTATA ATGCTAAACAGCCGTATGATTTCTTCCAATGTTGCCTATGCCATACAATTTGAATGGAATCTAAATGCAAGTGAATC TCCAGAAAGCAACATAGCTACGCTGACCACATCCCCCTTTTTCTTTTCTTACATTACAGAAGACGACAACTAAAATA AAGTTTAAGTGTTTTTATTTAAAATCACAAAATTCGAGTAGTTATTTTGCCTCCACCTTCCCATTTGACAGAATACA CCAATCTCTCCCCACGCACAGCTGTTAAACATTTGGATACCATTAGAGATAGACATTGTTTTAGATTCCACATTCCA AACAGTTTCAGAGCGAGCCAATCTGGGGTCAGTGATAGATAAAAATCCATCGCGATAGTCTTTTAAAGCGCTTTCAC AGTCCAACTGCTGCGGATGCGACTCCGGAGTTTGGATCACGGTCATCTGGAAGAAGAACGATGGGAATCATAATCCG AAAACGGTATCGGACGATTGTGTCTCATCAAACCCACAAGCAGCCGCTGTCTGCGTCGCTCCGTGCGACTGCTGTTT ATGGGATCAGGGTCCACAGTTTCCTGAAGCATGATTTTAATAGCCCTTAACATCAACTTTCTGGTGCGATGCGCGCA GCAACGCATTCTGATTTCACTCAAATCTTTGCAGTAGGTACAACACATTATTACAATATTGTTTAATAAACCATAAT TAAAAGCGCTCCAGCCAAAACTCATATCTGATATAATCGCCCCTGCATGACCATCATACCAAAGTTTAATATAAATT AAATGACGTTCCCTCAAAAACACACTACCCACATACATGATCTCTTTTGGCATGTGCATATTAACAATCTGTCTGTA CCATGGACAACGTTGGTTAATCATGCAACCCAATATAACCTTCCGGAACCACACTGCCAACACCGCTCCCCCAGCCA TGCATTGAAGTGAACCCTGCTGATTACAATGACAATGAAGAACCCAATTCTCTCGACCGTGAATCACTTGAGAATGA AAAATATCTATAGTGGCACAACATAGACATAAATGCATGCATCTTCTCATAATTTTTAACTCCTCAGGATTTAGAAA CATATCCCAGGGAATAGGAAGCTCTTGCAGAACAGTAAAGCTGGCAGAACAAGGAAGACCACGAACACAACTTACAC TATGCATAGTCATAGTATCACAATCTGGCAACAGCGGGTGGTCTTCAGTCATAGAAGCTCGGGTTTCATTTTCCTCA CAACGTGGTAACTGGGCTCTGGTGTAAGGGTGATGTCTGGCGCATGATGTCGAGCGTGCGCGCAACCTTGTCATAAT GGAGTTGCTTCCTGACATTCTCGTATTTTGTATAGCAAAACGCGGCCCTGGCAGAACACACTCTTCTTCGCCTTCTA TCCTGCCGCTTAGCGTGTTCCGTGTGATAGTTCAAGTACAGCCACACTCTTAAGTTGGTCAAAAGAATGCTGGCTTC AGTTGTAATCAAAACTCCATCGCATCTAATTGTTCTGAGGAAATCATCCACGGTAGCATATGCAAATCCCAACCAAG CAATGCAACTGGATTGCGTTTCAAGCAGGAGAGGAGAGGGAAGAGACGGAAGAACCATGTTAATTTTTATTCCAAAC GATCTCGCAGTACTTCAAATTGTAGATCGCGCAGATGGCATCTCTCGCCCCCACTGTGTTGGTGAAAAAGCACAGCT AAATCAAAAGAAATGCGATTTTCAAGGTGCTCAACGGTGGCTTCCAACAAAGCCTCCACGCGCACATCCAAGAACAA AAGAATACCAAAAGAAGGAGCATTTTCTAACTCCTCAATCATCATATTACATTCCTGCACCATTCCCAGATAATTTT CAGCTTTCCAGCCTTGAATTATTCGTGTCAGTTCTTGTGGTAAATCCAATCCACACATTACAAACAGGTCCCGGAGG GCGCCCTCCACCACCATTCTTAAACACACCCTCATAATGACAAAATATCTTGCTCCTGTGTCACCTGTAGCGAATTG AGAATGGCAACATCAATTGACATGCCCTTGGCTCTAAGTTCTTCTTTAAGTTCTAGTTGTAAAAACTCTCTCATATT ATCACCAAACTGCTTAGCCAGAAGCCCCCCGGGAACAAGAGCAGGGGACGCTACAGTGCAGTACAAGCGCAGACCTC CCCAATTGGCTCCAGCAAAAACAAGATTGGAATAAGCATATTGGGAACCACCAGTAATATCATCGAAGTTGCTGGAA ATATAATCAGGCAGAGTTTCTTGTAGAAATTGAATAAAAGAAAAATTTGCCAAAAAAACATTCAAAACCTCTGGGAT GCAAATGCAATAGGTTACCGCGCTGCGCTCCAACATTGTTAGTTTTGAATTAGTCTGCAAAAATAAAAAAAAAACAA GCGTCATATCATAGTAGCCTGACGAACAGGTGGATAAATCAGTCTTTCCATCACAAGACAAGCCACAGGGTCTCCAG CTCGACCCTCGTAAAACCTGTCATCGTGATTAAACAACAGCACCGAAAGTTCCTCGCGGTGACCAGCATGAATAAGT CTTGATGAAGCATACAATCCAGACATGTTAGCATCAGTTAAGGAGAAAAAACAGCCAACATAGCCTTTGGGTATAAT TATGCTTAATCGTAAGTATAGCAAAGCCACCCCTCGCGGATACAAAGTAAAAGGCACAGGAGAATAAAAAATATAAT TATTTCTCTGCTGCTGTTTAGGCAACGTCGCCCCCGGTCCCTCTAAATACACATACAAAGCCTCATCAGCCATGGCT TACCAGAGAAAGTACAGCGGGCACACAAACCACAAGCTCTAAAGTCACTCTCCAACCTCTCCACAATATATATACAC AAGCCCTAAACTGACGTAATGGGACTAAAGTGTAAAAAATCCCGCCAAACCCAACACACACCCCGAAACTGCGTCAC CAGGGAAAAGTACAGTTTCACTTCCGCAATCCCAACAAGCGTCACTTCCTCTTTCTCACGGTACGTCACATCCCATT AACTTACAACGTCATTTTCCCACGGCCGCGCCGCCCCTTTTAACCGTTAACCCCACAGCCAATCACCACACGGCCCA CACTTTTTAAAATCACCTCATTTACATATTGGCACCATTCCATCTATAAGGTATATTATTGATGATG

[0642] GenBank Accession No. AP_000580 MRRVVLGGAVVYPEGPPPSYESVMQQQQATAVMOSPLEAPFVPPRYLAPTEGRNSIRYSELAPQYDTTRLYLVDNKS ADIASLNYQNDHSNFLTTVVONNDFTPTEASTQTINFDERSRWGGOLKTIMHTNMPNVNEYMESNKFKARVMVSRKP PDGAAVGDTYDHKQDILEYEWFEFTLPEGNESVIMTIDLMNNAIIDNYLKVGRONGVLESDIGVKFDTRNFKLGWDP ETKLIMPGVYTYEAFHPDIVLLPGCGVDFTESRLSNLLGIRKKOPFQEGFKILYEDLEGGNIPALLDVDAYENSKKE QKAKIEAATAAAEAKANIVASDSTRVANAGEVRGDNFAPTPVPTAESLLADVSEGTDVKLTIQPVEKDSKNRSYNVL EDKINTAYRSWYLSYNYGDPEKGVRSWTLLTTSDVTCGAEQVYWSLPDMMKDPVTFRSTRQVSNYPVVGAELMPVFS KSFYNEQAVYSQQLRQSTSLTHVENRFPENQILIRPPAPTITTVSENVPALTDHGTLPLRSSIRGVQRVTVTDARRR TCPYVYKALGIVAPRVLSSRTF

[0643] GenBank Accession No. AP_000585 MATPSMLPQWAYMHIAGQDASEYLSPGLVQFARATDTYENLGNKFRNPTVAPTHDVTTDRSQRLMLRFVPVDREDNT YSYKVRYTLAVGDNRVLDMASTFFDIRGVLDRGPSFKPYSGTAYNSLAPKGAPNASQWIAKGVPTAAAAGNGEEEHE TEEKTATYTFANAPVKAEAQITKEGLPIGLEISAENESKPIYADKLYQPEPQVGDETWTDLDGKTEEYGGRALKPTT NMKPCYGSYAKPTNLKGGQAKPKNSEPSSEKIEYDIDMEFFDNSSQRTNESPKIVMYAENVGLETPDTHVVYKPGTE DTSSEANLGQQSMPNRPNYIGFRDNFIGLMYYNSTGNMGVLAGQASQLNAVVDLQDRNTELSYQLLLDSLGDRTRYF SMWNQAVDSYDPDVRVIENHGVEDELPNYCFPLDGIGVPTTSYKSIVPNGEDNNNWKEPEVNGTSEIGQGNLFAMEI NLQANLWRSFLYSNVALYLPDSYKYTPSNVTLPENKNTYDYMNGRVVPPSLVDTYVNIGARWSLDAMDNVNPFNHHR NAGLRYRSMLLGNGRYVPFHIQVPQKFFAVKNLLLLPGSYTYEWNFRKDVNMVLQSSLGNDLRVDGASISFTSINLY ATFFPMAHNTASTLEAMLRNDTNDQSENDYLSAANMLYPIPANATNIPISIPSRNWAAFRGWSFTRLKTKETPSLGS GFDPYFVYSGSIPYLDGTFYLNHTFKKVSIMFDSSVSWPGNDRLLSPNEFEIKRTVDGEGYNVAQCNMTKDWFLVQM LANYNIGYQGFYIPEGYKDRMYSFFRNFQPMSRQVVDEVNYKDFKAVAIPYQHNNSGFVGYMAPTMRQGQPYPANYP YPLIGTTAVNSVTQKKFLCDRTMWRIPFSSNFMSMGALTDLGONMLYANSAHALDMTFEVDPMDEPTLLYLLFEVED VVRVHQPHRGIIEAVYLRTPFSAGNATT

### OTHER EMBODIMENTS

[0644] It will be appreciated that the scope of the present disclosure is to be defined by that which may be understood from the disclosure and claims rather than by the specific embodiments that have been presented by way of example. Elements described with respect to one aspect or embodiment of the present disclosure are also contemplated with respect to other aspects or embodiments of the present disclosure. For example, elements of claims that depend directly or indirectly from a certain independent claim presented herein serve as support for those elements being presented in additional dependent claims of one or more other independent claims. Throughout the description, where compositions or methods are described as having, including, or comprising specific elements, compositions that consist essentially of, consist of, or do not comprise the recited elements. All references cited herein are hereby incorporated by reference.

The application's sequence listing, which the Patent Office published only in electronic form, follows.

SEQUENCE LISTING (493 sequences)

SEQ ID NO: 1 - protein, 207 aa, unidentified
  REGION 1..207: note = Wild Type MGMT
MDKDCEMKRTTLDSPLGKLELSGCEQGLHEIKLLGKGTSAADAVEVPAPAAVLGGPEPLMQCTAWLNAYFHQPEAIEEFPVPALHHPVFQQESFTRQVLWKLLKVVKFGEVISYQQLAALAGNPKAARAVGGAMRGNPVPILIPCHRVVCSSGAVGNYSGGLAVKEWLLAHEGHRLGKPGLGGSSGLAGAWLKGAGATSGSPPAGRN

SEQ ID NO: 2 - protein, 69 aa, unidentified
  REGION 1..69: note = MGMT Fragment Enriched for Inhibitor Interaction
VPILIPCHRVVCSSGAVGNYSGGLAVKEWLLAHEGHRLGKPGLGGSSGLAGAWLKGAGATSGSPPAGRN

SEQ ID NO: 3 - DNA, 624 bp, unidentified
  misc_feature 1..624: note = wild type MGMT coding sequence
  source 1..624: mol_type = unassigned DNA
atggacaaggattgtgaaatgaaacgcaccacactggacagccctttggggaagctggagctgtctggttgtgagcagggtctgcacgaaataaagctcctgggcaaggggacgtctgcagctgatgccgtggaggtcccagcccccgctgcggttctcggaggtccggagcccctgatgcagtgcacagcctggctgaatgcctatttccaccagcccgaggctatcgaagagttccccgtgccggctcttcaccatcccgttttccagcaagagtcgttcaccagacaggtgttatggaagctgctgaaggttgtgaaattcggagaagtgatttcttaccagcaattagcagccctggcaggcaaccccaaagccgcgcgagcagtgggaggagcaatgagaggcaatcctgtccccatcctcatcccgtgccacagagtggtctgcagcagcggagccgtgggcaactactccggaggactggccgtgaaggaatggcttctggcccatgaaggccaccggttggggaagccaggcttgggagggagctcaggtctggcaggggcctggctcaagggagcgggagctacctcgggctccccgcctgctggccgaaactga

SEQ ID NO: 4 - DNA, 210 bp, unidentified
  misc_feature 1..210: note = Portion of SEQ ID NO: 3 that Encodes SEQ ID NO: 2
  source 1..210: mol_type = unassigned DNA
gtccccatcctcatcccgtgccacagagtggtctgcagcagcggagccgtgggcaactactccggaggactggccgtgaaggaatggcttctggcccatgaaggccaccggttggggaagccaggcttgggagggagctcaggtctggcaggggcctggctcaagggagcgggagctacctcgggctccccgcctgctggccgaaactga

SEQ ID NO: 5 - DNA, 1140 bp, Homo sapiens
  misc_feature 1..1140: note = Positions 304081-305220 of NG_052673
  source 1..1140: mol_type = genomic DNA
agtaaagcttcatttgcaaaagcaggtggtgggctgcgtgcgcccacagccacagttggccggccatgggctggagaggcccgtgcaggtacggtcttctctgatgcgtcctgtgatgcctgcgtggtacctggggagtgtttgagagcgtcacataccaccagaactcggaaacgtagttttcagttttgtaagcgaacgttgtatattactcaccggatgaaattaagttttctcctcccaaatcgtgggcctaaagcaattctctgaggatgccccacgtcacctcaggacactcgtccctcccccaacccgtgctgagacccccagggactcaagggcctcaggggaggggaagtccatgctgagacatagctgacacccacccatgccaacagcctgcccctggcacaggcccctgcttggtgggcacaggactcctgtcagtcagggccttggccttgaccccaaagacctcgttgtccagatccctgactgacagtggctgcccccctgtcttccaggtccccatcctcatcccgtgccacagagtggtctgcagcagcggagccgtgggcaactactccggaggactggccgtgaaggaatggcttctggcccatgaaggccaccggttggggaagccaggcttgggagggagctcaggtctggcaggggcctggctcaagggagcgggagctacctcgggctccccgcctgctggccgaaactgagtatgtgcagtaggatggatgtttgagcgacacacacgtgtaacactgcatcggatgcggggcgtggaggcaccgctgtattaaaggaagtggcagtgtcctgggaacaagcgtgtctgccctttctgtttccatattttacagcaggatgagttcagacgcccgcggtcctgcacacatttgtttccttctctaacgctgcccttgctctatttttcatgtccattaaaacaggccaagtgagtgtggaaggcctggctcatgttgggccacagcccaggatggggcagtctggcaccctcaggccacagacggctgccatagccgctgtccagggccagctaaggcccatcccaggccgtccacactagaaagctggccctgccccatccccaccatgcctccc

SEQ ID NO: 6 - RNA, 624 nt, unidentified
  misc_feature 1..624: note = Wild Type MGMT mRNA
  source 1..624: mol_type = unassigned RNA
atggacaaggattgtgaaatgaaacgcaccacactggacagccctttggggaagctggagctgtctggttgtgagcagggtctgcacgaaataaagctcctgggcaaggggacgtctgcagctgatgccgtggaggtcccagcccccgctgcggttctcggaggtccggagcccctgatgcagtgcacagcctggctgaatgcctatttccaccagcccgaggctatcgaagagttccccgtgccggctcttcaccatcccgttttccagcaagagtcgttcaccagacaggtgttatggaagctgctgaaggttgtgaaattcggagaagtgatttcttaccagcaattagcagccctggcaggcaaccccaaagccgcgcgagcagtgggaggagcaatgagaggcaatcctgtccccatcctcatcccgtgccacagagtggtctgcagcagcggagccgtgggcaactactccggaggactggccgtgaaggaatggcttctggcccatgaaggccaccggttggggaagccaggcttgggagggagctcaggtctggcaggggcctggctcaagggagcgggagctacctcgggctccccgcctgctggccgaaactga

SEQ ID NO: 7 - RNA, 210 nt, unidentified
  misc_feature 1..210: note = Portion of SEQ ID NO: 6 that Encodes SEQ ID NO: 2
  source 1..210: mol_type = unassigned RNA
gtccccatcctcatcccgtgccacagagtggtctgcagcagcggagccgtgggcaactactccggaggactggccgtgaaggaatggcttctggcccatgaaggccaccggttggggaagccaggcttgggagggagctcaggtctggcaggggcctggctcaagggagcgggagctacctcgggctccccgcctgctggccgaaactga

SEQ ID NO: 8 - protein, 207 aa, synthetic construct
  REGION 1..207: note = Synthetic: MGMTP140K
MDKDCEMKRTTLDSPLGKLELSGCEQGLHEIKLLGKGTSAADAVEVPAPAAVLGGPEPLMQCTAWLNAYFHQPEAIEEFPVPALHHPVFQQESFTRQVLWKLLKVVKFGEVISYQQLAALAGNPKAARAVGGAMRGNPVKILIPCHRVVCSSGAVGNYSGGLAVKEWLLAHEGHRLGKPGLGGSSGLAGAWLKGAGATSGSPPAGRN

SEQ ID NO: 9 - protein, 32 aa, synthetic construct
  REGION 1..32: note = Synthetic: linker
SGGSSGGSSGSETPGTSESATPESSGGSSGGS

SEQ ID NO: 10 - DNA, 136 bp, Human adenovirus
  misc_feature 1..136: note = Ad3 5' (left) ITR; 1 - 136
  source 1..136: mol_type = genomic DNA
ctatctatataatataccttatagatggaatggtgccaacatgtaaatgaggtaatttaaaaaagtgcgcgctgtgtggtgattggctgcggggttaacggctaaaaggggcggcgcgaccgtgggaaaatgacgt

SEQ ID NO: 11 - DNA, 136 bp, Human adenovirus
  misc_feature 1..136: note = Ad3 3' (right) ITR; 35208 - 35343
  source 1..136: mol_type = genomic DNA
acgtcattttcccacggtcgcgccgccccttttagccgttaaccccgcagccaatcaccacacagcgcgcacttttttaaattacctcatttacatgttggcaccattccatctataaggtatattatatagatag

SEQ ID NO: 12 - DNA, 343 bp, Human adenovirus
  misc_feature 1..343: note = Ad3 Packaging Sequence; 137 - 479
  source 1..343: mol_type = genomic DNA
gacttatgtgggaggagttatgttgcaagttattacggtaaatgtgacgtaaaacgaggtgtggtttgaacacggaagtagacagttttcccacgcttactgacaggatatgaggtagttttgggcggatgcaagtgaaaattctccattttcgcgcgaaaactaaatgaggaagtgaatttctgagtcatttcgcggttatgccagggtggagtatttgccgagggccgagtagactttgaccgtttacgtggaggtttcgattaccgtgtttttcacctaaatttccgcgtacggtgtcaaagttctgtgtttttacgtaggtgtcagctgatcgctaggg

SEQ ID NO: 13 - DNA, 3439 bp, Human adenovirus
  misc_feature 1..3439: note = Ad3 E1; 480 - 3918
  source 1..3439: mol_type = genomic DNA
tatttaaacctgacgagttccgtcaagaggccactcttgagtgccagcgagaagagttttctcctccgcgccgcaagtcagttctgcgctttgaaaatgagacacctgcgcttcctgccacaggaggttatctccagtgagaccgggatcgaaatactggagtttgtggtaaataccctaatgggagacgacccggaaccgccagtgcagcctttcgatccacctacgctgcacgatctgtatgatttagagatagacgggccggaggatcccaatgaggaagctgtgaatgggttttttactgattctatgctgctagctgctgatgaaggattggacataaaccctcctcctgagacacttgttaccccaggggtggttgtggaaagcggcataggtgggaaaaaattgcctgatctgggagcagctgaaatggacttgcgttgttatgaagagggttttcctcccagtgatgatgaagatggggaaactgagcagtccatccataccgcagtaaatgagggagtaaaagctgccagcgatgtttttaagttggactgtccggagctgcctggacatggctgtaagtcttgtgaatttcacaggaataacactggaatgaaagaactattgtgctcgctttgctatatgagaatgcactgccactttatttacagtaagtgtatttaagtgaaatttaaaggaatagtgtagctatttaataactgttgaatggtagatttatgtttttttcttgcgattttttgtaggtcctgtgtctgatgatgagtcaccttctcctgattcaactacctcacctcctgaaattcaggcgcccgcacctgcaaacgtatgcaagcccattcctgtgaagcctaagcctgggaaacgccctgctgtggataagcttgaggacttgttggagggtggggatggacctttggaccttagtacccggaaactgccaaggcaatgagtgccctgcagctgtgtttatttaatgtgacgtcatgtaataaaattatgtcagctgctgagtgttttattacttcttgggtggggacttggatatataagtaggagcagatctgtgtggttagctcacagcaacctgctgccatccatggaggtttgggctatcttggaagacctcagacagactaagctactgctagaaaacgcctcggacggagtctctggcctttggagattctggttcggtggtgatctagctaggctagtgtttaggataaaacaggactacagggaagaatttgaaaagttattggacgatagtccgggactttttgaagctcttaacttgggtcatcaggctcattttaaggagaaggttttatcagttttagatttttctactcctggtagaactgctgctgctgtagcttttcttacttttatattggataaatggatccgccaaactcacttcagcaagggatacgttttggatttcatagcagcagctttgtggagaacatggaaggctcgcaggatgaggacaatcttagattactggccagtgcagcctctgggagtagcagggatactgagacacccaccgaccatgccagcggttctgcaggaggagcagcaggaggacaatccgagagccggcctggaccctccggtggaggagtagctgacctgtttcctgaactgcgacgggtgcttactaggtctacgaccagtggacagaacaggggaattaagagggagaggaatcctagtgggaataattcaagaaccgagttggctttaagtttaatgagccgcaggcgtcctgaaactgtttggtggcatgaggttcagagcgaaggcagggatgaagtttcaatattgcaggagaaatattcactagaacaacttaagacctgttggttggaacctgaggatgattgggaggtggccattaggaattatgctaagatatctctgaggcctgataaacaatatagaattactaagaagattaatattagaaatgcatgctacatatcagggaatggggcagaggttataatagatacacaagataaagcagtttttagatgttgtatgatgggtatgtggccaggggttgtcggcatggaagcagtaacacttatgaatattaggtttaaaggggatgggtataatggcattgtatttatggctaacactaagctgattctacatggttgtagcttttttgggtttaataatacgtgtgtagaagcttgggggcaagttagtgtgaggggttgtagtttttatgcatgctggattgcaacatcaggtagggtcaagagtcagttgtctgtgaagaaatgcatgtttgagagatgtaatcttggcatactgaatgaaggtgaagcaagggtccgccactgcgcagctacagaaactggctgcttcattctaataaagggaaatgccagtgtgaagcataatatgatctgtggacattcggatgagaggccttatcagatgctgacctgcgctggtggacattgcaatattcttgctaccgtgcatatcgtttcacatgcacgcaaaaaatggcctgtatttgaacataatgtgattaccaagtgcaccatgcacataggtggtcgcaggggaatgtttatgccttaccagtgtaacatgaatcatgtgaaggtaatgttggaaccagatgccttttccagagtgagcttaacaggaatctttgatatgaatattcaactatggaagatcctgagatatgatgacactaaaccaagggtgcgcgcatgcgaatgcggaggcaagcatgctagattccagccggtgtgcgtggatgtgactgaagacttgagacccgatcatttggtgcttgcctgcactggagcggagttcggttctagtggtgaagaaactgactaaagtgagtagtggggcaagatgtggatggggactttcaggttggtaaggtgggcagattgggtaaattttgttaatttctgtcttgcagctgccatgagtggaagcgcttcttttgaggggggagtatttagcccttatctgacgggcaggctcccaccatgggcaggagttcgtcagaatgtcatgggatccactgtggatgggagacccgtccagcccgccaattcctcaacgctgacctatgccactttgagttcgtcaccattggatgcagctgcagccgccgccgctactgctgccgccaacaccatccttggaatgggctattatggaagcatcgttgccaattccagttcctctaataacccttcaaccctggctgaggacaagctacttgttctcttggcgcagctcgaggccttaacccaacgcttaggcgaactgtctaagcaggtggcccagttgcgtgagcaaactgagtctgctgttgccacagcaaagtctaaataaagatctcaaatcaataaataaa

SEQ ID NO: 14 - DNA, 22697 bp, Human adenovirus
  misc_feature 1..22697: note = Ad3 E2; 26643 - 3947
  source 1..22697: mol_type = genomic DNA
tttaagagtcagcgcgcagtacttgttgaagagagcctcggcgtcctcgagagtgcgctgaagttggtcttcgctcttgtgatacaaacaacttctggtgagcgagcgcagagatcggttttttactttcagttcctgctcttgcccccgactctgctggaaaatggcatagagggttggaaagatccggttcctcagctctctggtctgcgctggctcgttcgctgtgatcctcagtcctcctcctggtgcacttgttgtggattttctaactgctggttttctggtcaccgttgtcgctgctgtatttttctgtcggggttgccgggacttgctgactgcagtaggggctgtggaggtgacggtagtaatgcaagatattgcgggggaagtttacaccgtggtggaagagcaggtatcgccgggtgaaggatatgttgcccccgcattcatgcaagcaggagatgatagcgtttttatgtccacgccaggacttgtatccctgtcgctccttcttaccggtcttggaagcggtggtcgggtttgggaatcgcccggtctcgtcccatctactgttgggccgccgctgggccccccgacccggagcggagatggtagccgtgctgctgtctggggacttgcttgtctccgccgccgatgacaactgtttggcggcggttgcttcttccacctcctctgcctcctcgtcttcctcctccaaactgtcttcctccaggctgtccacctcctctgcctggctgtcccaatcttccatctcctcctctgcctgactgtcccagtcttccttcatatcctctgggggcgacagctgcaccttcaacttcttgcttcctcggcgatgggacatcctgggggaaccttgtgttgagctcctcaccggtctgagggtcaaggtagaccccgtttcccttttttagcagaaattcttggcgagatttttggatggcttgcaattgggccagaattgctccctgggtgatgacgcaggctgagagctcgactttgggaggatgtgattggtcctcatagaacctgatctcatagggatggtagtcctcggggtgaaacttgcgcaggtaggcggaggtccacagccccggtgtcagtttcaaactctgccccggagaagacccctcgcctttacttctgggaccctgcagctcgaaggtgccgataatctgggtctcgctcagcaactgggggttgcaggcaagggagcggtggggtgtgcaaagattgcagcggcagtggcattccagcaggccgtctccgctcacatcctctataacatccgagtggtaggagaggtagttggccaggcggaacaggtagcagtggctccatagcggcggtgggcactcgcggtaggtgagaggcacaaagtcggagggcagcgcacagcaggtggcaggcaggataccggagcgttccaggatgaaagagcgaaagttgttaagcatgctctggctcataaagtctggcaggccgtttcgcagagtaaccctgagacgctcggggaagatgatgtctgccaggtccgaggcgacggtgcgctcatcaaaacctgtccacagggctttgagggatctctgcaagagcttgtccagctcttttaggttctgctcttccaaacactgttgccacacacccataccagtttgccaggtatggcagaggtagaggtagacacagtctcggatgtagtcacggcgggcctcccctttaagggtggtgtgcaggacgctctgccctagtcggttctcatgcaaaatgcccatgtaagaaaccaggttggtaagctccacgttggagatcttgcatgcctgccgcacgaagccatgtctaaaggtgtagtgcaggttctcctctagcttgcgcagggtctcagggtcggtgaaaaagcggcgcagacactccagctccacagttactagcactacagccatcataagcttgcgcctctcttccaaatctcggggggagttggtacccagccagcgagatagctgctcgtcactgactaccggcttgccctcgtccgaggcgtctggatcctgcatgttctggttttctgaaagaggtcttgctcgtttgatgagcagatggtccatgacagcgctcataactttggggggcaggttaacagcggggtaggcaaaatgggtgaccacgatactgcgcttgagcactgcaatccgggcattgtcaccctccagttccaccagagcgctgtggtgttcatccatgtcattctctccctgttgcagagcatttgcggcccgtgtctcatcacttcccagaccctcaaagatctttggaacctcttccaaggaagctatatcaggtaagcgagctcccggacccaagttgagcagggcatcggcgcgggtgcggttggcgcggcaggagactggaatcttttggttcttgaaaaagatgtggtaggtggccaacacttcggggatagtaaaagctggatagaagttgagtcgagggttggcctcgcaggtgccgtttggctgccgcttggggggtacctgaggcgaaaagaggttcagctcgtaggcgcggctaagctcttccacactgatgggcacttcagtgagatcgagcaatgcgtctttaactatgatcgactgccttgctagatgtttgaggagcacgtcctccccaccaaggccggtgaggtagtcggcgacatgatccctgatcccagcctcctggtaaacgccatctgcttgatgctctgggcggtcgtcatcctctctgtctagaaagcgtttcagctcctcctggtgctccgccggcgtcacatagcccgggtcctgctcgacatctgcctcaatctcttccgttttcacattatcctgcgcctgcatctcctgggctgcgtcgacctcctcctcatcatcgagggtagaggtggtggtagcgggactgggtggtggggtggttaagctctcctcctcgtcgctgctgggggcgaggtgtgatggtgcttgcagcgatgttggcagtgatggctgagtttccatgtctgttgtttctctgcctaggagaacacaatggccagccgcggaggaaatcagtcaagcgaccgccaccgggagcacacccccgaacgcggaatgagctctgccagccatccgcctccaaggccagaccgcagcccatctcagtcgcctccacctctgcccccgaagaggaacacctaccgtcgtgtggggtccggttcttctaccgagagccaggtggtattggtaagcgaaacttcgcagtcatccctgtctccggagcggagcaacagtcctcccccgatccctcccaagaagaagcccaggaagaccaagcatgtccctctgcaagacatcagccaggatagtgaagaagaaagagaacaggctcagttggtggccgtgggcttcagctaccccccggtgcgcatcattgagaaggatggcaagagaagtgttgagaagatcgacaagaatgaccctatagctaaaggagctacttttattgctgttaggaatcctttgagtctgcccctggtatctgcctgggagaagggcatggaagtgatggctgtgctaatggaaaggtacaggctggataatgatctgagaacctctttcaagctgatgccagagcagcacgagcaatacaagcgtatctgccaccagtatgtgaacgaggagcaccgtggcatcccgctgacatttaccagcatgaagaccttgacaacaatgatgggaagattcatgcagggattggtacattattattctgagatcgcccacaataattgggagtgcaccgggtgcgctctgtgggctcatggatgcaccgattatgaaggcaaggtgaaatgcctgcatggcactatcatgatccagaaggaccacattatcgagatggatgtggcgagcgagaacgggcagcgcgctatgaaggagaatccagacagagccaagatcacccaaaaccgctggggcagaaatgtggttcagttggccaacaacgatgcccgctgttgtgtgaatgatgccaactgtactactaatcaattttccagcaagtcctgtgggatgttctacaccgagggaagtaaggcccaggaagcttttaagcagtacgaagccttcatgaaggctgtgtacccagggataactcccgaccaagccaggatgatgctgatccccattcattgtgattgcaaccacaagccaggctgcgctcccgtgatgggcaggcagacatgtaagatgaccccctttgggatggccaatgctgaagacttggatgtgactaccatcagtgacccaaccgtgttggcaagcgtaagacacccagcgttgatagtgttccagtgttgcaacccagtgtatcgcaactcccgtgtccagaatgccggccccaactgtgatttcaagatctctgctcctgacctgcttggcgctatgcaactgaccagaaagttgtggcaagacacctttcccgagattccagttcccaagctggtaatccccgagttcaagtggcagaacaggttacagttccgcaacgtatccctgcccgcgggtcactctgactcccgccagaacccattcgacttctgagtaaatgatgaaacaaatgagcaaaaccagagcctcagtgcatgtaaaaataaagtgctgtttattgaacacggttttacatgacttattgcatatccatacggtcaaacgcggtggccctttcaatgcgcgcgcggtgagaacgaaagtaagatgagtgggtgtttaggaagcggtatagcacctcctggttgcggcgcagggtgggctggacttggggtgattggagcatgctgttggacaccccagtcagcaacttcatggtggggtttccgtccatggggcggtcgggccagtgcacaaaggcatgaaggaacatacagcaaaaaagtccacaggcggctgagcgcggaccctgcacgctttgggtagacttctccagggtgatgcagcggtctttggtagcaagggcactgcgacgcaggagcccctcgtactcaaactggtaaatctgtttgagccgctcatccgagaacccaaaaggatcaaaaaggtagcaggtgttgtagcgcgggttccaaccaaaagccagccagtgctctccccccgtctcgcgtccggcagtgttgactatggcgcaggcgagcttgtcgggggccatgaaccccgggaaacgcttgtcaaaggttcccaggaaatagggtccgcagcccaggtctcggacgatggctttgagctcttgctcgctggagccgtttccggacccgcatgtcatggctgcagctgctgcttgcaagaagcaagaggcttcttatgtggtggcgttgccggccgagaacggtgtgcgcaggtagacggcctcgatgacgccgcggtgtggctggtgcactctgaccacgtcgaagacttcgaaaagaagataaagcagggtgggctcatccatgggatccacctcaaaagtcatgtccagcgcatgggctgagttggcatagagcatgttctgtcccaggtcggtaagggcccccatggacatgaagttgctggagaagggaatgcgccacatggtcctgtcgcacaggaactttttctgggtgacactcttaacggcagtagttccgatgagcgggtatggataattggctgggtaaggttccccttgtctcatagtaggtgcaaggtaccctacaaagccagagttgttgtgttggtatggtaaggtgacggctttgtagtcagtgtaattaacctcatcaaccacctgcctgctcataggctggaagtttctgaaaaaggagtacatgcgatccttgtatccctcagggatgtaaaagccctggtagccaatgttgtaattggcaagcatctgaaccaggaaccagtctttggtcatgttgcattgtgccacgttgtatccttccccgtccacagtgcgcttgatttcaaactcatttggactcaacagcctgtcattgccaggccagctgactgaggagtcaaacatgatggagaccttcttgaaagtgtggttaaggtaaaaggtgccatccaggtagggaatagatccagaatatacgaagtagggatcgaaccctgatccaagagatggagtctccttggttttgagtctggtgaaggaccagcccctgaaggctgcccagttgcgagatgggatggaaattggaatgttggttgcattggcaggaatggggtaaagcatgttagctgcagagaggtagtcgttaaatgactgatcattggtatcgttgcgcagcatggcttcaagggtggaagctgtgttgtgagccatggggaagaaggtggcatagagattgatgctggtgaaacttatggtagcaccatccgttctgaggtcatttccaagggaactttgcaggaccatgttcacatcctttcggaagttccactcgtaggtgtaggagccaggtagaagaagtaggttcttgacagcaaagaatttctgaggcacttgtatgtggaaaggcacataacgaccatttcccagaagcatggacctgtagcgcagaccagcattgcggtggtggttgaatggattcacattgtccattgggtcaagagaccacctggcgccaatgttgatgtatgaatcaaccagggatggggataccactcgcccgttcatgtactcataggtgttggtgttagtgggcaaagtaatgttaggtggcgtgtacttgtaaacatctggaaggtacaaagccacattagagtacagaaaacttctccaaaggttagcttggatattaatttccatagccaggttgttgcctatggttatttcattagctggagcaacattagcatctttttcccatccattagtgtcatcggttttaactttaatgccttgatatgtgtgccctggtcctatgccattcagaggaaaacagtaattaggcagttcatcctcgatgccatgattttcaataatgcgaacatcgggatcgtaactgtccacagcctgattccacatgctgaagtatctggttctgtctcccagagaatcaagcaaaagctgatatgacagttcagtatttctgtcctgcaagtcaaccactgcattcagttgtgatgcttggccagccaaaactcccatatttccagtactgttgtagtacattaggcctacgaagttatccctgaagccaatgtaattgggtctgttaggcatggcttgttgacccaaatttgcatgagagttattagacgtttctggtttatataccacatgactgtctggagtttccaaatttacattttccgtataaagcacaatttcaggcgctaaagctcctgcaacagcatctctaccatcgaaaaattccatatcaatatctggttcctcagtttcaacccctccttcggttgttggttttacttttctgtttttagcttggcccccttttatgtttgtaggtcttgcaaaagacccgtagcatggcttcatgttggtagctggtttaagggctcttccaccaaacttttcatttgttccatcagtatcagtccatgattcttctccaacttgaggctctggctgatatgttttatcggcataaatgggcttttcttctccttcagtagtggtaatgtctttcccaatttgcaaaccttctttagtaatattgtctcccttcatggaagcaatgccaaatgtgtttgtggtggtagttactgcattgtccccatttgttgtaactatccactgagatgtattgggcgcgcccttaggagcgagtgaattgtaagctgtgccggaatatggcttgaagctaggacctctatcaagcaccccccgaatgtcaaagaatgtgctggccatgtcaagcactctgttgtcgcctacagccagcgtgtagcgaactttgtaagagtaggtattgtcttcccggtcaacgggcacgaagcgcagcatcaggcgctggctacggtcggtggtcacatcgtgggtgggcgccactgtggggtttctaaatttgttccccatactgaagtaggtgtctgttgcacgggcgaactgcaccagacccggactgaggtactccgaagcatcctgtccggcgatgtgcatgtatgcccattggggcatcatcgatggggtggccatcttgaaagcaactcagcctcggcgcgcgacctcttcctttctcctctgctgcggcggcgtggtgatgatacatacacacagacaagcaagttaagcgctactccatatttaattaatagcagcgacggcgctttacactctgcacgcccagacccacgatgctgttcagagtactttgccagtttgctttcgggcgcggtgtgcccccaggacgcggtctggctacggcgacgggctgtacggcggtgggctttctggtagcgacaggtttgggaacaggcgccgcagaagcagggggaggaggcaagtccaaggtggcgggtcgatgtgactgagaaggtttcatcaccccggtagccatgtgagctacaggcctggtagtgggcattccgagctttactgcctcctcatatgaagggggctcgtctgcgcgcgtcaccagcgtctgctctagctcgggtcgcggacgcttgtcgccccgcttttccagcggaggaagttcttcctccacttccatttcaccaggggttgcgggcggcgggtccaggcggctgtttatctgtttttgtacagcctggttggccagatccactacgccgttaataccagaggcgatcccatcgaccaccttctgttggaagttttgttccttaagcttatttctcagagcctgccctgtgctgctgttccaagctttgttcccataggtttttacggtcgagccaaaatttttaagcccgctccagatactgctccaattgaaggcgcccccgttcagttggctcgtgccgatgtcgctccaggtgcccatgtacggcctcgtgccgtgtcgcggagccagggatgaaaaattgatgtcttccatctctacaaaaacatagtcacaggaccaggagcgtcagagtccattctattttttatttataagttttttccaatgttagtggcgctgcgaggcctgaaccgccactgaagctatgcctggtatcgccccgatcgctgcggcgatgatgggtataagagctggcaaaaagccaccccctaatcgtctgctgatagcgcgccttcgtctgtggcggcgcatccctcgccccaacatccttctacggcgcgagtttcttcctcggtagccagtaatggggacgcgaaggcggcaagtgagggccatatctgcaaggaggcagcgtcaacagtcattaagtggtgatgcttggatggtagcgcgcgcgcggcagcgtcagaggttcagcgcgaccatcgcggtacactctccgcaccagggcggcgggagtcaatttgctggcagtgttgcggcggcggcgacggcgagtgcgacttgcaggtggtttgcggcggcgagaggtgttgctccggtttcgatagtagcgagtgcctctgtaacccggagtgggaatgatggatgggtgcagagcatagttgggcattagcagacttgctgggccgtactttcgtcgtgatcttcgagtggtgctgggggcggcaacgggcgcgggcatccagggttccgtttgcacctcaattgaggtggtgggttttgcaggttcggtctgcacttccatggactcggtgggaatcttgatgtcgaaggtttgtactcccaaacctggcgccacttccttgataggtcttactttgacctcaggctggatatcggcatccactttcattttctccagtacgtcttctagcctctggcgcttgggcaccattagctgcatggtgggatataggtcctcaccctcgcgctttacgcctctccgcgcaggcacgggcagcacttgctgcagggtgactggtttgaggctgggggtgggatttccatgatccaaaggaatggacacagcctcctctttgggactggatctagtgcgcttgccataagcaaactcgtcaaggcggtctgccgcctgctcaagaatatcgtcatccccgtacacctcatcataggaccgtttaaaagtagtgctggaacgctcgccaggtgtaaaaaccacagtggtcccgggtctgagcacttgacgcactttgcgcccgcgccactgcacgcgccgtcttggggcgaactcgcgcacaaactccaccagcccatcatcgtcatcttcttcctttttgttatttttgacccgcttgattttgcggggctttttttcatccttcaccggcggaccgtagatttcaggcgcgatgacctggagcatctcttccttgtatttgcgcttggacatacttgccgctgggacacaacatcggagactgctcagtatcttctaagtgcgaggggggcgggtgcgcacgggcacgcgctggccggtagtggcatcacgcacccagtacacattgcctcttcgcggttgggccatgttggcaatggccgctgctgccgccgtggccgcgcgcctgcgggacctgccgctgctggcacctgaagccgcgcgtctggccgctctaagcatggctcttcgccccacacgtttggccctccgcagaatagcttttgcggctcgcatggcgggagtagccctgtggcgcctggcgatgcgcctccttcggctcttccggcgagcataggcgcgggcgtctgccaccacactgtcaataactgcatccacagtagatgtaggcgcagtaggagtataattacgagcatcggcgaccacctggtcgatcacatcatcgaccgtggtccgagtgcgggtacgacccttgagtgcgccccagggagcgcggaaatgaccgcgaacgcgcacaggatgctgggtagagcgcttgcgggcgcctccatacatcttggtgggcgcatacagtccccaaccggtattattactgggcgagatgagaatggacattttttttttttttagaaagtgcggcttgaaagaacgcgcggcgcgactatgcccagggccttgtaaacgtagggacaggtgcggcgtctggcgtcagtaacggtcacgcgctggactccccggatactgctgcgtaacggcagggtcccgtgatctgtgagagcaggaacgttttcactgacggtggtaattgtgggcgccggcgggcggatgaggatctggttctcagggaagcggttgaagacgtgcgtgagcgaagtggcctgtcggagctgctgagagtacacggcttgctcattgtagaaactctttgagaagacgggcataagctctgcacccaccactgggtagttgttgacttgtcttgtggagcggaaggtgactgggtcttgcatcatgtcagggagcgaccagtagacctgctctgccccacaggtgacatctgaagtggtgagcagtgtccaagaccttattcctttctcagggttaccgtaattgtaggacaggtaccaactgcggtaggctgtgttgattttgtcttccaagacattgtagcttctactcttgctgtctttttctagaggttggatctttaactcttttttaacttcagcagctgcagcttcacgtttttgtttttcagttatataggtatctcctctagttatatcatcatcttcactagtttcctctgcaacagccagtgtggttgtttcagtagtggtatcctttttgctttcctcataggcagtgacatccaaaagggcaggaatattacccccttcaagatcttcatacatgattttgaaaccctcctggaatggatgtctcttcctgatgccaagcaagttgctaagtcggctttcagtaaagtctaccccgcaaccaggcagcaatacaatgtcaggatggaatgcctcataagtgtagacacctggcataatcaacttagtttcggggtcccacccgagcctgaaatttctagtgtcaaacttaacaccaatgtcactttccagcactccattctgtctgccaatttccaggtagttgtcaatgatggcattgttcatcaggtcgatcgtcatggtggctgaaaagttgccttctggtaaaatgaactcaaaccactcatacttcaagatatcctctttatgatcataggtgtcatttactgtaacaccttcaggagcttttctggacaccatcaccctcgccttgaacttgttgctgaacatgtactcgttcacgttgggcatgttggtgtgcatgatggtcttcagctgaccgccccatcgcgaccgctcgtcaaagttgatggtctgggtgctagcctccgtgggggtaaagtcattgttctgcaccaccgtggtcaggaagttgctgtggtcgttctgatagttcagggaggcgatgtccgccgacttgttgtccaccagatacaacttggtggtatcgtacaggggcgacagctccgagtaacgaatgctgtttctcccttccgtaggcgccaggtaccgtgggggtacgaagggagcctccagtgggggctgtatcatcgccgcctgttgctgcatcacgctctcgtaagaaggaggaggaccctccggatacaccaccgctccgcctagcacggctcgtctcctcatcgtactagacacagataacaaaaaagaacgaacgcacgctcggtcgccatggccttggtgagttgcctttttattttactttcacttttacaacatgcgcccgaatctgggacgcagatgagcgaacgggttgccccctcctcttccacccaagtccaacacgctgctatcatcggcagagtcctcatcgtcccacacaagacccatctgcctgtcgtggcgctggcgtctacggatcggtctgcttgtagcccccaagatcctgggctcgtctctgtgatcctgcgcataggtcttccatctactcatcttatccaccagactctctattccattgttggggaagttcttttccctctctggcctcagcaaagagtcattcaagtactcatcctcgcccatcaagcgcgggcgggttattctccccagttcactgctgcgaacgctgtttagtgaaaagggcaagctagggaaaggacttgcagcttcgggcacggtcgcggcagcaccagccgttccggatagcgacacggaagagtgtcttctatcgcccccttccttcttccaaactgtataaccgggaggcggggaaaatatgctgctgtccacatcgtcccacaggaacccgtcattggggtcgggcatgtcgtactcgccagtgtagaaaccaggtgggggcagccagtgtgggttcaggatagcattggtgaaataatcagagttcatggcggccgccctgtgcaggtagtccagcagtttgttaatgaaaggcctgttactagcatacatgctgggctccatgtttcgagctgtcatgtccagcgcggcggtaggtgtcgccccctcctgcatcaggaacagtccaacgctctgttgcacgtatctgaggatccgctcctcctcagcggtaagcgcatactgaggagggatcttctgtgaccggttggttagcaagaagttcagggtggcttccaaactgcccgtgtcttcctgacccagggcgcggctcacttgggtgatttcttgataggtctgctcgtccacctggctctgtcctatggcctcgcgatacaggttaagcaggtagcccaagtacgagttgcggtcaatgctaccgctgtcagtaaagggggataccagcagcagcagcaggcgggagttgggagtcagcaagctagacacggtcgcgcgatcccctactggggcgtgcactccccacagacccttcaggttcttgaaagcctgagtcaggttcactgtctgcaagccctgtctgctggtctggaagaagtaatctggcccggactggtacacctcgctctggggcacctcagctaccatgagtctcaatgcactcaaaaagtttgtatagtcttgctgaccacggggcacgttggcgggctgggtgctgaggaaagcgtttagcgctaccaacgaccccaagttggcgtcgcgctggaatcgctcgcgctgagacacggcctcgcgcacatcggtcaccatccggtccaggttggtttgcacgttgctgctgttgtaacgggccacgcgctccaagagagcattgtataccagcccggcctcatcgggacggatggccttgttctccaccagcgcgttcacgatagccaggaccttctcgtgggtggggttggagcgggagggcactacggcctccagtatggcagaaaggcggttggcctggggttgctgtctaaaggcttcggggttgcgggtcgtcagcgccattatgcgttgcatggcctgggtccaatcgtccgaggagttaatgccggacggctggctctgcagcgccgcccgcattgcggggtccggtgcctgctgctgttccatctagcaaaaatacgggtcgcgccatcagtcttccaagtactcgccctcctcgtcctcgacttcatccacctcttctatgtaaggaagctcacaccctgcagcctccatggccctgcgactgggttgccattgcaaatccgctcccatgtcaaagtagttctccccatcagtcccggcccccgttagagctctttgcaagctgtgcataagttctctgtcgctcagctcgcgcctcctgctggcgctcaccgcgcggtgcatcctgtcattgcgatacacccccagatcgtcgctcagagtcagcaccttcagagtcatgcgcatgtaaaacccatctatcttcacctccttgtctatgggtacgtagggggtcttgtagatcttgcgagcgtagtatttgcccaggctcaagaccgagtagttgatagctgccactttctcagccaaacccaggctacgttcctgcactataatactttgcaggatgttgatcagatcatacagccatctcccatcaggctcggtgatgttcaacaacgcctccctgaatgcctcgttgtccctgctatgttgaaccaccagaaacagctgagctgtcagtggtttgctagtggggttttgggcgatagcctccatcaggtcccacagatgcatcagacccagggtcacttcctcgcgggcgatcagggtgcgcacatggttgttaaaagatttttggaagttgcgctcctccttcacggtctgctcgtaggccgagactaggttggccgcggccacatgtgccctagctgggctgatccctgtgacttcatcgacctcaaaatcctcgtcttgcagcacccgtcttcgatccagaccgtggcgcagctcgcgacccgcgttaaatcgagatgctcgcatctcctctggctcctcgccgctcctgtccctgaacaggttctgctggggcacgtacgcctcgcgagagtccttttttagttgcacccgcgggtgccgctcgggcgatggagcccccaggcgcgccaatccctcgccctcttccaagtccagatcataggcgggctgtcccgcgccgctcacggctgcagctgcagtagttgcaggagcaagaagagccttttgtggctgttgctgagaaggggcctgttgctgggggcgcatctgtcgcagcactggatgcatctgggcgacaaaaacaaaaaaaaaaaaaaaagggctcgctcccgtaaactggagaagtcggctggcggggtcttggaaataacggggctgccaaaccctcgcttgtcgcggaaaccggccgatacgagccgcgcttaggctccaaccggggcataccgcaacgcaaccctggcgactgattctccagactacgggcgcgagccactcacggcccgagaactgagcgttctaaagcttgacgtggcaatggcacacgtccaggaaaaagcagcaaaaacgactctactccgtaccctggatattcgtcggctgggtcgagacgggatagccaataccacgttagccgcggctccggccgatccgagcgtgatcgcttagctttggactcgaaccggggtacaccgcgacccaacccgttcacgttcccccagaccacggagtcgagccgctcatcgctttcgttttctccgtgtctacagagcgtcaatgactgcgcgcgcctcactggccagaccgtgcctaccatgaactacttcatgccgctgcgcaacatctggaaccgcgtgcgcgagttcccacgtgcatccaccaccgcctccggtatcacctggatgtccaggtacatctacggctaccaccgcctcatgctggaagacctcgcccccggagccccggctacagagcgatggcccctgtaccgccagccaccgccacactttctcattggctaccagtacctggtgcgcacctgcaacgattacatctttgacacccgcgcatactcgcgcctcaagtacaccgagctcgtgcgccctgggcaccagacagtcaactggtcagtcatggccaactgctcctacacaatcaacaccggggcctaccaccgcttcgtggactttgacgacttccaagccaccctcacccaggtgcagcaagccatcctcgccgaaagggttgtagcggacctggcacttgtccagcccatgcgcgggttcgggatcactcgcatgcatggcagagcgggcgaagaagaagtgcccgtggaacgactcatgcaagactactataaagatctggccagatgtcaggataatgcttggggaatggctcatcgcctgcgtatccaacaagccggacccaaagacctggtgctcctcgccaccatccgccgtctcaaaactgcctattttaatttcatcaccagcagcatcgtctcaccctcccaagaggaggaaggagaagaaagagagaaccccgaccgagcgtctagccgcccccgcccgcaagaaacagtgctcagcctaccttgcgattgcgactggttagacgctttcgtcgaaaggttttcagatcccgtggatcttgagacgatcaggtccttgcgcggagtacctacggggcaattgataaaatgcataatcagcgcggtgtccctgcccaacggagagcctcccagtcaccacttcagggagatgcgcggaggcgtcttcactctgagacccagggagaacggtcgtgccgtcaccgagaccatgcgccgccgccgcggagaggtcattgaaagattcatcgaccgtctgcccgtgcgccgccggcgtcgccgcgttccccctcctcctgcagccccacctgaagaggaagagatgttagtggaagaagaagagattgaggaagaaatcccaggggctttcgagcgcgaggtgcgcaccaccatcgccgaacttatccgtcttctggaagaggagttgaccgtgtccgcgcgtaactcccagttttttaactttgccgtggacttctacgaggccatggagcgcttggaagcgctgggcgatgtcagcgagatgccgctgagacgatggatcatgtatttcttcgtcaccgagcacatcgccaccacactcaactaccttttccagcgcctatgcaactatgcggtcttcacccgccacgtggagctcaacctcgcccaggtggtcatgcgcgcgagagatcccgtgggggctgtggtctacagccgcgtctggaacgaggcgggcatgaatgcattctctcaactcattgggcgcatctccaacgacctcgcggccaccgtcgagagagcgggccgcggagatcttcaagaggaagagatcgagcagttcatggccgagatcgcctaccaggacaactctggcgacgtgcaagaaatccttaggcaagccgccgtcaacgataccgagattgattctgttgaactctctttcaggttcaagctcacggggccggtagctttcacccagaggcgtcagatccaggatgtcaaccgccgcgtcgtcgcgcatgcgagtcttctcagggcgcagtaccagaacctacccgcgcgcggcgccgacgtaccactgccagccatgccgccgggtcccgagccgcccctgccgcccggtgcgcgccctcgacaccgcttctaaacatgcaagaagcaacagagccaccgccgtccaaaatgaaaaacaagggcacggtggtagcgcccaagggacacggaaccctgcaagccatcgacatctccaccaacggacccgttgagatcaagtactatctgaacctccctcacgccctccaaaagatcatgcaagttaatctcctgacactgcctactaacctgactccgcagcgtctcaggaccctggacagctccggcctgcgcgctctcgtcctcgagctccgcccctgccgcgccgaggtctggacttgcctcccgcgagggctcgtcagcatgaccaccatcgagacagaagatggtcatgccgatgcagacaacatagtaaagcgcgaggtacaagcgccaggcctcaattttccactgaaatttctcgtcaaaggaagtcaggtacaactcattcataaggtgcatcccgtgaatcgctgcgagtactgcggccgtctgtacaagcacaagcatgaatgctcggcgcgtcgcagggagttctacttccatcacatcaacagccattcctccaactggtggcaggagatccagttcttcccgattggctctcatcctcgcacagaaaggctctttctcacctacgatgtggaaacctacacctggatggggtcctttggcaagcagctaatccccttcatgctggtcatgaaactctctggagaccagcggctcgtcaacatcgcctatgacctcgccataaaactcaagtgggatcgctggcggcaggacccccaaaccttctattgcgtcaccccagaaaagatggcagtcggacagcattttcgtcagtaccgggaccagttacaaacagcactggcagtggacctctggtcctccttccttaaagcgaaccctcacgtgcacgaatgggccctcgaacactatgctctcactgaccctacagatctcacttttgaagaactcaagaagctgcctcatgtcaggggcacccctcgattcttagaactgtacatagtggggcacaacatcaatggctttgatgagatcgtcttggccgctcaggttatcaataaccgagcagaggttcctcagcctttcaaaatcacccgaaatttcatgcccagggccggcaagatcctcttcaatgatgttactttcgctttgcccaaccccgcctacaagaagcgggtggacttccaactctgggaacagggggcctgtgatgacatcgacttcaagtatcaattcctcaaagtcatggtcagggacacttttgccctcactcatacctcgctgcgcaatgcagcccaagcatactctctcccagtggagaagggatgctgtccctacaaggcagtcaatcagttctacatgttgggctcttaccgtgcagaaaaagacgggtttcccctcgaagagtactggaaggatcacgaagaataccttctcaaccgcgagctgtgggaaaagaaaagccaaccgcgttatgacatcatccaggaaactctcgactactgtgccctggatgtactcatcaccgccgagctggtagccaagctgcaagagtcatatgcccacttcataagggactctgtaggcttacctcatgcccattttaacatattccagagacctactatctcttccaattcccatgccatctttcgccagatcgtttacagggcggaaaaacccaaccgcaccaatctgggcccgggtcttcttgccccctcacatgaactctatgactatgtgcgagcaagcatcagaggggggcgatgttatcccacttacatcggcatcctcgaagagcccctctatgtctacgatatctgtggcatgtatgcctccgcgctcacccaccccatgccctggggcacccctcttaacccctatgagcgcgcgctggcagttcgagaatggcagatgaccttggatgatcccgccaccatcagctattttgacaaagatttgctaccgggaatatttaccatagatgcggacccccctgatgagttcatgctagaccccctcccccctttctgttcaagaaaaggaggtcgactctgctggaccaatgagcccctccgaggcgaggtggccaccagtgtggatctgataaccctgcacaataggggatggcgaatcagaatagttccggatgaactgacaaccatctttcctgaatggaaatgtgtggcgcgcgagtacgtccagcttaacatcaccgccaaggagcgcgcggacaaggaaaagaaccaaaccatgcgctccatcgccaagcttctatccaatgccctctatggatcatttgccaccaagctggacaacaagaagattgtgttttctgaccagatggacgagagtcttatgaaaggcatctctgctggtactgtcaatatcaaatcctcctcgttcctagaaactgacaacctgagtgcagaggtcatgcccgccttcgagagggaatacctaccccaacagctggcgctcctggacagcgatccggaagacagtgaggacgaacagaggcccgcccccttttatacccccccggcggggacccctggtcacgtggcctacacttacaagccaatcacattcttggatgtggaggagggggacatgtgtttacataccgtagagaaggtggaccccctggttgacaacgaccgctacccctcccacgtggcctcctttgtgctggcctggacacgcgcttttgtatcagagtgggctgggttcctctacgaagaggaccgaggcactccgctcgaggacaggcccataaagtcggtctacggggacacggacagcctctttgtcacccagcggggacacgaactcatggaaaccaaaggtaagaaacgcatcaaaaaacatggcggaaaacttgtttttgaccccgatgagccggatctgacctggctcgtggagtgcgaaaccgtctgcgcctcctgcggtgcggatgcatactcccccgaatccattttcctcgcgcccaagttgtatgccctcaaatgtatctactgccccgcctgccataaaacttccaaaggtaagctccgtgccaaaggccacgcggccgaggcgctcaactacgaactcatggtaaactgctacctggccgacatgcagggcgccaatcggcagcggttctcgaccagcaggatgagtctgaagcgcaccctcgcaagcgcccaaccaggcgcgcaccccttcaccgtgacggaaacaaccctgactcggacgctgcgaccatggaaggatcggaccctggcagcgctggacgcccatcgtctgattccctactccaggagccgtcccaacccgcgaaacgaggaggtctgctggatcgagatgccatagagcacatcaccgagctctgggaccggctcgagctcttgcaacagactctttccaaaatgcccatggctgacgggctgaagccgctgaaaaacttctcctcgctccaggagcttctatcccttgggggagagcgcctcctaacggacttggtgcgggaaaatatccatgtaagggaaatgatgaacgaagtggcccccctgctccgggaggacggcagctgtcgttccctaaactaccatctgcaacccgtaattggggtcatttacggtcccactgggtgcggcaagtctcagctgcttaggaatttgctctcgtcccagttaatcaccccggctccagaaacggtattttttatagccccgcaggtggacatgatccccccctctgaactgaaagcctgggaaatgcaaatatgtgagggaaactatgctcccgggccagagggaactttcatcccccaatctggcaccctccgcccaaagtttattaaaatggcttatgatgacctgactcaggagcataactatgatgtttcagacccccggaacgtgttcgcccgtgccgctgcccacggccccatcgctatcattatggatgagtgcatggagaatctggggggtcacaaaggcgtctccaaattttttcatgcttttccctctaagctgcatgataaatttcccaagtgcaccggatacactgtcttggtggtcctgcacaatatgaacccgagacgggatctaggcggcaacattgccaacctcaagatccagtccaaaatgcatataatttcaccccggatgcacccgtcccagctcaacagatttgtaaacacctacactaagggcctccccgttgcaattagtctgctcctaaaagatattgtgcaacaccatgcactccgaccttgctatgactgggtgatttataacactaccccggagcaagaggctcttcaatggagctatctccacccccgagacggactaatgcccatgtatctaaacattcaatcccacctttacagggtactggaaaagatccaccgcgttctcaatgatcgagaccgatggtccagggcataccgcgcgcgaaaaatcaaataaa

SEQ ID NO: 15 - DNA, 4102 bp, Human adenovirus
  misc_feature 1..4102: note = Ad3 E3; 27085 - 31186
  source 1..4102: mol_type = genomic DNA
tataaaacgcctggtgattagaggccgaggtatccagctcaacgacgagtcggttagctcttcgcttggtctgcgaccagacggagtcttccaaatcgccggctgtgggagatcttccttcactcctcgtcaggctgtgctgactttggagagttcgtcctcgcagccccgctcgggcggcattggaactctccagtttgtggaggagtttactccctctgtctacttcaaccccttctccggctctcctggccagtacccggacgagttcataccaaacttcgacgcaatcagcgagtcagtggatggctatgattgatgtctaatggtggtgcggctgagctagctcgactgcgacacctagaccactgccgccgctttcgctgcttcgcccgggaactcaccgagttcatctacttcgaactctccgaggagcaccctcagggtccggcccacggagtgcggattaccatcgaagggggaatagactctcgcctgcatcgcatcttctcccagcggcccgtgctaattgaacgcgaccagggaaatacaaccatctccatctactgcatctgtaaccaccccggattgcatgaaagcctttgctgtcttgtttgtgctgagtttaataaaaactgagttaagaccctcctacggactaccgcttcttcaatcaggactttacaacaccaaccagatcttccagaagacccagacccttcctcctttcatccaggactctaactctaccttaccagcaccctccactactaaccttcccgaaacaaacaagcttgcatctcatctgcaacaccgcctttcacgaagccttctttctgccaatactaccactcccaaaaccggaggtgagctccgcggtcttcctactgacgacccctgggtggtagcgggttttgtaacgttaggagtagttgcgggtgggcttgtgctgatcctttgctacctatacacaccttgctgtgcatatttagtcatattgtgctgttggtttaagaaatgggggccatactagtcgtgcttgctttactttcgcttttgggtctgggctctgctaatctcaatcctctcgatcacgatccatgtttagacttcgacccagaaaactgcacacttacttttgcacccgacacaagccgtctctgtggagttcttattaagtgcggatgggactgcaggtccgttgaaattacacataataacaaaacatggaacaataccttatccaccacatgggagccaggagttccccagtggtatactgtctctgtccgaggtcctgacggttccatccgcattagtaacaacactttcattttttctgaaatgtgcgatctggccatgttcatgagcagacagtatgacctatggcctcccagcaaagagaacattgtggcattttccattgcttattgcttggtaacatgcatcatcactgctatcatttgtgtgtgcatacacttgcttatagttattcgccctagacaaagcaatgaggaaaaagagaaaatgccttaacctttttcctcataccttttctttacagcatggcttctgttacagctctaattattgccagcattgtcactgtcgctcacgggcaaacaattgtccatattaccttaggacataatcacactcttgtagggcccccaattacttcagaggttatttggaccaaacttggaagtgttgattattttgatataatttgcaacaaaactaaaccaatatttgtaatctgtaacagacaaaatctcacgttaattaatgttagcaaaatttataacggttactattatggttatgacagatccagtagtcaatataaaaattacttagttcgcataactcagcccaaattaacagtgccaactatgacaataattaaaatggctaataaagcattagaaaattttacatcaccaacaacacccaatgaaaaaaacattccaaattcaatgattgcaattattgcggcggtggcattgggaatggcactaataataatatgcatgctcctatatgcttgttactataaaaagtttcaacataaacaggatccactactaaattttaacatttaattttttatacagatgatttccactacaatttttatcattactagccttgcagctgtaacttatggccgttcacacctaactgtacctgttggctcaacatgtacactacaaggaccccaagaaggctatgtcacttggtggagaatatatgataatggagggttcgctagaccatgtgatcagcctggtacaaaattttcatgcaacggaagagacttgaccattattaacataacatcaaatgagcaaggcttctattatggaaccaactataaaaatagtttagattacaacattattgtagtgccagccaccacttctgctccccgcaaatccactttctctagcagcagtgccaaagcaagcacaattcctaaaacagcttctgctatgttaaagcttccaaaaatcgctttaagtaattccacagccgctcccaatacaattcctaaatcaacaattggcatcattactgccgtggtagtgggattaatgattatatttttgtgtataatgtactacgcctgctgctatagaaaacatgaacaaaaaggtgatgcattactaaattttgatatttaattttttatagaattatgatattgtttcaatcaaataccactacctcctatgcatacacaaacattcagcctaaatacgctatgcaactagaaatcacaatactaattgtaattggaattcttatactatctgttattctttattttatattctgccgtcaaatacccaatgttcatagaaattctaaaagacgtcccatctattctcctatgattagtcgtccccatatggctctgaatgaaatctaagatctttttttttttctcttacagtatggtgaacatcaatcatgatccctagaaatttcttcttcaccatactcatctgtgcttttaatgtctgtgctactttcacagcagtagccactgcaagcccagactgtataggaccatttgcttcctatgcactttttgccttcgttacttgcatctgcgtgtgtagcatagtctgcctggttattaattttttccaactggtagactggatctttgtgcgaattgcctacctacgtcaccatcccgaataccgcaatcaaaatgttgcggcacttcttaggcttatttaaaaccatgcaggctatgctaccagtcattttaattttgctactaccctgcattcccctagcttccaccgccactcgcgctacacctgaacaacttagaaaatgcaaatttcaacaaccatggtcatttcttgattgctaccatgaaaaatctgattttcccacatactggatagtgattgttggaataattaacatactttcatgtacctttttctcaatcacaatataccccacatttaattttgggtggaattctcccaatgcactgggttacccacaagaaccagatgaacatattccactacaacacatacaacaaccactagcactggtacagtatgaaaatgagccacaaccttcactgccccctgccattagttacttcaacctaaccggcggagatgactgacccaatcgccacatcatccaccgctgccaaggagctgctggacatggacggacgtgcctcagaacagcgactcatccaactacgcattcgtcagcagcaggaacgagcagtaaaagagctaagggatgccattgggattcaccagtgcaaaaaaggcatattctgcttagtaaaacaatccaaaatctcctacgagatcaccgctactgaccatcgtctctcatacgagctcggtccgcagcgacaaaaattcacctgcatggtgggaatcaaccccatagttatcacccagcagtctggagatactaagggttgtatccagtgttcctgtgattccaccgagtgcatctacacactgctgaagaccctctgcggccttcgagacctcctacccatgaactaatcattgcccctaccttacccaatcaaaatattaataaa

SEQ ID NO: 16 - DNA, 960 bp, Human adenovirus
  misc_feature 1..960: note = Ad3 fiber; 31368 - 32327
  source 1..960: mol_type = genomic DNA
atggccaagcgagctcggctaagcacttccttcaacccggtgtacccttatgaagatgaaagcagctcacaacacccatttataaatcctggtttcatttcccctgacgggttcacacaaagtccaaacggggttttaagtcttaaatgtgttaatccacttaccactgcaagcggctccctccaacttaaagtgggaagtggtcttacagtagacactactgatggatccttagaagaaaacatcaaagttaacacccccctaacaaagtcaaaccattctataaatttaccaataggaaacggtttgcaaatagaacaaaacaaactttgcagtaaactcggaaatggtcttacatttgactcttccaattctattgcactgaaaaataacactttatggacaggtccaaaaccagaagccaactgcataattgaatacgggaaacaaaacccagatagcaaactaactttaatccttgtaaaaaatggaggaattgttaatggatatgtaacgctaatgggagcctcagactacgttaacaccttatttaaaaacaaaaatgtctccattaatgtagaactatactttgatgccactggtcatatattaccagactcatcttctcttaaaacagatctagaactaaaatacaagcaaaccgctgactttagtgcaagaggttttatgccaagtactacagcgtatccatttgtccttcctaatgcgggaacacataatgaaaattatatttttggtcaatgctactacaaagcaagcgatggtgccctttttccgttggaagttactgttatgcttaataaacgcctgccagatagtcgcacatcctatgttatgacttttttatggtccttgaatgctggtctagctccagaaactactcaggcaaccctcataacctccccatttaccttttcctatattagagaagatgactga

SEQ ID NO: 17 - DNA, 126 bp, Human adenovirus
  misc_feature 1..126: note = Ad3 fiber tail; 31368 - 31493
  source 1..126: mol_type = genomic DNA
atggccaagcgagctcggctaagcacttccttcaacccggtgtacccttatgaagatgaaagcagctcacaacacccatttataaatcctggtttcatttcccctgacgggttcacacaaagtcca

SEQ ID NO: 18 - DNA, 270 bp, Human adenovirus
  misc_feature 1..270: note = Ad3 fiber shaft; 31494 - 31763
  source 1..270: mol_type = genomic DNA
aacggggttttaagtcttaaatgtgttaatccacttaccactgcaagcggctccctccaacttaaagtgggaagtggtcttacagtagacactactgatggatccttagaagaaaacatcaaagttaacacccccctaacaaagtcaaaccattctataaatttaccaataggaaacggtttgcaaatagaacaaaacaaactttgcagtaaactcggaaatggtcttacatttgactcttccaattctattgcactgaaaaataacact

SEQ ID NO: 19 - DNA, 561 bp, Human adenovirus
  misc_feature 1..561: note = Ad3 fiber knob; 31764 - 32324
  source 1..561: mol_type = genomic DNA
ttatggacaggtccaaaaccagaagccaactgcataattgaatacgggaaacaaaacccagatagcaaactaactttaatccttgtaaaaaatggaggaattgttaatggatatgtaacgctaatgggagcctcagactacgttaacaccttatttaaaaacaaaaatgtctccattaatgtagaactatactttgatgccactggtcatatattaccagactcatcttctcttaaaacagatctagaactaaaatacaagcaaaccgctgactttagtgcaagaggttttatgccaagtactacagcgtatccatttgtccttcctaatgcgggaacacataatgaaaattatatttttggtcaatgctactacaaagcaagcgatggtgccctttttccgttggaagttactgttatgcttaataaacgcctgccagatagtcgcacatcctatgttatgacttttttatggtccttgaatgctggtctagctccagaaactactcaggcaaccctcataacctccccatttaccttttcctatattagagaagatgac

SEQ ID NO: 20 - DNA, 1635 bp, Human adenovirus
  misc_feature 1..1635: note = Ad3 penton; 13905 - 15539
  source 1..1635: mol_type = genomic DNA
atgaggagacgagccgtgctaggcggagcggtggtgtatccggagggtcctcctccttcttacgagagcgtgatgcagcaacaggcggcgatgatacagcccccactggaggctcccttcgtacccccacggtacctggcgcctacggaagggagaaacagcattcgttactcggagctgtcgcccctgtacgataccaccaagttgtatctggtggacaacaagtcggcggacatcgcctccctgaactatcagaacgaccacagcaacttcctgaccacggtggtgcagaacaatgactttacccccacggaggctagcacccagaccatcaactttgacgagcggtcgcgatggggcggtcagctgaagaccatcatgcacaccaacatgcccaacgtgaacgagtacatgttcagcaacaagttcaaggcgagggtgatggtgtccagaaaagctcctgaaggtgttacagtaaatgacacctatgatcataaagaggatatcttgaagtatgagtggtttgagttcattttaccagaaggcaacttttcagccaccatgacgatcgacctgatgaacaatgccatcattgacaactacctggaaattggcagacagaatggagtgctggaaagtgacattggtgttaagtttgacactagaaatttcaggctcgggtgggaccccgaaactaagttgattatgccaggtgtctacacttatgaggcattccatcctgacattgtattgctgcctggttgcggggtagactttactgaaagccgacttagcaacttgcttggcatcaggaagagacatccattccaggagggtttcaaaatcatgtatgaagatcttgaagggggtaatattcctgcccttttggatgtcactgcctatgaggaaagcaaaaaggataccactactgaaacaaccacactggctgttgcagaggaaactagtgaagatgatgatataactagaggagatacctatataactgaaaaacaaaaacgtgaagctgcagctgctgaagttaaaaaagagttaaagatccaacctctagaaaaagacagcaagagtagaagctacaatgtcttggaagacaaaatcaacacagcctaccgcagttggtacctgtcctacaattacggtaaccctgagaaaggaataaggtcttggacactgctcaccacttcagatgtcacctgtggggcagagcaggtctactggtcgctccctgacatgatgcaagacccagtcaccttccgctccacaagacaagtcaacaactacccagtggtgggtgcagagcttatgcccgtcttctcaaagagtttctacaatgagcaagccgtgtactctcagcagctccgacaggccacttcgctcacgcacgtcttcaaccgcttccctgagaaccagatcctcatccgcccgccggcgcccacaattaccaccgtcagtgaaaacgttcctgctctcacagatcacgggaccctgccgttacgcagcagtatccggggagtccagcgcgtgaccgttactgacgccagacgccgcacctgtccctacgtttacaaggccctgggcatagtcgcgccgcgcgttctttcaagccgcactttctaa

SEQ ID NO: 21 - DNA, 2835 bp, Human adenovirus
  misc_feature 1..2835: note = Ad3 hexon; 18418 - 21252
  source 1..2835: mol_type = genomic DNA
atggccaccccatcgatgatgccccaatgggcatacatgcacatcgccggacaggatgcttcggagtacctcagtccgggtctggtgcagttcgcccgtgcaacagacacctacttcagtatggggaacaaatttagaaaccccacagtggcgcccacccacgatgtgaccaccgaccgtagccagcgcctgatgctgcgcttcgtgcccgttgaccgggaagacaatacctactcttacaaagttcgctacacgctggctgtaggcgacaacagagtgcttgacatggccagcacattctttgacattcggggggtgcttgatagaggtcctagcttcaagccatattccggcacagcttacaattcactcgctcctaagggcgcgcccaatacatctcagtggatagttacaacaaatggggacaatgcagtaactaccaccacaaacacatttggcattgcttccatgaagggagacaatattactaaagaaggtttgcaaattgggaaagacattaccactactgaaggagaagaaaagcccatttatgccgataaaacatatcagccagagcctcaagttggagaagaatcatggactgatactgatggaacaaatgaaaagtttggtggaagagcccttaaaccagctaccaacatgaagccatgctacgggtcttttgcaagacctacaaacataaaagggggccaagctaaaaacagaaaagtaaaaccaacaaccgaaggaggggttgaaactgaggaaccagatattgatatggaatttttcgatggtagagatgctgttgcaggagctttagcgcctgaaattgtgctttatacggaaaatgtaaatttggaaactccagacagtcatgtggtatataaaccagaaacgtctaataactctcatgcaaatttgggtcaacaagccatgcctaacagacccaattacattggcttcagggataacttcgtaggcctaatgtactacaacagtactggaaatatgggagttttggctggccaagcatcacaactgaatgcagtggttgacttgcaggacagaaatactgaactgtcatatcagcttttgcttgattctctgggagacagaaccagatacttcagcatgtggaatcaggctgtggacagttacgatcccgatgttcgcattattgaaaatcatggcatcgaggatgaactgcctaattactgttttcctctgaatggcataggaccagggcacacatatcaaggcattaaagttaaaaccgatgacactaatggatgggaaaaagatgctaatgttgctccagctaatgaaataaccataggcaacaacctggctatggaaattaatatccaagctaacctttggagaagttttctgtactctaatgtggctttgtaccttccagatgtttacaagtacacgccacctaacattactttgcccactaacaccaacacctatgagtacatgaacgggcgagtggtatccccatccctggttgattcatacatcaacattggcgccaggtggtctcttgacccaatggacaatgtgaatccattcaaccaccaccgcaatgctggtctgcgctacaggtccatgcttctgggaaatggtcgttatgtgcctttccacatacaagtgcctcagaaattctttgctgtcaagaacctacttcttctacctggctcctacacctacgagtggaacttccgaaaggatgtgaacatggtcctgcaaagttcccttggaaatgacctcagaacggatggtgctaccataagtttcaccagcatcaatctctatgccaccttcttccccatggctcacaacacagcttccacccttgaagccatgctgcgcaacgataccaatgatcagtcatttaacgactacctctctgcagctaacatgctttaccccattcctgccaatgcaaccaacattccaatttccatcccatctcgcaactgggcagccttcaggggctggtccttcaccagactcaaaaccaaggagactccatctcttggatcagggttcgatccctacttcgtatattctggatctattccctacctggatggcaccttttaccttaaccacactttcaagaaggtctccatcatgtttgactcctcagtcagctggcctggcaatgacaggctgttgagtccaaatgagtttgaaatcaagcgcactgtggacggggaaggatacaacgtggcacaatgcaacatgaccaaagactggttcctggttcagatgcttgccaattacaacattggctaccagggcttttacatccctgagggatacaaggatcgcatgtactcctttttcagaaacttccagcctatgagcaggcaggtggttgatgaggttaattacactgactacaaagccgtcaccttaccataccaacacaacaactctggctttgtagggtaccttgcacctactatgagacaaggggaaccttacccagccaattatccatacccgctcatcggaactactgccgttaagagtgtcacccagaaaaagttcctgtgcgacaggaccatgtggcgcattcccttctccagcaacttcatgtccatgggggcccttaccgacctgggacagaacatgctctatgccaactcagcccatgcgctggacatgacttttgaggtggatcccatggatgagcccaccctgctttatcttcttttcgaagtcttcgacgtggtcagagtgcaccagccacaccgcggcgtcatcgaggccgtctacctgcgcacaccgttctcggccggcaacgccaccacataa

SEQ ID NO: 22 - protein, 319 aa, Human adenovirus
  REGION 1..319: note = misc_feature - Ad3 fiber ; 1 - 319 (GenBank accession no. YP_002213796); Human adenovirus 3
MAKRARLSTSFNPVYPYEDESSSQHPFINPGFISPDGFTQSPNGVLSLKCVNPLTTASGSLQLKVGSGLTVDTTDGSLEENIKVNTPLTKSNHSINLPIGNGLQIEQNKLCSKLGNGLTFDSSNSIALKNNTLWTGPKPEANCIIEYGKQNPDSKLTLILVKNGGIVNGYVTLMGASDYVNTLFKNKNVSINVELYFDATGHILPDSSSLKTDLELKYKQTADFSARGFMPSTTAYPFVLPNAGTHNENYIFGQCYYKASDGALFPLEVTVMLNKRLPDSRTSYVMTFLWSLNAGLAPETTQATLITSPFTFSYIREDD

SEQ ID NO: 23 - protein, 90 aa, Human adenovirus
  REGION 1..90: note = misc_feature - Ad3 fiber shaft; 43 -132 (GenBank accession no. YP_002213796); Human adenovirus 3
NGVLSLKCVNPLTTASGSLQLKVGSGLTVDTTDGSLEENIKVNTPLTKSNHSINLPIGNGLQIEQNKLCSKLGNGLTFDSSNSIALKNNT

SEQ ID NO: 24 - protein, 186 aa, Human adenovirus
  REGION 1..186: note = misc_feature - Ad3 fiber knob; 134 - 319 (GenBank accession no. YP_002213796); Human adenovirus 3
WTGPKPEANCIIEYGKQNPDSKLTLILVKNGGIVNGYVTLMGASDYVNTLFKNKNVSINVELYFDATGHILPDSSSLKTDLELKYKQTADFSARGFMPSTTAYPFVLPNAGTHNENYIFGQCYYKASDGALFPLEVTVMLNKRLPDSRTSYVMTFLWSLNAGLAPETTQATLITSPFTFSYIREDD

SEQ ID NO: 25 - protein, 544 aa, Human adenovirus
  REGION 1..544: note = misc_feature - Ad3 penton ; 1 544 (GenBank accession no. YP_002213774); Human adenovirus 3
MRRRAVLGGAVVYPEGPPPSYESVMQQQAAMIQPPLEAPFVPPRYLAPTEGRNSIRYSELSPLYDTTKLYLVDNKSADIASLNYQNDHSNFLTTVVQNNDFTPTEASTQTINFDERSRWGGQLKTIMHTNMPNVNEYMFSNKFKARVMVSRKAPEGVTVNDTYDHKEDILKYEWFEFILPEGNFSATMTIDLMNNAIIDNYLEIGRQNGVLESDIGVKFDTRNFRLGWDPETKLIMPGVYTYEAFHPDIVLLPGCGVDFTESRLSNLLGIRKRHPFQEGFKIMYEDLEGGNIPALLDVTAYEESKKDTTTETTTLAVAEETSEDDDITRGDTYITEKQKREAAAAEVKKELKIQPLEKDSKSRSYNVLEDKINTAYRSWYLSYNYGNPEKGIRSWTLLTTSDVTCGAEQVYWSLPDMMQDPVTFRSTRQVNNYPVVGAELMPVFSKSFYNEQAVYSQQLRQATSLTHVFNRFPENQILIRPPAPTITTVSENVPALTDHGTLPLRSSIRGVQRVTVTDARRRTCPYVYKALGIVAPRVLSSRTF

SEQ ID NO: 26 - protein, 944 aa, Human adenovirus
  REGION 1..944: note = misc_feature - Ad3 hexon ; 1 944 (GenBank accession no. YP_002213779); Human adenovirus 3
MATPSMMPQWAYMHIAGQDASEYLSPGLVQFARATDTYFSMGNKFRNPTVAPTHDVTTDRSQRLMLRFVPVDREDNTYSYKVRYTLAVGDNRVLDMASTFFDIRGVLDRGPSFKPYSGTAYNSLAPKGAPNTSQWIVTTNGDNAVTTTTNTFGIASMKGDNITKEGLQIGKDITTTEGEEKPIYADKTYQPEPQVGEESWTDTDGTNEKFGGRALKPATNMKPCYGSFARPTNIKGGQAKNRKVKPTTEGGVETEEPDIDMEFFDGRDAVAGALAPEIVLYTENVNLETPDSHVVYKPETSNNSHANLGQQAMPNRPNYIGFRDNFVGLMYYNSTGNMGVLAGQASQLNAVVDLQDRNTELSYQLLLDSLGDRTRYFSMWNQAVDSYDPDVRIIENHGIEDELPNYCFPLNGIGPGHTYQGIKVKTDDTNGWEKDANVAPANEITIGNNLAMEINIQANLWRSFLYSNVALYLPDVYKYTPPNITLPTNTNTYEYMNGRVVSPSLVDSYINIGARWSLDPMDNVNPFNHHRNAGLRYRSMLLGNGRYVPFHIQVPQKFFAVKNLLLLPGSYTYEWNFRKDVNMVLQSSLGNDLRTDGATISFTSINLYATFFPMAHNTASTLEAMLRNDTNDQSFNDYLSAANMLYPIPANATNIPISIPSRNWAAFRGWSFTRLKTKETPSLGSGFDPYFVYSGSIPYLDGTFYLNHTFKKVSIMFDSSVSWPGNDRLLSPNEFEIKRTVDGEGYNVAQCNMTKDWFLVQMLANYNIGYQGFYIPEGYKDRMYSFFRNFQPMSRQVVDEVNYTDYKAVTLPYQHNNSGFVGYLAPTMRQGEPYPANYPYPLIGTTAVKSVTQKKFLCDRTMWRIPFSSNFMSMGALTDLGQNMLYANSAHALDMTFEVDPMDEPTLLYLLFEVFDVVRVHQPHRGVIEAVYLRTPFSAGNATT

SEQ ID NO: 27 - protein, 42 aa, Human adenovirus
  REGION 1..42: note = misc_feature - Ad3 fiber tail; 1 - 42 (GenBank accession no. YP_002213796); Human adenovirus 3
MAKRARLSTSFNPVYPYEDESSSQHPFINPGFISPDGFTQSP

SEQ ID NO: 28 - DNA, 103 bp, Human adenovirus
  misc_feature 1..103: note = Ad5 5 (left) ITR; 1 - 103
  source 1..103: mol_type = genomic DNA
catcatcaataatataccttattttggattgaagccaatatgataatgagggggtggagtttgtgacgtggcgcggggcgtgggaacggggcgggtgacgtag

SEQ ID NO: 29 - DNA, 103 bp, Human adenovirus
  misc_feature 1..103: note = Ad5 3 (right) ITR; 35836 - 35938
  source 1..103: mol_type = genomic DNA
ctacgtcacccgccccgttcccacgccccgcgccacgtcacaaactccaccccctcattatcatattggcttcaatccaaaataaggtatattattgatgatg

SEQ ID NO: 30 - DNA, 376 bp, Human adenovirus
  misc_feature 1..376: note = Ad5 Packaging Sequence; 104 - 479
  source 1..376: mol_type = genomic DNA
tagtgtggcggaagtgtgatgttgcaagtgtggcggaacacatgtaagcgacggatgtggcaaaagtgacgtttttggtgtgcgccggtgtacacaggaagtgacaattttcgcgcggttttaggcggatgttgtagtaaatttgggcgtaaccgagtaagatttggccattttcgcgggaaaactgaataagaggaagtgaaatctgaataattttgtgttactcatagcgcgtaatatttgtctagggccgcggggactttgaccgtttacgtggagactcgcccaggtgtttttctcaggtgttttccgcgttccgggtcaaagttggcgttttattattatagtcagctgacgtgtagtgtatttatacccg

SEQ ID NO: 31 - DNA, 3030 bp, Human adenovirus
  misc_feature 1..3030: note = Ad5 E1; 480 - 3509
  source 1..3030: mol_type = genomic DNA
gtgagttcctcaagaggccactcttgagtgccagcgagtagagttttctcctccgagccgctccgacaccgggactgaaaatgagacatattatctgccacggaggtgttattaccgaagaaatggccgccagtcttttggaccagctgatcgaagaggtactggctgataatcttccacctcctagccattttgaaccacctacccttcacgaactgtatgatttagacgtgacggcccccgaagatcccaacgaggaggcggtttcgcagatttttcccgactctgtaatgttggcggtgcaggaagggattgacttactcacttttccgccggcgcccggttctccggagccgcctcacctttcccggcagcccgagcagccggagcagagagccttgggtccggtttctatgccaaaccttgtaccggaggtgatcgatcttacctgccacgaggctggctttccacccagtgacgacgaggatgaagagggtgaggagtttgtgttagattatgtggagcaccccgggcacggttgcaggtcttgtcattatcaccggaggaatacgggggacccagatattatgtgttcgctttgctatatgaggacctgtggcatgtttgtctacagtaagtgaaaattatgggcagtgggtgatagagtggtgggtttggtgtggtaattttttttttaatttttacagttttgtggtttaaagaattttgtattgtgatttttttaaaaggtcctgtgtctgaacctgagcctgagcccgagccagaaccggagcctgcaagacctacccgccgtcctaaaatggcgcctgctatcctgagacgcccgacatcacctgtgtctagagaatgcaatagtagtacggatagctgtgactccggtccttctaacacacctcctgagatacacccggtggtcccgctgtgccccattaaaccagttgccgtgagagttggtgggcgtcgccaggctgtggaatgtatcgaggacttgcttaacgagcctgggcaacctttggacttgagctgtaaacgccccaggccataaggtgtaaacctgtgattgcgtgtgtggttaacgcctttgtttgctgaatgagttgatgtaagtttaataaagggtgagataatgtttaacttgcatggcgtgttaaatggggcggggcttaaagggtatataatgcgccgtgggctaatcttggttacatctgacctcatggaggcttgggagtgtttggaagatttttctgctgtgcgtaacttgctggaacagagctctaacagtacctcttggttttggaggtttctgtggggctcatcccaggcaaagttagtctgcagaattaaggaggattacaagtgggaatttgaagagcttttgaaatcctgtggtgagctgtttgattctttgaatctgggtcaccaggcgcttttccaagagaaggtcatcaagactttggatttttccacaccggggcgcgctgcggctgctgttgcttttttgagttttataaaggataaatggagcgaagaaacccatctgagcggggggtacctgctggattttctggccatgcatctgtggagagcggttgtgagacacaagaatcgcctgctactgttgtcttccgtccgcccggcgataataccgacggaggagcagcagcagcagcaggaggaagccaggcggcggcggcaggagcagagcccatggaacccgagagccggcctggaccctcgggaatgaatgttgtacaggtggctgaactgtatccagaactgagacgcattttgacaattacagaggatgggcaggggctaaagggggtaaagagggagcggggggcttgtgaggctacagaggaggctaggaatctagcttttagcttaatgaccagacaccgtcctgagtgtattacttttcaacagatcaaggataattgcgctaatgagcttgatctgctggcgcagaagtattccatagagcagctgaccacttactggctgcagccaggggatgattttgaggaggctattagggtatatgcaaaggtggcacttaggccagattgcaagtacaagatcagcaaacttgtaaatatcaggaattgttgctacatttctgggaacggggccgaggtggagatagatacggaggatagggtggcctttagatgtagcatgataaatatgtggccgggggtgcttggcatggacggggtggttattatgaatgtaaggtttactggccccaattttagcggtacggttttcctggccaataccaaccttatcctacacggtgtaagcttctatgggtttaacaatacctgtgtggaagcctggaccgatgtaagggttcggggctgtgccttttactgctgctggaagggggtggtgtgtcgccccaaaagcagggcttcaattaagaaatgcctctttgaaaggtgtaccttgggtatcctgtctgagggtaactccagggtgcgccacaatgtggcctccgactgtggttgcttcatgctagtgaaaagcgtggctgtgattaagcataacatggtatgtggcaactgcgaggacagggcctctcagatgctgacctgctcggacggcaactgtcacctgctgaagaccattcacgtagccagccactctcgcaaggcctggccagtgtttgagcataacatactgacccgctgttccttgcatttgggtaacaggaggggggtgttcctaccttaccaatgcaatttgagtcacactaagatattgcttgagcccgagagcatgtccaaggtgaacctgaacggggtgtttgacatgaccatgaagatctggaaggtgctgaggtacgatgagacccgcaccaggtgcagaccctgcgagtgtggcggtaaacatattaggaaccagcctgtgatgctggatgtgaccgaggagctgaggcccgatcacttggtgctggcctgcacccgcgctgagtttggctctagcgatgaagatacagattga

SEQ ID NO: 32 - DNA, 19942 bp, Human adenovirus
  misc_feature 1..19942: note = Ad5 E2; 4091 - 24032
  source 1..19942: mol_type = genomic DNA
ttatttaggggttttgcgcgcgcggtaggcccgggaccagcggtctcggtcgttgagggtcctgtgtattttttccaggacgtggtaaaggtgactctggatgttcagatacatgggcataagcccgtctctggggtggaggtagcaccactgcagagcttcatgctgcggggtggtgttgtagatgatccagtcgtagcaggagcgctgggcgtggtgcctaaaaatgtctttcagtagcaagctgattgccaggggcaggcccttggtgtaagtgtttacaaagcggttaagctgggatgggtgcatacgtggggatatgagatgcatcttggactgtatttttaggttggctatgttcccagccatatccctccggggattcatgttgtgcagaaccaccagcacagtgtatccggtgcacttgggaaatttgtcatgtagcttagaaggaaatgcgtggaagaacttggagacgcccttgtgacctccaagattttccatgcattcgtccataatgatggcaatgggcccacgggcggcggcctgggcgaagatatttctgggatcactaacgtcatagttgtgttccaggatgagatcgtcataggccatttttacaaagcgcgggcggagggtgccagactgcggtataatggttccatccggcccaggggcgtagttaccctcacagatttgcatttcccacgctttgagttcagatggggggatcatgtctacctgcggggcgatgaagaaaacggtttccggggtaggggagatcagctgggaagaaagcaggttcctgagcagctgcgacttaccgcagccggtgggcccgtaaatcacacctattaccgggtgcaactggtagttaagagagctgcagctgccgtcatccctgagcaggggggccacttcgttaagcatgtccctgactcgcatgttttccctgaccaaatccgccagaaggcgctcgccgcccagcgatagcagttcttgcaaggaagcaaagtttttcaacggtttgagaccgtccgccgtaggcatgcttttgagcgtttgaccaagcagttccaggcggtcccacagctcggtcacctgctctacggcatctcgatccagcatatctcctcgtttcgcgggttggggcggctttcgctgtacggcagtagtcggtgctcgtccagacgggccagggtcatgtctttccacgggcgcagggtcctcgtcagcgtagtctgggtcacggtgaaggggtgcgctccgggctgcgcgctggccagggtgcgcttgaggctggtcctgctggtgctgaagcgctgccggtcttcgccctgcgcgtcggccaggtagcatttgaccatggtgtcatagtccagcccctccgcggcgtggcccttggcgcgcagcttgcccttggaggaggcgccgcacgaggggcagtgcagacttttgagggcgtagagcttgggcgcgagaaataccgattccggggagtaggcatccgcgccgcaggccccgcagacggtctcgcattccacgagccaggtgagctctggccgttcggggtcaaaaaccaggtttcccccatgctttttgatgcgtttcttacctctggtttccatgagccggtgtccacgctcggtgacgaaaaggctgtccgtgtccccgtatacagacttgagaggcctgtcctcgagcggtgttccgcggtcctcctcgtatagaaactcggaccactctgagacaaaggctcgcgtccaggccagcacgaaggaggctaagtgggaggggtagcggtcgttgtccactagggggtccactcgctccagggtgtgaagacacatgtcgccctcttcggcatcaaggaaggtgattggtttgtaggtgtaggccacgtgaccgggtgttcctgaaggggggctataaaagggggtgggggcgcgttcgtcctcactctcttccgcatcgctgtctgcgagggccagctgttggggtgagtactccctctgaaaagcgggcatgacttctgcgctaagattgtcagtttccaaaaacgaggaggatttgatattcacctggcccgcggtgatgcctttgagggtggccgcatccatctggtcagaaaagacaatctttttgttgtcaagcttggtggcaaacgacccgtagagggcgttggacagcaacttggcgatggagcgcagggtttggtttttgtcgcgatcggcgcgctccttggccgcgatgtttagctgcacgtattcgcgcgcaacgcaccgccattcgggaaagacggtggtgcgctcgtcgggcaccaggtgcacgcgccaaccgcggttgtgcagggtgacaaggtcaacgctggtggctacctctccgcgtaggcgctcgttggtccagcagaggcggccgcccttgcgcgagcagaatggcggtagggggtctagctgcgtctcgtccggggggtctgcgtccacggtaaagaccccgggcagcaggcgcgcgtcgaagtagtctatcttgcatccttgcaagtctagcgcctgctgccatgcgcgggcggcaagcgcgcgctcgtatgggttgagtgggggaccccatggcatggggtgggtgagcgcggaggcgtacatgccgcaaatgtcgtaaacgtagaggggctctctgagtattccaagatatgtagggtagcatcttccaccgcggatgctggcgcgcacgtaatcgtatagttcgtgcgagggagcgaggaggtcgggaccgaggttgctacgggcgggctgctctgctcggaagactatctgcctgaagatggcatgtgagttggatgatatggttggacgctggaagacgttgaagctggcgtctgtgagacctaccgcgtcacgcacgaaggaggcgtaggagtcgcgcagcttgttgaccagctcggcggtgacctgcacgtctagggcgcagtagtccagggtttccttgatgatgtcatacttatcctgtcccttttttttccacagctcgcggttgaggacaaactcttcgcggtctttccagtactcttggatcggaaacccgtcggcctccgaacggtaagagcctagcatgtagaactggttgacggcctggtaggcgcagcatcccttttctacgggtagcgcgtatgcctgcgcggccttccggagcgaggtgtgggtgagcgcaaaggtgtccctgaccatgactttgaggtactggtatttgaagtcagtgtcgtcgcatccgccctgctcccagagcaaaaagtccgtgcgctttttggaacgcggatttggcagggcgaaggtgacatcgttgaagagtatctttcccgcgcgaggcataaagttgcgtgtgatgcggaagggtcccggcacctcggaacggttgttaattacctgggcggcgagcacgatctcgtcaaagccgttgatgttgtggcccacaatgtaaagttccaagaagcgcgggatgcccttgatggaaggcaattttttaagttcctcgtaggtgagctcttcaggggagctgagcccgtgctctgaaagggcccagtctgcaagatgagggttggaagcgacgaatgagctccacaggtcacgggccattagcatttgcaggtggtcgcgaaaggtcctaaactggcgacctatggccattttttctggggtgatgcagtagaaggtaagcgggtcttgttcccagcggtcccatccaaggttcgcggctaggtctcgcgcggcagtcactagaggctcatctccgccgaacttcatgaccagcatgaagggcacgagctgcttcccaaaggcccccatccaagtataggtctctacatcgtaggtgacaaagagacgctcggtgcgaggatgcgagccgatcgggaagaactggatctcccgccaccaattggaggagtggctattgatgtggtgaaagtagaagtccctgcgacgggccgaacactcgtgctggcttttgtaaaaacgtgcgcagtactggcagcggtgcacgggctgtacatcctgcacgaggttgacctgacgaccgcgcacaaggaagcagagtgggaatttgagcccctcgcctggcgggtttggctggtggtcttctacttcggctgcttgtccttgaccgtctggctgctcgaggggagttacggtggatcggaccaccacgccgcgcgagcccaaagtccagatgtccgcgcgcggcggtcggagcttgatgacaacatcgcgcagatgggagctgtccatggtctggagctcccgcggcgtcaggtcaggcgggagctcctgcaggtttacctcgcatagacgggtcagggcgcgggctagatccaggtgatacctaatttccaggggctggttggtggcggcgtcgatggcttgcaagaggccgcatccccgcggcgcgactacggtaccgcgcggcgggcggtgggccgcgggggtgtccttggatgatgcatctaaaagcggtgacgcgggcgagcccccggaggtagggggggctccggacccgccgggagagggggcaggggcacgtcggcgccgcgcgcgggcaggagctggtgctgcgcgcgtaggttgctggcgaacgcgacgacgcggcggttgatctcctgaatctggcgcctctgcgtgaagacgacgggcccggtgagcttgagcctgaaagagagttcgacagaatcaatttcggtgtcgttgacggcggcctggcgcaaaatctcctgcacgtctcctgagttgtcttgataggcgatctcggccatgaactgctcgatctcttcctcctggagatctccgcgtccggctcgctccacggtggcggcgaggtcgttggaaatgcgggccatgagctgcgagaaggcgttgaggcctccctcgttccagacgcggctgtagaccacgcccccttcggcatcgcgggcgcgcatgaccacctgcgcgagattgagctccacgtgccgggcgaagacggcgtagtttcgcaggcgctgaaagaggtagttgagggtggtggcggtgtgttctgccacgaagaagtacataacccagcgtcgcaacgtggattcgttgatatcccccaaggcctcaaggcgctccatggcctcgtagaagtccacggcgaagttgaaaaactgggagttgcgcgccgacacggttaactcctcctccagaagacggatgagctcggcgacagtgtcgcgcacctcgcgctcaaaggctacaggggcctcttcttcttcttcaatctcctcttccataagggcctccccttcttcttcttctggcggcggtgggggaggggggacacggcggcgacgacggcgcaccgggaggcggtcgacaaagcgctcgatcatctccccgcggcgacggcgcatggtctcggtgacggcgcggccgttctcgcgggggcgcagttggaagacgccgcccgtcatgtcccggttatgggttggcggggggctgccatgcggcagggatacggcgctaacgatgcatctcaacaattgttgtgtaggtactccgccgccgagggacctgagcgagtccgcatcgaccggatcggaaaacctctcgagaaaggcgtctaaccagtcacagtcgcaaggtaggctgagcaccgtggcgggcggcagcgggcggcggtcggggttgtttctggcggaggtgctgctgatgatgtaattaaagtaggcggtcttgagacggcggatggtcgacagaagcaccatgtccttgggtccggcctgctgaatgcgcaggcggtcggccatgccccaggcttcgttttgacatcggcgcaggtctttgtagtagtcttgcatgagcctttctaccggcacttcttcttctccttcctcttgtcctgcatctcttgcatctatcgctgcggcggcggcggagtttggccgtaggtggcgccctcttcctcccatgcgtgtgaccccgaagcccctcatcggctgaagcagggctaggtcggcgacaacgcgctcggctaatatggcctgctgcacctgcgtgagggtagactggaagtcatccatgtccacaaagcggtggtatgcgcccgtgttgatggtgtaagtgcagttggccataacggaccagttaacggtctggtgacccggctgcgagagctcggtgtacctgagacgcgagtaagccctcgagtcaaatacgtagtcgttgcaagtccgcaccaggtactggtatcccaccaaaaagtgcggcggcggctggcggtagaggggccagcgtagggtggccggggctccgggggcgagatcttccaacataaggcgatgatatccgtagatgtacctggacatccaggtgatgccggcggcggtggtggaggcgcgcggaaagtcgcggacgcggttccagatgttgcgcagcggcaaaaagtgctccatggtcgggacgctctggccggtcaggcgcgcgcaatcgttgacgctctagaccgtgcaaaaggagagcctgtaagcgggcactcttccgtggtctggtggataaattcgcaagggtatcatggcggacgaccggggttcgagccccgtatccggccgtccgccgtgatccatgcggttaccgcccgcgtgtcgaacccaggtgtgcgacgtcagacaacgggggagtgctccttttggcttccttccaggcgcggcggctgctgcgctagcttttttggccactggccgcgcgcagcgtaagcggttaggctggaaagcgaaagcattaagtggctcgctccctgtagccggagggttattttccaagggttgagtcgcgggacccccggttcgagtctcggaccggccggactgcggcgaacgggggtttgcctccccgtcatgcaagaccccgcttgcaaattcctccggaaacagggacgagccccttttttgcttttcccagatgcatccggtgctgcggcagatgcgcccccctcctcagcagcggcaagagcaagagcagcggcagacatgcagggcaccctcccctcctcctaccgcgtcaggaggggcgacatccgcggttgacgcggcagcagatggtgattacgaacccccgcggcgccgggcccggcactacctggacttggaggagggcgagggcctggcgcggctaggagcgccctctcctgagcggtacccaagggtgcagctgaagcgtgatacgcgtgaggcgtacgtgccgcggcagaacctgtttcgcgaccgcgagggagaggagcccgaggagatgcgggatcgaaagttccacgcagggcgcgagctgcggcatggcctgaatcgcgagcggttgctgcgcgaggaggactttgagcccgacgcgcgaaccgggattagtcccgcgcgcgcacacgtggcggccgccgacctggtaaccgcatacgagcagacggtgaaccaggagattaactttcaaaaaagctttaacaaccacgtgcgtacgcttgtggcgcgcgaggaggtggctataggactgatgcatctgtgggactttgtaagcgcgctggagcaaaacccaaatagcaagccgctcatggcgcagctgttccttatagtgcagcacagcagggacaacgaggcattcagggatgcgctgctaaacatagtagagcccgagggccgctggctgctcgatttgataaacatcctgcagagcatagtggtgcaggagcgcagcttgagcctggctgacaaggtggccgccatcaactattccatgcttagcctgggcaagttttacgcccgcaagatataccataccccttacgttcccatagacaaggaggtaaagatcgaggggttctacatgcgcatggcgctgaaggtgcttaccttgagcgacgacctgggcgtttatcgcaacgagcgcatccacaaggccgtgagcgtgagccggcggcgcgagctcagcgaccgcgagctgatgcacagcctgcaaagggccctggctggcacgggcagcggcgatagagaggccgagtcctactttgacgcgggcgctgacctgcgctgggccccaagccgacgcgccctggaggcagctggggccggacctgggctggcggtggcacccgcgcgcgctggcaacgtcggcggcgtggaggaatatgacgaggacgatgagtacgagccagaggacggcgagtactaagcggtgatgtttctgatcagatgatgcaagacgcaacggacccggcggtgcgggcggcgctgcagagccagccgtccggccttaactccacggacgactggcgccaggtcatggaccgcatcatgtcgctgactgcgcgcaatcctgacgcgttccggcagcagccgcaggccaaccggctctccgcaattctggaagcggtggtcccggcgcgcgcaaaccccacgcacgagaaggtgctggcgatcgtaaacgcgctggccgaaaacagggccatccggcccgacgaggccggcctggtctacgacgcgctgcttcagcgcgtggctcgttacaacagcggcaacgtgcagaccaacctggaccggctggtgggggatgtgcgcgaggccgtggcgcagcgtgagcgcgcgcagcagcagggcaacctgggctccatggttgcactaaacgccttcctgagtacacagcccgccaacgtgccgcggggacaggaggactacaccaactttgtgagcgcactgcggctaatggtgactgagacaccgcaaagtgaggtgtaccagtctgggccagactattttttccagaccagtagacaaggcctgcagaccgtaaacctgagccaggctttcaaaaacttgcaggggctgtggggggtgcgggctcccacaggcgaccgcgcgaccgtgtctagcttgctgacgcccaactcgcgcctgttgctgctgctaatagcgcccttcacggacagtggcagcgtgtcccgggacacatacctaggtcacttgctgacactgtaccgcgaggccataggtcaggcgcatgtggacgagcatactttccaggagattacaagtgtcagccgcgcgctggggcaggaggacacgggcagcctggaggcaaccctaaactacctgctgaccaaccggcggcagaagatcccctcgttgcacagtttaaacagcgaggaggagcgcattttgcgctacgtgcagcagagcgtgagccttaacctgatgcgcgacggggtaacgcccagcgtggcgctggacatgaccgcgcgcaacatggaaccgggcatgtatgcctcaaaccggccgtttatcaaccgcctaatggactacttgcatcgcgcggccgccgtgaaccccgagtatttcaccaatgccatcttgaacccgcactggctaccgccccctggtttctacaccgggggattcgaggtgcccgagggtaacgatggattcctctgggacgacatagacgacagcgtgttttccccgcaaccgcagaccctgctagagttgcaacagcgcgagcaggcagaggcggcgctgcgaaaggaaagcttccgcaggccaagcagcttgtccgatctaggcgctgcggccccgcggtcagatgctagtagcccatttccaagcttgatagggtctcttaccagcactcgcaccacccgcccgcgcctgctgggcgaggaggagtacctaaacaactcgctgctgcagccgcagcgcgaaaaaaacctgcctccggcatttcccaacaacgggatagagagcctagtggacaagatgagtagatggaagacgtacgcgcaggagcacagggacgtgccaggcccgcgcccgcccacccgtcgtcaaaggcacgaccgtcagcggggtctggtgtgggaggacgatgactcggcagacgacagcagcgtcctggatttgggagggagtggcaacccgtttgcgcaccttcgccccaggctggggagaatgttttaaaaaaaaaaaagcatgatgcaaaataaaaaactcaccaaggccatggcaccgagcgttggttttcttgtattccccttagtatgcggcgcgcggcgatgtatgaggaaggtcctcctccctcctacgagagtgtggtgagcgcggcgccagtggcggcggcgctgggttctcccttcgatgctcccctggacccgccgtttgtgcctccgcggtacctgcggcctaccggggggagaaacagcatccgttactctgagttggcacccctattcgacaccacccgtgtgtacctggtggacaacaagtcaacggatgtggcatccctgaactaccagaacgaccacagcaactttctgaccacggtcattcaaaacaatgactacagcccgggggaggcaagcacacagaccatcaatcttgacgaccggtcgcactggggcggcgacctgaaaaccatcctgcataccaacatgccaaatgtgaacgagttcatgtttaccaataagtttaaggcgcgggtgatggtgtcgcgcttgcctactaaggacaatcaggtggagctgaaatacgagtgggtggagttcacgctgcccgagggcaactactccgagaccatgaccatagaccttatgaacaacgcgatcgtggagcactacttgaaagtgggcagacagaacggggttctggaaagcgacatcggggtaaagtttgacacccgcaacttcagactggggtttgaccccgtcactggtcttgtcatgcctggggtatatacaaacgaagccttccatccagacatcattttgctgccaggatgcggggtggacttcacccacagccgcctgagcaacttgttgggcatccgcaagcggcaacccttccaggagggctttaggatcacctacgatgatctggagggtggtaacattcccgcactgttggatgtggacgcctaccaggcgagcttgaaagatgacaccgaacagggcgggggtggcgcaggcggcagcaacagcagtggcagcggcgcggaagagaactccaacgcggcagccgcggcaatgcagccggtggaggacatgaacgatcatgccattcgcggcgacacctttgccacacgggctgaggagaagcgcgctgaggccgaagcagcggccgaagctgccgcccccgctgcgcaacccgaggtcgagaagcctcagaagaaaccggtgatcaaacccctgacagaggacagcaagaaacgcagttacaacctaataagcaatgacagcaccttcacccagtaccgcagctggtaccttgcatacaactacggcgaccctcagaccggaatccgctcatggaccctgctttgcactcctgacgtaacctgcggctcggagcaggtctactggtcgttgccagacatgatgcaagaccccgtgaccttccgctccacgcgccagatcagcaactttccggtggtgggcgccgagctgttgcccgtgcactccaagagcttctacaacgaccaggccgtctactcccaactcatccgccagtttacctctctgacccacgtgttcaatcgctttcccgagaaccagattttggcgcgcccgccagcccccaccatcaccaccgtcagtgaaaacgttcctgctctcacagatcacgggacgctaccgctgcgcaacagcatcggaggagtccagcgagtgaccattactgacgccagacgccgcacctgcccctacgtttacaaggccctgggcatagtctcgccgcgcgtcctatcgagccgcactttttgagcaagcatgtccatccttatatcgcccagcaataacacaggctggggcctgcgcttcccaagcaagatgtttggcggggccaagaagcgctccgaccaacacccagtgcgcgtgcgcgggcactaccgcgcgccctggggcgcgcacaaacgcggccgcactgggcgcaccaccgtcgatgacgccatcgacgcggtggtggaggaggcgcgcaactacacgcccacgccgccaccagtgtccacagtggacgcggccattcagaccgtggtgcgcggagcccggcgctatgctaaaatgaagagacggcggaggcgcgtagcacgtcgccaccgccgccgacccggcactgccgcccaacgcgcggcggcggccctgcttaaccgcgcacgtcgcaccggccgacgggcggccatgcgggccgctcgaaggctggccgcgggtattgtcactgtgccccccaggtccaggcgacgagcggccgccgcagcagccgcggccattagtgctatgactcagggtcgcaggggcaacgtgtattgggtgcgcgactcggttagcggcctgcgcgtgcccgtgcgcacccgccccccgcgcaactagattgcaagaaaaaactacttagactcgtactgttgtatgtatccagcggcggcggcgcgcaacgaagctatgtccaagcgcaaaatcaaagaagagatgctccaggtcatcgcgccggagatctatggccccccgaagaaggaagagcaggattacaagccccgaaagctaaagcgggtcaaaaagaaaaagaaagatgatgatgatgaacttgacgacgaggtggaactgctgcacgctaccgcgcccaggcgacgggtacagtggaaaggtcgacgcgtaaaacgtgttttgcgacccggcaccaccgtagtctttacgcccggtgagcgctccacccgcacctacaagcgcgtgtatgatgaggtgtacggcgacgaggacctgcttgagcaggccaacgagcgcctcggggagtttgcctacggaaagcggcataaggacatgctggcgttgccgctggacgagggcaacccaacacctagcctaaagcccgtaacactgcagcaggtgctgcccgcgcttgcaccgtccgaagaaaagcgcggcctaaagcgcgagtctggtgacttggcacccaccgtgcagctgatggtacccaagcgccagcgactggaagatgtcttggaaaaaatgaccgtggaacctgggctggagcccgaggtccgcgtgcggccaatcaagcaggtggcgccgggactgggcgtgcagaccgtggacgttcagatacccactaccagtagcaccagtattgccaccgccacagagggcatggagacacaaacgtccccggttgcctcagcggtggcggatgccgcggtgcaggcggtcgctgcggccgcgtccaagacctctacggaggtgcaaacggacccgtggatgtttcgcgtttcagccccccggcgcccgcgcggttcgaggaagtacggcgccgccagcgcgctactgcccgaatatgccctacatccttccattgcgcctacccccggctatcgtggctacacctaccgccccagaagacgagcaactacccgacgccgaaccaccactggaacccgccgccgccgtcgccgtcgccagcccgtgctggccccgatttccgtgcgcagggtggctcgcgaaggaggcaggaccctggtgctgccaacagcgcgctaccaccccagcatcgtttaaaagccggtctttgtggttcttgcagatatggccctcacctgccgcctccgtttcccggtgccgggattccgaggaagaatgcaccgtaggaggggcatggccggccacggcctgacgggcggcatgcgtcgtgcgcaccaccggcggcggcgcgcgtcgcaccgtcgcatgcgcggcggtatcctgcccctccttattccactgatcgccgcggcgattggcgccgtgcccggaattgcatccgtggccttgcaggcgcagagacactgattaaaaacaagttgcatgtggaaaaatcaaaataaaaagtctggactctcacgctcgcttggtcctgtaactattttgtagaatggaagacatcaactttgcgtctctggccccgcgacacggctcgcgcccgttcatgggaaactggcaagatatcggcaccagcaatatgagcggtggcgccttcagctggggctcgctgtggagcggcattaaaaatttcggttccaccgttaagaactatggcagcaaggcctggaacagcagcacaggccagatgctgagggataagttgaaagagcaaaatttccaacaaaaggtggtagatggcctggcctctggcattagcggggtggtggacctggccaaccaggcagtgcaaaataagattaacagtaagcttgatccccgccctcccgtagaggagcctccaccggccgtggagacagtgtctccagaggggcgtggcgaaaagcgtccgcgccccgacagggaagaaactctggtgacgcaaatagacgagcctccctcgtacgaggaggcactaaagcaaggcctgcccaccacccgtcccatcgcgcccatggctaccggagtgctgggccagcacacacccgtaacgctggacctgcctccccccgccgacacccagcagaaacctgtgctgccaggcccgaccgccgttgttgtaacccgtcctagccgcgcgtccctgcgccgcgccgccagcggtccgcgatcgttgcggcccgtagccagtggcaactggcaaagcacactgaacagcatcgtgggtctgggggtgcaatccctgaagcgccgacgatgcttctgaatagctaacgtgtcgtatgtgtgtcatgtatgcgtccatgtcgccgccagaggagctgctgagccgccgcgcgcccgctttccaagatggctaccccttcgatgatgccgcagtggtcttacatgcacatctcgggccaggacgcctcggagtacctgagccccgggctggtgcagtttgcccgcgccaccgagacgtacttcagcctgaataacaagtttagaaaccccacggtggcgcctacgcacgacgtgaccacagaccggtcccagcgtttgacgctgcggttcatccctgtggaccgtgaggatactgcgtactcgtacaaggcgcggttcaccctagctgtgggtgataaccgtgtgctggacatggcttccacgtactttgacatccgcggcgtgctggacaggggccctacttttaagccctactctggcactgcctacaacgccctggctcccaagggtgccccaaatccttgcgaatgggatgaagctgctactgctcttgaaataaacctagaagaagaggacgatgacaacgaagacgaagtagacgagcaagctgagcagcaaaaaactcacgtatttgggcaggcgccttattctggtataaatattacaaaggagggtattcaaataggtgtcgaaggtcaaacacctaaatatgccgataaaacatttcaacctgaacctcaaataggagaatctcagtggtacgaaactgaaattaatcatgcagctgggagagtccttaaaaagactaccccaatgaaaccatgttacggttcatatgcaaaacccacaaatgaaaatggagggcaaggcattcttgtaaagcaacaaaatggaaagctagaaagtcaagtggaaatgcaatttttctcaactactgaggcgaccgcaggcaatggtgataacttgactcctaaagtggtattgtacagtgaagatgtagatatagaaaccccagacactcatatttcttacatgcccactattaaggaaggtaactcacgagaactaatgggccaacaatctatgcccaacaggcctaattacattgcttttagggacaattttattggtctaatgtattacaacagcacgggtaatatgggtgttctggcgggccaagcatcgcagttgaatgctgttgtagatttgcaagacagaaacacagagctttcataccagcttttgcttgattccattggtgatagaaccaggtacttttctatgtggaatcaggctgttgacagctatgatccagatgttagaattattgaaaatcatggaactgaagatgaacttccaaattactgctttccactgggaggtgtgattaatacagagactcttaccaaggtaaaacctaaaacaggtcaggaaaatggatgggaaaaagatgctacagaattttcagataaaaatgaaataagagttggaaataattttgccatggaaatcaatctaaatgccaacctgtggagaaatttcctgtactccaacatagcgctgtatttgcccgacaagctaaagtacagtccttccaacgtaaaaatttctgataacccaaacacctacgactacatgaacaagcgagtggtggctcccgggttagtggactgctacattaaccttggagcacgctggtcccttgactatatggacaacgtcaacccatttaaccaccaccgcaatgctggcctgcgctaccgctcaatgttgctgggcaatggtcgctatgtgcccttccacatccaggtgcctcagaagttctttgccattaaaaacctccttctcctgccgggctcatacacctacgagtggaacttcaggaaggatgttaacatggttctgcagagctccctaggaaatgacctaagggttgacggagccagcattaagtttgatagcatttgcctttacgccaccttcttccccatggcccacaacaccgcctccacgcttgaggccatgcttagaaacgacaccaacgaccagtcctttaacgactatctctccgccgccaacatgctctaccctatacccgccaacgctaccaacgtgcccatatccatcccctcccgcaactgggcggctttccgcggctgggccttcacgcgccttaagactaaggaaaccccatcactgggctcgggctacgacccttattacacctactctggctctataccctacctagatggaaccttttacctcaaccacacctttaagaaggtggccattacctttgactcttctgtcagctggcctggcaatgaccgcctgcttacccccaacgagtttgaaattaagcgctcagttgacggggagggttacaacgttgcccagtgtaacatgaccaaagactggttcctggtacaaatgctagctaactacaacattggctaccagggcttctatatcccagagagctacaaggaccgcatgtactccttctttagaaacttccagcccatgagccgtcaggtggtggatgatactaaatacaaggactaccaacaggtgggcatcctacaccaacacaacaactctggatttgttggctaccttgcccccaccatgcgcgaaggacaggcctaccctgctaacttcccctatccgcttataggcaagaccgcagttgacagcattacccagaaaaagtttctttgcgatcgcaccctttggcgcatcccattctccagtaactttatgtccatgggcgcactcacagacctgggccaaaaccttctctacgccaactccgcccacgcgctagacatgacttttgaggtggatcccatggacgagcccacccttctttatgttttgtttgaagtctttgacgtggtccgtgtgcaccggccgcaccgcggcgtcatcgaaaccgtgtacctgcgcacgcccttctcggccggcaacgccacaacataaagaagcaagcaacatcaacaacagctgccgccatgggctccagtgagcaggaactgaaagccattgtcaaagatcttggttgtgggccatattttttgggcacctatgacaagcgctttccaggctttgtttctccacacaagctcgcctgcgccatagtcaatacggccggtcgcgagactgggggcgtacactggatggcctttgcctggaacccgcactcaaaaacatgctacctctttgagccctttggcttttctgaccagcgactcaagcaggtttaccagtttgagtacgagtcactcctgcgccgtagcgccattgcttcttcccccgaccgctgtataacgctggaaaagtccacccaaagcgtacaggggcccaactcggccgcctgtggactattctgctgcatgtttctccacgcctttgccaactggccccaaactcccatggatcacaaccccaccatgaaccttattaccggggtacccaactccatgctcaacagtccccaggtacagcccaccctgcgtcgcaaccaggaacagctctacagcttcctggagcgccactcgccctacttccgcagccacagtgcgcagattaggagcgccacttctttttgtcacttgaaaaacatgtaaaaataatgtactagagacactttcaataaaggcaaatgcttttatttgtacactctcgggtgattatttacccccacccttgccgtctgcgccgtttaaaaatcaaaggggttctgccgcgcatcgctatgcgccactggcagggacacgttgcgatactggtgtttagtgctccacttaaactcaggcacaaccatccgcggcagctcggtgaagttttcactccacaggctgcgcaccatcaccaacgcgtttagcaggtcgggcgccgatatcttgaagtcgcagttggggcctccgccctgcgcgcgcgagttgcgatacacagggttgcagcactggaacactatcagcgccgggtggtgcacgctggccagcacgctcttgtcggagatcagatccgcgtccaggtcctccgcgttgctcagggcgaacggagtcaactttggtagctgccttcccaaaaagggcgcgtgcccaggctttgagttgcactcgcaccgtagtggcatcaaaaggtgaccgtgcccggtctgggcgttaggatacagcgcctgcataaaagccttgatctgcttaaaagccacctgagcctttgcgccttcagagaagaacatgccgcaagacttgccggaaaactgattggccggacaggccgcgtcgtgcacgcagcaccttgcgtcggtgttggagatctgcaccacatttcggccccaccggttcttcacgatcttggccttgctagactgctccttcagcgcgcgctgcccgttttcgctcgtcacatccatttcaatcacgtgctccttatttatcataatgcttccgtgtagacacttaagctcgccttcgatctcagcgcagcggtgcagccacaacgcgcagcccgtgggctcgtgatgcttgtaggtcacctctgcaaacgactgcaggtacgcctgcaggaatcgccccatcatcgtcacaaaggtcttgttgctggtgaaggtcagctgcaacccgcggtgctcctcgttcagccaggtcttgcatacggccgccagagcttccacttggtcaggcagtagtttgaagttcgcctttagatcgttatccacgtggtacttgtccatcagcgcgcgcgcagcctccatgcccttctcccacgcagacacgatcggcacactcagcgggttcatcaccgtaatttcactttccgcttcgctgggctcttcctcttcctcttgcgtccgcataccacgcgccactgggtcgtcttcattcagccgccgcactgtgcgcttacctcctttgccatgcttgattagcaccggtgggttgctgaaacccaccatttgtagcgccacatcttctctttcttcctcgctgtccacgattacctctggtgatggcgggcgctcgggcttgggagaagggcgcttctttttcttcttgggcgcaatggccaaatccgccgccgaggtcgatggccgcgggctgggtgtgcgcggcaccagcgcgtcttgtgatgagtcttcctcgtcctcggactcgatacgccgcctcatccgcttttttgggggcgcccggggaggcggcggcgacggggacggggacgacacgtcctccatggttgggggacgtcgcgccgcaccgcgtccgcgctcgggggtggtttcgcgctgctcctcttcccgactggccat

SEQ ID NO: 33 - DNA, 3666 bp, Human adenovirus
  misc_feature 1..3666: note = Ad5 E3; 27174 - 30839
  source 1..3666: mol_type = genomic DNA
atgagcaaggaaattcccacgccctacatgtggagttaccagccacaaatgggacttgcggctggagctgcccaagactactcaacccgaataaactacatgagcgcgggaccccacatgatatcccgggtcaacggaatccgcgcccaccgaaaccgaattctcttggaacaggcggctattaccaccacacctcgtaataaccttaatccccgtagttggcccgctgccctggtgtaccaggaaagtcccgctcccaccactgtggtacttcccagagacgcccaggccgaagttcagatgactaactcaggggcgcagcttgcgggcggctttcgtcacagggtgcggtcgcccgggcagggtataactcacctgacaatcagagggcgaggtattcagctcaacgacgagtcggtgagctcctcgcttggtctccgtccggacgggacatttcagatcggcggcgccggccgtccttcattcacgcctcgtcaggcaatcctaactctgcagacctcgtcctctgagccgcgctctggaggcattggaactctgcaatttattgaggagtttgtgccatcggtctactttaaccccttctcgggacctcccggccactatccggatcaatttattcctaactttgacgcggtaaaggactcggcggacggctacgactgaatgttaagtggagaggcagagcaactgcgcctgaaacacctggtccactgtcgccgccacaagtgctttgcccgcgactccggtgagttttgctactttgaattgcccgaggatcatatcgagggcccggcgcacggcgtccggcttaccgcccagggagagcttgcccgtagcctgattcgggagtttacccagcgccccctgctagttgagcgggacaggggaccctgtgttctcactgtgatttgcaactgtcctaaccttggattacatcaagatctttgttgccatctctgtgctgagtataataaatacagaaattaaaatatactggggctcctatcgccatcctgtaaacgccaccgtcttcacccgcccaagcaaaccaaggcgaaccttacctggtacttttaacatctctccctctgtgatttacaacagtttcaacccagacggagtgagtctacgagagaacctctccgagctcagctactccatcagaaaaaacaccaccctccttacctgccgggaacgtacgagtgcgtcaccggccgctgcaccacacctaccgcctgaccgtaaaccagactttttccggacagacctcaataactctgtttaccagaacaggaggtgagcttagaaaacccttagggtattaggccaaaggcgcagctactgtggggtttatgaacaattcaagcaactctacgggctattctaattcaggtttctctagaatcggggttggggttattctctgtcttgtgattctctttattcttatactaacgcttctctgcctaaggctcgccgcctgctgtgtgcacatttgcatttattgtcagctttttaaacgctggggtcgccacccaagatgattaggtacataatcctaggtttactcacccttgcgtcagcccacggtaccacccaaaaggtggattttaaggagccagcctgtaatgttacattcgcagctgaagctaatgagtgcaccactcttataaaatgcaccacagaacatgaaaagctgcttattcgccacaaaaacaaaattggcaagtatgctgtttatgctatttggcagccaggtgacactacagagtataatgttacagttttccagggtaaaagtcataaaacttttatgtatacttttccattttatgaaatgtgcgacattaccatgtacatgagcaaacagtataagttgtggcccccacaaaattgtgtggaaaacactggcactttctgctgcactgctatgctaattacagtgctcgctttggtctgtaccctactctatattaaatacaaaagcagacgcagctttattgaggaaaagaaaatgccttaatttactaagttacaaagctaatgtcaccactaactgctttactcgctgcttgcaaaacaaattcaaaaagttagcattataattagaataggatttaaaccccccggtcatttcctgctcaataccattcccctgaacaattgactctatgtgggatatgctccagcgctacaaccttgaagtcaggcttcctggatgtcagcatctgactttggccagcacctgtcccgcggatttgttccagtccaactacagcgacccaccctaacagagatgaccaacacaaccaacgcggccgccgctaccggacttacatctaccacaaatacaccccaagtttctgcctttgtcaataactgggataacttgggcatgtggtggttctccatagcgcttatgtttgtatgccttattattatgtggctcatctgctgcctaaagcgcaaacgcgcccgaccacccatctatagtcccatcattgtgctacacccaaacaatgatggaatccatagattggacggactgaaacacatgttcttttctcttacagtatgattaaatgagacatgattcctcgagtttttatattactgacccttgttgcgcttttttgtgcgtgctccacattggctgcggtttctcacatcgaagtagactgcattccagccttcacagtctatttgctttacggatttgtcaccctcacgctcatctgcagcctcatcactgtggtcatcgcctttatccagtgcattgactgggtctgtgtgcgctttgcatatctcagacaccatccccagtacagggacaggactatagctgagcttcttagaattctttaattatgaaatttactgtgacttttctgctgattatttgcaccctatctgcgttttgttccccgacctccaagcctcaaagacatatatcatgcagattcactcgtatatggaatattccaagttgctacaatgaaaaaagcgatctttccgaagcctggttatatgcaatcatctctgttatggtgttctgcagtaccatcttagccctagctatatatccctaccttgacattggctggaaacgaatagatgccatgaaccacccaactttccccgcgcccgctatgcttccactgcaacaagttgttgccggcggctttgtcccagccaatcagcctcgccccacttctcccacccccactgaaatcagctactttaatctaacaggaggagatgactgacaccctagatctagaaatggacggaattattacagagcagcgcctgctagaaagacgcagggcagcggccgagcaacagcgcatgaatcaagagctccaagacatggttaacttgcaccagtgcaaaaggggtatcttttgtctggtaaagcaggccaaagtcacctacgacagtaataccaccggacaccgccttagctacaagttgccaaccaagcgtcagaaattggtggtcatggtgggagaaaagcccattaccataactcagcactcggtagaaaccgaaggctgcattcactcaccttgtcaaggacctgaggatctctgcacccttattaagaccctgtgcggtctcaaagatcttattccctttaactaa

SEQ ID NO: 34 - DNA, 1746 bp, Human adenovirus
  misc_feature 1..1746: note = Ad5 fiber; 31042 - 32787
  source 1..1746: mol_type = genomic DNA
atgaagcgcgcaagaccgtctgaagataccttcaaccccgtgtatccatatgacacggaaaccggtcctccaactgtgccttttcttactcctccctttgtatcccccaatgggtttcaagagagtccccctggggtactctctttgcgcctatccgaacctctagttacctccaatggcatgcttgcgctcaaaatgggcaacggcctctctctggacgaggccggcaaccttacctcccaaaatgtaaccactgtgagcccacctctcaaaaaaaccaagtcaaacataaacctggaaatatctgcacccctcacagttacctcagaagccctaactgtggctgccgccgcacctctaatggtcgcgggcaacacactcaccatgcaatcacaggccccgctaaccgtgcacgactccaaacttagcattgccacccaaggacccctcacagtgtcagaaggaaagctagccctgcaaacatcaggccccctcaccaccaccgatagcagtacccttactatcactgcctcaccccctctaactactgccactggtagcttgggcattgacttgaaagagcccatttatacacaaaatggaaaactaggactaaagtacggggctcctttgcatgtaacagacgacctaaacactttgaccgtagcaactggtccaggtgtgactattaataatacttccttgcaaactaaagttactggagccttgggttttgattcacaaggcaatatgcaacttaatgtagcaggaggactaaggattgattctcaaaacagacgccttatacttgatgttagttatccgtttgatgctcaaaaccaactaaatctaagactaggacagggccctctttttataaactcagcccacaacttggatattaactacaacaaaggcctttacttgtttacagcttcaaacaattccaaaaagcttgaggttaacctaagcactgccaaggggttgatgtttgacgctacagccatagccattaatgcaggagatgggcttgaatttggttcacctaatgcaccaaacacaaatcccctcaaaacaaaaattggccatggcctagaatttgattcaaacaaggctatggttcctaaactaggaactggccttagttttgacagcacaggtgccattacagtaggaaacaaaaataatgataagctaactttgtggaccacaccagctccatctcctaactgtagactaaatgcagagaaagatgctaaactcactttggtcttaacaaaatgtggcagtcaaatacttgctacagtttcagttttggctgttaaaggcagtttggctccaatatctggaacagttcaaagtgctcatcttattataagatttgacgaaaatggagtgctactaaacaattccttcctggacccagaatattggaactttagaaatggagatcttactgaaggcacagcctatacaaacgctgttggatttatgcctaacctatcagcttatccaaaatctcacggtaaaactgccaaaagtaacattgtcagtcaagtttacttaaacggagacaaaactaaacctgtaacactaaccattacactaaacggtacacaggaaacaggagacacaactccaagtgcatactctatgtcattttcatgggactggtctggccacaactacattaatgaaatatttgccacatcctcttacactttttcatacattgcccaagaataa

SEQ ID NO: 35 - DNA, 129 bp, Human adenovirus
  misc_feature 1..129: note = Ad5 fiber tail; 31042 - 31170
  source 1..129: mol_type = genomic DNA
atgaagcgcgcaagaccgtctgaagataccttcaaccccgtgtatccatatgacacggaaaccggtcctccaactgtgccttttcttactcctccctttgtatcccccaatgggtttcaagagagtccc

SEQ ID NO: 36 - DNA, 1071 bp, Human adenovirus
  misc_feature 1..1071: note = Ad5 fiber shaft; 31171 - 32241
  source 1..1071: mol_type = genomic DNA
cctggggtactctctttgcgcctatccgaacctctagttacctccaatggcatgcttgcgctcaaaatgggcaacggcctctctctggacgaggccggcaaccttacctcccaaaatgtaaccactgtgagcccacctctcaaaaaaaccaagtcaaacataaacctggaaatatctgcacccctcacagttacctcagaagccctaactgtggctgccgccgcacctctaatggtcgcgggcaacacactcaccatgcaatcacaggccccgctaaccgtgcacgactccaaacttagcattgccacccaaggacccctcacagtgtcagaaggaaagctagccctgcaaacatcaggccccctcaccaccaccgatagcagtacccttactatcactgcctcaccccctctaactactgccactggtagcttgggcattgacttgaaagagcccatttatacacaaaatggaaaactaggactaaagtacggggctcctttgcatgtaacagacgacctaaacactttgaccgtagcaactggtccaggtgtgactattaataatacttccttgcaaactaaagttactggagccttgggttttgattcacaaggcaatatgcaacttaatgtagcaggaggactaaggattgattctcaaaacagacgccttatacttgatgttagttatccgtttgatgctcaaaaccaactaaatctaagactaggacagggccctctttttataaactcagcccacaacttggatattaactacaacaaaggcctttacttgtttacagcttcaaacaattccaaaaagcttgaggttaacctaagcactgccaaggggttgatgtttgacgctacagccatagccattaatgcaggagatgggcttgaatttggttcacctaatgcaccaaacacaaatcccctcaaaacaaaaattggccatggcctagaatttgattcaaacaaggctatggttcctaaactaggaactggccttagttttgacagcacaggtgccattacagtaggaaacaaaaataatgataagctaact

SEQ ID NO: 37 - DNA, 543 bp, Human adenovirus
  misc_feature 1..543: note = Ad5 fiber knob; 32242 - 32784
  source 1..543: mol_type = genomic DNA
ttgtggaccacaccagctccatctcctaactgtagactaaatgcagagaaagatgctaaactcactttggtcttaacaaaatgtggcagtcaaatacttgctacagtttcagttttggctgttaaaggcagtttggctccaatatctggaacagttcaaagtgctcatcttattataagatttgacgaaaatggagtgctactaaacaattccttcctggacccagaatattggaactttagaaatggagatcttactgaaggcacagcctatacaaacgctgttggatttatgcctaacctatcagcttatccaaaatctcacggtaaaactgccaaaagtaacattgtcagtcaagtttacttaaacggagacaaaactaaacctgtaacactaaccattacactaaacggtacacaggaaacaggagacacaactccaagtgcatactctatgtcattttcatgggactggtctggccacaactacattaatgaaatatttgccacatcctcttacactttttcatacattgcccaagaa

SEQ ID NO: 38 - DNA, 1716 bp, Human adenovirus
  misc_feature 1..1716: note = Ad5 penton; 14156 - 15871
  source 1..1716: mol_type = genomic DNA
atgcggcgcgcggcgatgtatgaggaaggtcctcctccctcctacgagagtgtggtgagcgcggcgccagtggcggcggcgctgggttctcccttcgatgctcccctggacccgccgtttgtgcctccgcggtacctgcggcctaccggggggagaaacagcatccgttactctgagttggcacccctattcgacaccacccgtgtgtacctggtggacaacaagtcaacggatgtggcatccctgaactaccagaacgaccacagcaactttctgaccacggtcattcaaaacaatgactacagcccgggggaggcaagcacacagaccatcaatcttgacgaccggtcgcactggggcggcgacctgaaaaccatcctgcataccaacatgccaaatgtgaacgagttcatgtttaccaataagtttaaggcgcgggtgatggtgtcgcgcttgcctactaaggacaatcaggtggagctgaaatacgagtgggtggagttcacgctgcccgagggcaactactccgagaccatgaccatagaccttatgaacaacgcgatcgtggagcactacttgaaagtgggcagacagaacggggttctggaaagcgacatcggggtaaagtttgacacccgcaacttcagactggggtttgaccccgtcactggtcttgtcatgcctggggtatatacaaacgaagccttccatccagacatcattttgctgccaggatgcggggtggacttcacccacagccgcctgagcaacttgttgggcatccgcaagcggcaacccttccaggagggctttaggatcacctacgatgatctggagggtggtaacattcccgcactgttggatgtggacgcctaccaggcgagcttgaaagatgacaccgaacagggcgggggtggcgcaggcggcagcaacagcagtggcagcggcgcggaagagaactccaacgcggcagccgcggcaatgcagccggtggaggacatgaacgatcatgccattcgcggcgacacctttgccacacgggctgaggagaagcgcgctgaggccgaagcagcggccgaagctgccgcccccgctgcgcaacccgaggtcgagaagcctcagaagaaaccggtgatcaaacccctgacagaggacagcaagaaacgcagttacaacctaataagcaatgacagcaccttcacccagtaccgcagctggtaccttgcatacaactacggcgaccctcagaccggaatccgctcatggaccctgctttgcactcctgacgtaacctgcggctcggagcaggtctactggtcgttgccagacatgatgcaagaccccgtgaccttccgctccacgcgccagatcagcaactttccggtggtgggcgccgagctgttgcccgtgcactccaagagcttctacaacgaccaggccgtctactcccaactcatccgccagtttacctctctgacccacgtgttcaatcgctttcccgagaaccagattttggcgcgcccgccagcccccaccatcaccaccgtcagtgaaaacgttcctgctctcacagatcacgggacgctaccgctgcgcaacagcatcggaggagtccagcgagtgaccattactgacgccagacgccgcacctgcccctacgtttacaaggccctgggcatagtctcgccgcgcgtcctatcgagccgcactttttga

SEQ ID NO: 39 - DNA, 2859 bp, Human adenovirus
  misc_feature 1..2859: note = Ad5 hexon; 18842 - 21700
  source 1..2859: mol_type = genomic DNA
atggctaccccttcgatgatgccgcagtggtcttacatgcacatctcgggccaggacgcctcggagtacctgagccccgggctggtgcagtttgcccgcgccaccgagacgtacttcagcctgaataacaagtttagaaaccccacggtggcgcctacgcacgacgtgaccacagaccggtcccagcgtttgacgctgcggttcatccctgtggaccgtgaggatactgcgtactcgtacaaggcgcggttcaccctagctgtgggtgataaccgtgtgctggacatggcttccacgtactttgacatccgcggcgtgctggacaggggccctacttttaagccctactctggcactgcctacaacgccctggctcccaagggtgccccaaatccttgcgaatgggatgaagctgctactgctcttgaaataaacctagaagaagaggacgatgacaacgaagacgaagtagacgagcaagctgagcagcaaaaaactcacgtatttgggcaggcgccttattctggtataaatattacaaaggagggtattcaaataggtgtcgaaggtcaaacacctaaatatgccgataaaacatttcaacctgaacctcaaataggagaatctcagtggtacgaaactgaaattaatcatgcagctgggagagtccttaaaaagactaccccaatgaaaccatgttacggttcatatgcaaaacccacaaatgaaaatggagggcaaggcattcttgtaaagcaacaaaatggaaagctagaaagtcaagtggaaatgcaatttttctcaactactgaggcgaccgcaggcaatggtgataacttgactcctaaagtggtattgtacagtgaagatgtagatatagaaaccccagacactcatatttcttacatgcccactattaaggaaggtaactcacgagaactaatgggccaacaatctatgcccaacaggcctaattacattgcttttagggacaattttattggtctaatgtattacaacagcacgggtaatatgggtgttctggcgggccaagcatcgcagttgaatgctgttgtagatttgcaagacagaaacacagagctttcataccagcttttgcttgattccattggtgatagaaccaggtacttttctatgtggaatcaggctgttgacagctatgatccagatgttagaattattgaaaatcatggaactgaagatgaacttccaaattactgctttccactgggaggtgtgattaatacagagactcttaccaaggtaaaacctaaaacaggtcaggaaaatggatgggaaaaagatgctacagaattttcagataaaaatgaaataagagttggaaataattttgccatggaaatcaatctaaatgccaacctgtggagaaatttcctgtactccaacatagcgctgtatttgcccgacaagctaaagtacagtccttccaacgtaaaaatttctgataacccaaacacctacgactacatgaacaagcgagtggtggctcccgggttagtggactgctacattaaccttggagcacgctggtcccttgactatatggacaacgtcaacccatttaaccaccaccgcaatgctggcctgcgctaccgctcaatgttgctgggcaatggtcgctatgtgcccttccacatccaggtgcctcagaagttctttgccattaaaaacctccttctcctgccgggctcatacacctacgagtggaacttcaggaaggatgttaacatggttctgcagagctccctaggaaatgacctaagggttgacggagccagcattaagtttgatagcatttgcctttacgccaccttcttccccatggcccacaacaccgcctccacgcttgaggccatgcttagaaacgacaccaacgaccagtcctttaacgactatctctccgccgccaacatgctctaccctatacccgccaacgctaccaacgtgcccatatccatcccctcccgcaactgggcggctttccgcggctgggccttcacgcgccttaagactaaggaaaccccatcactgggctcgggctacgacccttattacacctactctggctctataccctacctagatggaaccttttacctcaaccacacctttaagaaggtggccattacctttgactcttctgtcagctggcctggcaatgaccgcctgcttacccccaacgagtttgaaattaagcgctcagttgacggggagggttacaacgttgcccagtgtaacatgaccaaagactggttcctggtacaaatgctagctaactacaacattggctaccagggcttctatatcccagagagctacaaggaccgcatgtactccttctttagaaacttccagcccatgagccgtcaggtggtggatgatactaaatacaaggactaccaacaggtgggcatcctacaccaacacaacaactctggatttgttggctaccttgcccccaccatgcgcgaaggacaggcctaccctgctaacttcccctatccgcttataggcaagaccgcagttgacagcattacccagaaaaagtttctttgcgatcgcaccctttggcgcatcccattctccagtaactttatgtccatgggcgcactcacagacctgggccaaaaccttctctacgccaactccgcccacgcgctagacatgacttttgaggtggatcccatggacgagcccacccttctttatgttttgtttgaagtctttgacgtggtccgtgtgcaccggccgcaccgcggcgtcatcgaaaccgtgtacctgcgcacgcccttctcggccggcaacgccacaacataa

SEQ ID NO: 40 - protein, 581 aa, Human adenovirus
  REGION 1..581: note = misc_feature - Ad5 fiber; 1 581 (GenBank accession no. AP_000226); Human adenovirus 5
MKRARPSEDTFNPVYPYDTETGPPTVPFLTPPFVSPNGFQESPPGVLSLRLSEPLVTSNGMLALKMGNGLSLDEAGNLTSQNVTTVSPPLKKTKSNINLEISAPLTVTSEALTVAAAAPLMVAGNTLTMQSQAPLTVHDSKLSIATQGPLTVSEGKLALQTSGPLTTTDSSTLTITASPPLTTATGSLGIDLKEPIYTQNGKLGLKYGAPLHVTDDLNTLTVATGPGVTINNTSLQTKVTGALGFDSQGNMQLNVAGGLRIDSQNRRLILDVSYPFDAQNQLNLRLGQGPLFINSAHNLDINYNKGLYLFTASNNSKKLEVNLSTAKGLMFDATAIAINAGDGLEFGSPNAPNTNPLKTKIGHGLEFDSNKAMVPKLGTGLSFDSTGAITVGNKNNDKLTLWTTPAPSPNCRLNAEKDAKLTLVLTKCGSQILATVSVLAVKGSLAPISGTVQSAHLIIRFDENGVLLNNSFLDPEYWNFRNGDLTEGTAYTNAVGFMPNLSAYPKSHGKTAKSNIVSQVYLNGDKTKPVTLTITLNGTQETGDTTPSAYSMSFSWDWSGHNYINEIFATSSYTFSYIAQE

SEQ ID NO: 41 - protein, 357 aa, Human adenovirus
  REGION 1..357: note = misc_feature - Ad5 fiber shaft; 44 400 (GenBank accession no. AP_000226); Human adenovirus 5
PGVLSLRLSEPLVTSNGMLALKMGNGLSLDEAGNLTSQNVTTVSPPLKKTKSNINLEISAPLTVTSEALTVAAAAPLMVAGNTLTMQSQAPLTVHDSKLSIATQGPLTVSEGKLALQTSGPLTTTDSSTLTITASPPLTTATGSLGIDLKEPIYTQNGKLGLKYGAPLHVTDDLNTLTVATGPGVTINNTSLQTKVTGALGFDSQGNMQLNVAGGLRIDSQNRRLILDVSYPFDAQNQLNLRLGQGPLFINSAHNLDINYNKGLYLFTASNNSKKLEVNLSTAKGLMFDATAIAINAGDGLEFGSPNAPNTNPLKTKIGHGLEFDSNKAMVPKLGTGLSFDSTGAITVGNKNNDKLT

SEQ ID NO: 42 - protein, 181 aa, Human adenovirus
  REGION 1..181: note = misc_feature - Ad5 fiber knob; 401 581 (GenBank accession no. AP_000226); Human adenovirus 5
LWTTPAPSPNCRLNAEKDAKLTLVLTKCGSQILATVSVLAVKGSLAPISGTVQSAHLIIRFDENGVLLNNSFLDPEYWNFRNGDLTEGTAYTNAVGFMPNLSAYPKSHGKTAKSNIVSQVYLNGDKTKPVTLTITLNGTQETGDTTPSAYSMSFSWDWSGHNYINEIFATSSYTFSYIAQE

SEQ ID NO: 43 - protein, 571 aa, Human adenovirus
  REGION 1..571: note = misc_feature - Ad5 penton; 1 - 571 (GenBank accession no. AP_000206); Human adenovirus 5
MRRAAMYEEGPPPSYESVVSAAPVAAALGSPFDAPLDPPFVPPRYLRPTGGRNSIRYSELAPLFDTTRVYLVDNKSTDVASLNYQNDHSNFLTTVIQNNDYSPGEASTQTINLDDRSHWGGDLKTILHTNMPNVNEFMFTNKFKARVMVSRLPTKDNQVELKYEWVEFTLPEGNYSETMTIDLMNNAIVEHYLKVGRQNGVLESDIGVKFDTRNFRLGFDPVTGLVMPGVYTNEAFHPDIILLPGCGVDFTHSRLSNLLGIRKRQPFQEGFRITYDDLEGGNIPALLDVDAYQASLKDDTEQGGGGAGGSNSSGSGAEENSNAAAAAMQPVEDMNDHAIRGDTFATRAEEKRAEAEAAAEAAAPAAQPEVEKPQKKPVIKPLTEDSKKRSYNLISNDSTFTQYRSWYLAYNYGDPQTGIRSWTLLCTPDVTCGSEQVYWSLPDMMQDPVTFRSTRQISNFPVVGAELLPVHSKSFYNDQAVYSQLIRQFTSLTHVFNRFPENQILARPPAPTITTVSENVPALTDHGTLPLRNSIGGVQRVTITDARRRTCPYVYKALGIVSPRVLSSRTF

SEQ ID NO: 44 - protein, 952 aa, Human adenovirus
  REGION 1..952: note = misc_feature - Ad5 hexon; 1 952 (GenBank accession no. AP_000211); Human adenovirus 5
MATPSMMPQWSYMHISGQDASEYLSPGLVQFARATETYFSLNNKFRNPTVAPTHDVTTDRSQRLTLRFIPVDREDTAYSYKARFTLAVGDNRVLDMASTYFDIRGVLDRGPTFKPYSGTAYNALAPKGAPNPCEWDEAATALEINLEEEDDDNEDEVDEQAEQQKTHVFGQAPYSGINITKEGIQIGVEGQTPKYADKTFQPEPQIGESQWYETEINHAAGRVLKKTTPMKPCYGSYAKPTNENGGQGILVKQQNGKLESQVEMQFFSTTEATAGNGDNLTPKVVLYSEDVDIETPDTHISYMPTIKEGNSRELMGQQSMPNRPNYIAFRDNFIGLMYYNSTGNMGVLAGQASQLNAVVDLQDRNTELSYQLLLDSIGDRTRYFSMWNQAVDSYDPDVRIIENHGTEDELPNYCFPLGGVINTETLTKVKPKTGQENGWEKDATEFSDKNEIRVGNNFAMEINLNANLWRNFLYSNIALYLPDKLKYSPSNVKISDNPNTYDYMNKRVVAPGLVDCYINLGARWSLDYMDNVNPFNHHRNAGLRYRSMLLGNGRYVPFHIQVPQKFFAIKNLLLLPGSYTYEWNFRKDVNMVLQSSLGNDLRVDGASIKFDSICLYATFFPMAHNTASTLEAMLRNDTNDQSFNDYLSAANMLYPIPANATNVPISIPSRNWAAFRGWAFTRLKTKETPSLGSGYDPYYTYSGSIPYLDGTFYLNHTFKKVAITFDSSVSWPGNDRLLTPNEFEIKRSVDGEGYNVAQCNMTKDWFLVQMLANYNIGYQGFYIPESYKDRMYSFFRNFQPMSRQVVDDTKYKDYQQVGILHQHNNSGFVGYLAPTMREGQAYPANFPYPLIGKTAVDSITQKKFLCDRTLWRIPFSSNFMSMGALTDLGQNLLYANSAHALDMTFEVDPMDEPTLLYVLFEVFDVVRVHRPHRGVIETVYLRTPFSAGNATT

SEQ ID NO: 45 - protein, 43 aa, Human adenovirus
  REGION 1..43: note = misc_feature - Ad5 fiber tail; 1 43 (GenBank accession no. AP_000226); Human adenovirus 5
MKRARPSEDTFNPVYPYDTETGPPTVPFLTPPFVSPNGFQESP

SEQ ID NO: 46 - DNA, 136 bp, Human adenovirus
  misc_feature 1..136: note = Ad7 5' (left) ITR; 1 - 136
  source 1..136: mol_type = genomic DNA
ctctctatttaatataccttatagatggaatggtgccaatatgtaaatgaggtaatttaaaaaagtgcgcgctgtgtggtgattggctgtggggttaacggctaaaatgggcggggcggccgtgggaaaatgacgt

SEQ ID NO: 47 - DNA, 136 bp, Human adenovirus
  misc_feature 1..136: note = Ad7 3' (right) ITR; 35379 - 35514
  source 1..136: mol_type = genomic DNA
acgtcattttcccacggccgccccgcccattttagccgttaaccccacagccaatcaccacacagcgcgcacttttttaaattacctcatttacatattggcaccattccatctataaggtatattatatagagag

SEQ ID NO: 48 - DNA, 343 bp, Human adenovirus
  misc_feature 1..343: note = Ad7 Packaging Sequence; 137 - 479
  source 1..343: mol_type = genomic DNA
gacttatgtgggaggagctatgttgcaagttattgcggtaaatgtgacgtaaaacgaggtgtggtttgaacacggaagtagacagttttcccacgcttactgacaggatatgaggtagttttgggcggatgcaagtaaaaattctccattttcgcgcgaaaactgaatgaggaagtgaatttctgagtcatttcgcggttatgacagggtggagtatttgccgagggccgagtagactttgaccgtttacgtggaggtttcgattaccgtgtttttcacctaaatttccgcgtacggtgtcaaagtcctgtgtttttacgtaggtgtcagctgatcgctaggg

SEQ ID NO: 49 - DNA, 3440 bp, Human adenovirus
  misc_feature 1..3440: note = Ad7 E1; 480 - 3919
  source 1..3440: mol_type = genomic DNA
tatttaaacctgacgagttccgtcaagaggccactcttgagtgccagcgagaagagttttctccttcgcgccgcaagtcagttctgcgctttgaaaatgagacacctgcgtttcctgccacaggagattatcttcagtgagaccgggatcgaaatactggagtttgtggtaaataccctaatgggagacgacccggaaccgccagtgcagcctttcgatccacctacgctgcacgatctgtatgatttagaggtagacgggcctcaggatcccaatgaggaagctgtgaatgggttttttactgattctatgctgctagctgccgatgaaggattggacataaaccctcctcctgagacccttgttaccccaggggtggttgtggaaagcggcagaggtgggaaaaaattgcctgatctgggagcagctgaaatggacttgcgttgttatgaagagggttttcctccgagtgatgatgaagatggggaaactgagcagtccatccataccgcagtgaatgagggagtaaaagctgccagcgatgtttttaagttggactgtccggagctgcctggacatggctgtaagtcttgtgaatttcacaggaataacactggaatgaaagaactattgtgctcgctttgctatatgagaatgcactgccactttatttacagtaagtgtatttaagtgaaatttaaaggaatagtgtagctgtttaataactgttgaatggtagatttatgttttttacttgtgattttttgtaggtcctgtgtctgatgatgagtcaccttctcctgattcaactacctcacctcctgaaattcaggcgcccgcacctgcaaacgtatgcaagcccattcctgtaaagcctaagcctgggaaacgccctgctgtggataagcttgaggacttgttggagggtggggatggacctttggaccttagtacccggaaactgccaaggcaataagtgccctgcagctgtgtttatttaatgtgacgtcatgtaataaaattatgtcagctgctgagtgttttattacttcttgggtggggacttggatatataagtaggagcagatctgtgtggttagctcacagcaacctgctgccatccatggaggtttgggctatcttggaagacctcagacagactaggctactgctagaaaacgcctcggacggagtctctggcctttggagattctggttcggtggtgatctagctaggctagtgtttaggataaaacaggactacagcgtagaatttgaaaagttattggacgacagtccaggactttttgaagctcttaacttgggtcatcaggctcattttaaggagaaggttttatcagttttagatttttctactcctggtagaactgctgctgctgtagcttttcttacttttatattggataaatggatccgccaaactcacttcagcaagggatacgttttggatttcatagcagcagctttgtggagaacatggaaggctcgcaggatgaggacaatcttagattactggccagtgcagcctctaggagtagcagggatactgagacacccaccgaccatgccagcggttctgcaggaggagcagcaggaggacaatccgagagccggcctggaccctccggtggaggagtagctgacctgtttcctgaactgcgacgggtgcttactaggtctacgaccagtggacagaacagaggcattaagagggagaggaatcctagtgggaataattcaagaaccgagttggctttaagtttaatgagccgcaggcgtcctgaaactgtttggtggcatgaggttcagagcgaaggcagggatgaagtttcaatattgcaggagaaatattcactagaacaacttaagacctgttggttggaacctgaggatgattgggaggtggccattaggaattatgctaagatatctctgaggcctgataaacaatatagaattactaagaagattaatattagaaatgcatgctacatatcagggaatggggcagaggttataatagatacacaagataaagcagcttttagatgttgtatgatgggtatgtggccaggggttgtcggcatggaagcagtaacacttatgaatattaggtttagaggggatgggtataatggcattgtatttatggctaacactaagctgattctacatggttgtagcttttttgggtttaataatacgtgtgtagaagcttgggggcaagttagtgtgaggggttgtagtttttatgcatgctggattgcaacatcaggtagggtcaagagtcagttgtctgtgaagaaatgcatgtttgagagatgtaatcttggcatactgaatgaaggtgaagcaaggatccgccactgcgcagctacagaaactggctgcttcattctaataaagggaaatgccagtgtgaagcataatatgatctgtggacattcggatgagaggccttatcagatgctgacctgcgctggtggacattgcaatattcttgctactgtgcatatcgtttcacatgcacgcaagaaatggcctgtatttgaacataatgtgattaccaagtgcaccatgcacataggtggtcgcaggggaatgtttatgccttaccagtgtaacatgaatcatgtgaaggtaatgttggaaccagatgccttttccagagtgagcttaacaggaatctttgatatgaatattcaactatggaagatcctgagatatgatgacactaaaccgagggtgcgcgcatgcgaatgcggaggcaagcatgctagattccagccggtgtgcgtggatgtgactgaagacctgagacccgatcatttggtgcttgcctgcactggagcggagttcggttccagtggtgaagaaactgactaaagtgagtagtgggggcaagatgtggatggggactttcaggttggtaaggtggacagattgggtaaattttgttaatttctgtcttgcagctgccatgagtggaagcgcttcttttgaggggggagtatttagcccttatctgacgggcaggctcccaccatgggcaggagttcgtcagaatgtcatgggatccactgtggatgggagacccgtccagcccgccaattcctcaacgctgacctatgccactttgagttcgtcaccattggatgcagctgcagccgccgccgctactgctgccgccaacactatccttggaatgggctattacggaagcatcgttgccaattccagttcctctaataacccttcaaccctggctgaggacaagctacttgttctgttggctcagctcgaggccttaacccaacgcttaggcgaactgtctaagcaggtggcccagttgcgtgagcaaactgagtctgctgttgctacagcaaagtctaaataaagatctcaaatcaataaataaa

SEQ ID NO: 50 - DNA, 22921 bp, Human adenovirus
  misc_feature 1..22921: note = Ad7 E2; 26867 - 3947
  source 1..22921: mol_type = genomic DNA
tttaagagtcagcgcgcagtacttgttgaagagagcctcggcgtcctcgagagtgcgctgaagttggtcttcgctcttgtgatacaaacaacttctggtgagcgagcgcagagatcggttttttactttcagttcctgctcttgcccccgactctgctggaagatggcatagagggttggaaagatccggttcctcagctctctggtctgcgctggctcgttcgctgtgatcctcagtcctcctcctgctgcacttgttgtagattttctaactgctggttttctggtcaccgttgtcgctgctgtctttttctgtcggggttgccgggacttgctgactgcagtaggggctgtggaggtgacggtagtaatgcaagatattgcgggggaagttcacaccgtggtggaagagcaggtatcgccgggtgaaggatatgttgcccccgcattcatgcaagcaggagatgatagcgtttttatgtccacgccaggacttgtatccctgtcgctccttcttaccggtcttggaagcggtggtcgggtttgggaatcgcccggtctcgtcccatctactgttgggccgccgctggaccccccgacccggagcggagatggtagccgtgctgctgtctggggacttgcttgtctccgccgccgatgacaactgtttggcggcggttgcttcttccacctcctctgcctcctcgtcttcctcctccaaactgtcttcctccaggctgtccacctcctctgcctggctgtcccaatcttccatctcctcctctgcctgactgtcccagtcttcctccatatcctctgggggcgtcagctgcaccttcagcttcttgcttcctcggcgatgggacatcctgggggaaccttgtgttgagctcctcaccggtctgggggtcaaggtagaccccgcttccctttttcagtagaaattcttggcgggatttttggatggcttgcaattgggccagaattgctccctgggtgatgacgcaggctgagagctcgactttgggaggatgtgactggtcctcatagaacctgatctcataggggtggtaatcctcgggatgaaacttgcgcaggtaggcggaggtccacagccccggtgtcagtttcagactctgccccggagaagacccctcgccttcactgctgggaccctgcaactcgaaggtgccgatgatctgggtctcgctcagcaactgggggttgcaggcaagggagcggtggggtgtgcaaagattgcagcggcagtggcattccagcagaccgtctccgctcacatcctctataacatccgagtggtaggagaggtagttggccaggcggaacaggtagcagtggctccatagcggcggtgggcactcgcggtaggtgagaggcacaaagtcggagggcagcgcacagcaggtggcaggcaggataccggagcgttccaggatgaaagagcgaaagttgttaagcatgctctggctcataaagtctggcaggccgtttcgcagagtaaccctgagacgctcggggaagatgatgtctgccaggtccgaggcgacggtgcgctcatcaaaacctgtccacagggctttgagggatctctgcaagagcttgtccagctcttttaggttctgctcttccaaacactgttgccacacacccatgccagtctgccaggtatggcagaggtagaggtagacacagtctcggatgtagtcacggcgggcctcccctttaagggtggtgtgcaggacgctctgccctagccggttctcatgcaaaatgcccatgtaagaaaccaggttggtaagctccacgttggagatcttgcatgcctgccgcacgaagccatgtctaaaggtgtagtgcaggttctcctctagcttgcgcagggtctcggggtcggtgaaaaagcggcgcaaacactccagctccacagttactagcactacagccatcataagcttgcgcctctcttccaaatctcggggggagttggtacccagccagcgagatagctgctcgtcactgactaccggcttgccctcgtccgaggcgtctggatcctgcatgttctggttttctgaaagtggacctgctcgtttgatgagcagatggtccataacagcgctcataactttggggggcaggttaacagcggggtaggcaaaatgggtgaccacgatactgcgcttgagcactgcaagccgggcattgtcaccctccagttccactaaagcgctgtgatgttcatccatgccattctctccctgttgcagagcatttgcggcccgagtctcatcacttcccagaccctcaaagatttttggaacctcttccaaggaagctatatcaggtaagcgagctcccggacccaagttgagaagggcatcggcgcgggtgcggttggcgcggcaggagactggaatcttttggttcttaaaaaagatgtggtaggtggccagcacttcggggacagtaaaagctggatagaagttcagtcgagggttggcctcgcaggtgccgtttggctgccgcttggggggtatgtgaggcgaaaagaggttcagctcgtaggcgcggctaagctcttccacactgatgggcacttcggtgaggtcgagtagtgcgtctttaactatgttcgactgccttgctagatgtttgaggagcacgtcttcccccccaagcccggtgaggtagtcggcaacttgatccccgatgccagcctcctggtgatcgccatctgcttgatgctctgggcggtcgtcatcctctctgtctataaaacgtttcagctcctcctcgtgctccgccggtgtcacatagcccgggtcctgctcgacatctgcctcaatctcttccgctttcacattatcctgcgcctgcatctcctgggctgcgtcgacctcctcctcctcatcatcgagggtagaggtggtggtagctggactgggtggtggggtggttaagctctcctcctcgtcgctgctgggggcgaggtgtgatggcgcttgcagcgatgttggcagtgatggctgagtttccatgtctgttgtttctctgcctaggagaacacaatggccagccgcggaggaaatcagtcaagcgaccgccaacgggagcacacccccgaacgcggaatgggctctgccagccatccgcttccaaggccagaccgcagcccatctcagtcgcctccacctctgcccccgaagaggaacacctaccgtcgcgtggggtccgattcttctatcgagagccaggtggtactggtaagcgaaacttcgcggtcatccctgtctccggaacggagcaacagtcctcccccgatccctcccaagaagaagcccagaaagaccaagcatgtccctctgcaagacatcggccacgacagcgaagaagaaagagaacaggctcagttggtggccgtgggcttcagctaccccccggtgcgcatcattgagaaggatggcaagagaagtgttgagaagatcgacaagaatgaccctatagctaaaggagctacttctattgctgttaggaatcctttgagcttgcccctggtatctgcctgggagaagggcatggaagtgatggctgtgctaatggagaggtacaggctggataatgacctgagaacctctttcaagctgatgccagagcagcacgagcagtacaagcgtatctgccaccagtatgtgaacgaggagcaccgtggcatcccgctgacatttagtagcatgaagaccctgacagcgatgatgggaagattcatgcagggattggtacattcttattctgagatcgcccacaatagttgggagtgcaccgggtgcgctctgtgggctcatggatgcaccgattatgaaggcaaggtgaaatgcctgcatggcactatcatgattcagaaggaccacattatcgagatggatgtggcgagcgagaacggacagcgcgctatgaaggagaacccagacagagccaagatcacccagaaccgctggggcagaaatgtggtccagttggccaacaacgatgcccgctgctgtgtaaatgatgccaactgtgctactaatcaattttccagcaagtcctgtgggatgttctataccgagggaagtaaggctcaggaagctttcaagcagtacgaagccttcatgaaggccgtgtacccagggataacccccgaccaagccaggatgatgctgatccccattcattgcgattgcaaccacaagccaggctgcgctcccgtgatgggcaggcagacctgtaagatgaccccctttgggatggccaatgctgaagacttggatgtgactaccatcagtgacccgaccgtgctggcaagcgtgagacacccagccttgatggtgttccagtgttgcaacccagtgtaccgcaactcccgtgtccagaatgccggtcccaactgtgatttcaagatctctgctcctgacctacttggcgccctgcagctgaccagaaagttgtggcaagacacctttcccgagattccagttcccaagttggtgatccccgagttcaagtggcagaacaggttacagttccgcaacgtatccctgcccgcgggtcactttgactcccgccagaacccatttgatttctgagtgaataatgaaaacgaatgagtaaaaaacgagagccttagtgcatgtaaaaataaagtgctttttattgaacacggttttacatgacttattgcatatccatacggtcaaacgcggtggccctttcgatgcgtgcgcggtgagaacgaaagtaagatgagtgggtgtttaggaagcgatatagcgcctcctggttgcggcgcagggtgggctgcacttggggagattggagcatgctgttgggcaccccagtcagcaacttcatggtggggtttccgttcatggggcggtcgggccagtgcacaaaggcatgaaggaacatacagcaaaaaagtccacaggcggctgagcgtgggccctgcacgctctgggtggacttttccagggtgatgcagcggtctttggtagcaagggcactgcggcgcaggagcccctcgtactcaaactggtaaatctgtttgagtcgctcatccgagaacccaaaaggatcaaaaaggtagcaggtgttggagcgcgggttccaaccaaaagccagccagtgctctccccccgtctcgcgtccggcagtgttgactatggcgcaggcgagcttgtcgggggccatgaaccccgggaaacgcttgtcaaaggttcccaggaaatagggtccgcaacccaggtctcggacgatggctttgagctcttgctcgctggagccgtttccggacccgcatgacatggctgcagctgctgcttgcaagaagcaagaggcttcttatgtggtggcgttgccggccgagaacggtgtgcgcaggtagacggcctcgatgacgccgcggtgtggctggtgcactctgaccacgtcgaagacttcgaaaagaagataaagcagggtgggctcatccatgggatccacctcaaaagtcatgtccagcgcatgggccgagttggcatagagcaggttctgtcccaggtccgtaagggctcccatggacatgaagttgctggagaacggtatgcgccacatggtcctgtcgcacaggaactttttttgggtaacacttttaacggcagtagttccgatgagcgggtatggataattggctgggtaaggttccccttgtctcatagtaggcgcaaggtatcctacaaagccagagttgttgtgttgatatggtaaggtgacggctttgtagtcagtgtaattaacctcatcaaccacctgcctgctcataggctggaagtttctgaaaaaggagtacatgcgatccttgtatccctcagggatgtaaaagccctggtagccaatgttgtagttggcaagcatctgaaccaggaaccagtctttggtcatgttgcattgggccacattgtatccttccccatccacagtgcgcttgatttcaaactcatttggagacaacagcctgtcattgccaggccagctgactgaggagtcaaacatgatggagaccttcttgaaagtgtggttaaggtaaaaagtgccatccaggtagggaatagatccagaataaacgaagtagggatcgaaccctgatccaagagatggagtctccttggttttgagtctggtgaaggaccagcccctgaaggctgcccagttgcgagatgggatggaaattggaatgttggttgcattggcagggatggggtaaagcatgttagctgcagagaggtagtcgttgaatgactgatcattggtatcgttgcgcagcatggcttcaagagttgaagcggtgttgtgagccatggggaagaaggtggcatagaggttgatgctggtgaaacttatgttagcaccatctgttctgaggtcatttccaagggaactttgcaggaccatgttcacatcctttctgaagttccactcataggtgtaggagccaggtagaagaagtaggttcttgacagcaaagaatttttgaggcacttgtatgtggaaaggcacataacggccattgcccagaagcatggaccggtagcgtaggccagcattgcggtggtggttaaatggattcacattgtccattgggtcaagagaccacctggcgccaatgttgatgtatgaatcgaccagagatggggaaaccactcgcccgttcatgtactcataggtgttggtgttagcgggcagagtaatgttagttggcgtgtacttgtaaacatctggaaggtacaaagccacattggagtacagaaaacttctccaaagattagcttggatattaatttccatagccagattgttgcctatggctatttcattagctgtagaaactttagtatctttttcccatgcagtgtctctaggtttaatgccttgatatttgttccctggtcctatgccatccagaggaaaacagtaattaggcagttcatcctcgacgccatgattttcaataatacgaacatcgggatcatagctgtccacagcctgattccacatgctgaagtatctgcttctgtctcccagagaatcaagcaaaagctgatatgacagttcagtgtttctgtcctgcaagtcaaccactgcattcagttgtgatgcttggccggccaaaactcccatatttccagtactgttgtagtacataagacctacaaagttatccctgaagccaatgtaattgggtctgttaggcatggcttgttgacccaaatttgcatgagagttaccatcagaagttcctggcttgtataccacatggctgtctggagtttccaaattgacattttccgtgtaaagcacaatttcaggcgaaaaagcgtcagcagcttctctaccatcgaaaaattccatatcaatatctggctcctcagcttcaacatctccttcggttggtgttacttttctgtttttagcttggcccccttttatgtttgtaggtcttgcaaaagacccgtagcatggcttcattttagtagctggtttaagagctctacctccaaatttttcatttgttccatcaatatcagtccatgattcttctccaacttgaggctctggctgatatgttttatcggcataaatgggcttgttgtctgcagtaatgtctttcccaatttctaaaccttccttagtaatattgtctcccttcgtggaagcaatgccaaatgtgtatgtggtggcattgtcttctcccgttgtaactatccactgagatgtgttaggcgcgcccttaggagccagtgaattgtaagctgtgccggaatatggcttgaagctaggacctctatcaagcacccccctaatgtcaaagaatgtgctggccatgtcaagcactctgttgtcgcccacggcgagggtgtaccgcactttgtaagagtatgtattgtcctcccggtcaacgggcacgaagcgcagcatcagtcgctggctacggtcggtggtcacatcgtgggtgggcgccactgtggggtttctaaacttgttccccatactgaagtaggtgtctgttgcacgggcgaactgcaccagacccggactcaggtactccgaagcatcctgtccggcgatgtgcatgtatgcccattggggcatcatcgatggggtggccatcttgaaagcaactcagcctcggcgcgcgacctcttcctttctcctctgctgcggcggcgtggtgatgatacatacacacagacaagcaagttaagcgctactccatatttaattaatagcagcgacggcgctttacactctgcacgcccagacccacgatgctgttcagagtactttgccagtttgctttcgggcgcggtgtgcccccaggacgcggtctggctacggcaacgggctgtacggcggtgggctttctggtagcgacaggtttgggaacaggcgccgcagaagcagggggaggaggcaagtccaaggtggcgggtcgatgtaactcagaaggtttcatcaccccggtagccatgtgagctacgggcctggtagtgggcattccgagctttactgcctcctcgtatgaagggggctcgtctgcgcgcgtcaccagcgtgtgctctagctcgggtcgcggacgcttgtcgccccgcttttccagcggaggaagttcttcctccacttccatttcaccaggggttgcgggcggcgggtccaggcggctgtttatctgtttttgtacagcctggttggccagatccactacgccgttaataccagaggcgatcccatcgaccaccttctgttggaagttttgttccttaagcttatttctcagagcctgccctgtgctgctgttccaagctttgttcccataggtttttacggtcgagccaaaatttttaagcccgctccagatactgctccaattgaaggcgcccccgttcagttggctcgtgccgatgtcgctccaggtgcccatgtacggcctcgtgccgtgtcgcggagccagggatgaaaaattgatgtcttccatctctacaaaaacatagtcacaggaccaggagcgtcagagtccattctattttttatttataagtttttccaatgttagtggcgctgcgaggcctgaaccgccacggaagctatgcctggtatcgccccgatcgctgcggcgatgatgggtataagagctggcaaaaagccaccccctaatcgtctgctgatagcgcgccttcgtctgtggcggcgcatccctcgccccaacatccttctacggcgcgagtttcttcctcggtagccagtaatggggacgcgaaggcggcaagtgagggccatatctgcaaggaggcagcgtcaacagtcattaagtggtgatgcttggatggtagcgcgcgcgcggcagcgtcagaggttcagcgcgaccatcgcggtacactctccgcaccagggcggcgggagtcaatttgctggcagtgttgcggcggcggcgacggcgagtgcgacttgcaggtggtttgcggcggcgagaggtgttgctccggtttcgatagtagcgagtgcctctgtaacccggagtgggaatgatggatgggtgcagagcatagttgggcattagcagacttgctgggccgtactttcgtcgtgatcttcgagtggtgctgggggcggcaacgggcgcgggcatccagggttccgtttgcacctcaattgaggtggttgtgggttttgcaggttcggtctgcacttccatggactcggtgggaatcttgatgtcgaaggtttgtactcccaaacctggcgccacttccttgataggtcttactttgacctcaggctggatatcggcatccactttcattttctccagtacgtcttctagcctctggcgcttgggcaccattagctgcatggtgggatacaggtcctcaccctcgcgctttacgcctctccgcgcaggcacgggcagcacttgctgcagggtgactggtttgaggctgggggtgggatttccatgatccaaaggaatggacaccgcctcctctttgggactggatctagtgcgcttgccataagcaaactcgtcaaggcggtctgccgcctgctcaagaatattgtcatccccgtacacctcatcataggaccgtttaaaagtagtgctggaacgctcgccgggtgtaaaaaccacagtggtcccgggtctgagcacttgacgcactttgcgcccgcgccactgcacgcgccgtcttggggcgaactcgcgcacaaactccaccagcccatcatcgtcatcttcttcctttttgttatttttgacccgcttgattttgcggggctttttttcatccttcaccggtggaccgtagatttcaggcgcgatgacctggagcatctcttccttgtatttgcgcttggacatacttgccgctgggacacaacatcggagactgctcagtatcttctaagtgcgaggggggcgagtgcgcacgggcacgcgctggccggtagtggcatcacgcacccagtacacattgcctcttcgcggttgggccatgttggcaatggccgctgctgccgccgtggccgcgcgcctgcgggacctgccgctgctggcacctgaagccgcgcgtctggccgctctaagcatggctcttcgccccacacgtttggccctccgcagaatagcttttgcagctcgcatggcgggagtagccctgtggcgcctggcgatgcgcctccttcggctcttccggcgagcataggcgcgggcgtctgccaccacactgtcaataactgcatccacagtagatgtaggcgcagtaggagtataattacgagcatcggcgaccacctggtcgatcacatcatcgaccgtggtccgagtgcgggtacgacccttgagtgcgccccagggagcgcggaaatgaccgcgaacgcgcacagggtgctgggtagagcgtttgcgggcgcctccatacatcttggtgggcgcatacagtccccaaccggtattattactgggcgagatgagaatggacattttttttttttagaaagtgcggcttgaaagaacgcgcggcgcgactatgcccagggccttgtaaacgtagggacaggtgcggcgtctggcgtcagtaacggtcacgcgctggactccccggatactgctgcgtaacggcagggtcccgtgatctgtgagagcaggaacgttttcactgacggtggtaattgtgggcgccggcgggcggatgaggatctggttctcagggaagcggttgaagacgtgcgtgagcgaagtggcctgtcggagctgctgagagtacacggcttgctcattgtagaaactctttgagaagacgggcataagctctgcacccaccactgggtagttgttgacttgtcttgtggagcggaacgtgactgggtcttgcatcatgtcagggagcgaccagtaaacctgctctgccccacaggtgacatctgaagtggtgagcagtgtccaagaccttattcctttcttagggttaccgtaattgtaggacaggtaccaactgcggtaggccgtgttgattttgtcttccaagacattgtagcttctactcttgctgtctttttctagaggttggatctttaactcttttttaacttcagcagctgcagcttcacgtttgtgtttttctgttatataggtatctcctctagttatattatcatcttcactagtttcctctgcaacagccagtgtggttgtttcagtagtggtatcctttttgctttcctcataggcagtgacatccaaaagggcaggaatattacccccttcaagatcttcatacatgattttgaaaccctcctggaatggatgtctcttcctgatgccaagcaagttgctaagtcggctttcagtaaagtctaccccgcaaccaggcagcaatacaatgtcaggatggaatgcctcataagtgtagactcctggcataatcaacttagtttcggggtcccacccgagcctgaaatttctagtgtcaaacttaacaccaatgtcactttccagcactccattctgtctgccaatttccaggtagttgtcaatgatggcattgttcatcaggtcgatcgtcatggtggctgaaaagttgccttctggtaaaatgaactcaaaccactcatacttcaagatatcctctttatgatcataggtgtcatttactgtaacaccttcaggagcttttctggacaccatcaccctcgccttgaacttgttgctgaacatgtactcgttcacgttgggcatgttggtgtgcatgatggtcttcagatgaccgccccatcgcgaccgttcgtcaaagttgatggtctgggtgctagcctccgtgggggtaaagtcattgttctgcaccaccgtggtcaggaagttgctgtggtcgttctgatagttcagggaggcgatgtccgccgacttgttgtcaaccagatacaacttggtggtatcgtacaggggcgacagctccgagtaacgaatgctgtttctcccttccgtaggcgccaggtaccgcgggggtacgaagggaacctccagtgggggctgtatcatcgccgcctgttgctgcatcacgctctcgtaagaaggaggaggaccctccggatacaccaccgctccgcctagcacggctcgtctcctcatcgtactagacacagataacaaaaaagaacgaacgcacgctcggtcgccatggccttggtgagttgcatttttattttactttcacttttacaacatgcgcccgaatctgggacgcagatgagcgaacgggttgccccctcctcttccacccaagtccaacacgctgctatcatcggcagagtcctcatcgtcccacacaagacccatctgtctgtcgtggcgctggcgtctacgggtcggtctgcttgtagcccccaatatcctgggctcgtctctgtgatcctgcgcataggtcttccatctactcatcttatccaccagactctctattccattgttggggaagttcttttccctctctggcctcagcaaagagtcattcaagtactcatcctcgcccatcaagcgcgggcgggttattctccccagttcactgctgcgaacgctgtttagtgaaaagggcaagctagggaaaggacttgcagcttcgggcacggtcgcggcagcaccagccgttccggacagcgacacggaagagtgtcttctatcgcccccttccttcttccaaactgtataaccgggaggcggggagaatatgctgctgtccacatcgtcccacaggaacccgtcattggggtcgggcatgtcgtactcgccagtgtagaaaccaggtgggggcagccagtgtgggttcaggatagcattggtgaaataatcagagttcatggcggccgccctgtgcaggtagtccagcagtttgttaatgaaaggcctgttactagcatacatgctgggctccatgtttcgagctgtcatgtccagcgcggcggtaggtgtcgccccctcctgcatcagaaacagtccaacgctctgttgcacgtatctgaggatccgctcctcctcagcggtaagcgcatactgaggagggatcttctgcgaccggttggttagcaagaagttcagggtggcttccaaactgcccgtgtcttcctgacccagggcgcggctcacttgggtgatttcttgataggtctgctcgtccacctggctctgccctatggcctcgcgatacaggttaagcaggtagcccaagtacgagttgcggtcgatgctaccgctgtcagtaaagggggataccagcagcagcagcaggcgggagttgggagtcagcaagctagacacggtcgcgcgatctcctactggggcgtgcactccccacagacccttcaggttcttgaaagcctgagtcaggttcactgtctgcaagccctgtctgctggtctggaagaagtaatctggcccggactggtacacctcgctctggggcacctcagctaccatgagtctcaatgcactcaaaaagtttgtatagtcttgctgaccacggggcacgttggcgggctgggtgctgaggaaagcgtttagcgctaccaacgaccccaagttggcgccgcgctggaaccgctcgcgctgagacacggcctcgcgcacatcggtcaccatcctgtccaggttggtttgcacgttgctgctgttgtaacgggccacgcgctccaagagagcattgtataccagcccggcctcatcgggacggatggccttgttctccaccagcgcgttcacgatagccaggaccttctcgtgggtggggttggagcgggagggcactacggcctccagtatggccgaaaggcggttggcctggggttgctgtctaaaggcttcggggttgcgggtcgtcagcgccattatgcgttgcatggcctgggtccaatcgtccgaagagttaatgccggacggctggctctgcagcgccgcccgcattgcggggtccggtgcctgctgctgttccatctagcaaaaatacgggtcgcgccatcagtcttccaagtactcgccctcctcgtcctcgacttcatccacctcttctatgtaaggaagctcacaccctgcagcctccatggccctgcgactgggttgccattgcaagtccgctcccatgtcaaagtagttctccccatcagtcccggcccccgttagagctctttgcaagctgtgcataagttctctgtcgctcagctcgcgcctcctgctggcgctcaccgcgcggtgcatcctgtcattgcgatacacccccagatcgtcgctcagagtcagcaccttcagagtcatgcgcatgtaaaacccatctatctttacctccttatctatgggtacgtagggggtcttgtagatcttgcgagcgtagtatttgcccaggctcaagaccgagtagttgatagctgccactttctcagccaaacccaggctacgttcctgcactataatactttgcaggatgttgatcagatcatacagccatctcccatcaggctcggtgatgttcaacaacgcctccctgaatgcctcgttgtccctgctatgttgaaccaccagaaacagctgagctgtcagtggtttgctagtggggttctgggtgatagcctccatcaggtcccacagatgcatcagacccagggtcacttcctcgcgggcgatcagggtgcgcacatggttgttaaaagatttttggaagttgcgctcctccttcacggtctgctcgtaggctgagactaggttggccgcggccacatgtgccctagctgggctgatccctgtcacttcatcgacctcaaaatcctcgtcttgcagcacccgtcttcgatccagaccgtggcgcagctcgcgacccgcgttaaatcgagatgctcgcatctcctctggctcctcaccgctcctgtccctgaacaggttctgctggggcacgtacgcctcgcgagagtcctttttcagttgcacccgcgggtgccgctcgggcgatggtgcgcccaggcgcgccagtccctcgccctcttccaattccagatcataggcgggctgtcccgcgccgctgacggctgcagccgcagtagttacaggagcaggaagagccttttgtggctgttgttgtagctgctgctgagaagggggctgttgctgggggcgcatctgtcgcagcacgggatgcatctgggcaacaaaaaacaaaaaaaaaaaagagggctcgctcccgtaaactggagaagtcggctgggcgggtgccgctcgggcgatggtgcgcccaggcgcgccagtccctcgccctcttccaattccagatcataggcgggctgtcccgcgccgctgacggctgcagccgcagtagttacaggagcaggaagagccttttgtggctgttgttgtagctgctgctgagaagggggctgttgctgggggcgcatctgtcgcagcacgggatgcatctgggcaacaaaaaacaaaaaaaaaaaagagggctcgctcccgtaaactggagaagtcggctggcggggtcttagaaacgtcgcggaaaccggccgatccggcgcgctaagactcgaaccggggcacaccgcaacgcaaccctggcgattaattctccagactacgggcgcgagccactcccagccccgagaactgagtgttctaaagcttgacgcagcactggctcccatccaggaaaaagcaaaaaaacgacccgcctccgtatcctggaggttttgtgcaggcctgggtcgagacgggagtgccagtaccacgttagctgcggctccagcctgatccgagattcgaaccggggtacacgcgcagcccaacccgttcgcttagcctccaggccacggagacgagccgctgaccgctttcgtttttgcccgtatgtctagagcatcaacgactgtgcacgtctcacgggccaaaccgtgcctaccatgaactacttcatgccgctgcgcaacatctggaaccgcgtacgcgagttcccgcgggcatccaccaccgcctccggtatcacctggatgtccaggtacatctacggttaccaccgcctcatgctggaagaccttgcccccggagccccggctacagagcgatggcccctgtaccgccagccaccgccacactttctcatcggctaccagtacctggtgcgcacctgcaacgattacatctttgacacccgcgcatactcgcgcctcaagtacaccgagctcgtgcgccctgggcaccagacagtcaactggtcagtcatggccaactgctcctacacaatcaacaccggggcctaccaccgctttgtggactttgacgacttccaagccaccctcacccaggtgcagcaagccatcctcgccgaaagggttgtagcggacctggcacttgtccagcccatgcgcgggttcgggatcactcgcatgcatggcagagcgggcgaagaagaagtgcccgtggaacgactcatgcaagactactataaagatctggccagatgtcaggataatgcttggggaatggcccatcgcctgcgcatccaacaagccggacccaaagacctggtgctcctcgccaccatccgccgtctcaaaactgcctattttaatttcatcaccagcagcatcgtctcatcctcccaagaggaggaaggaaaagaaagagagaaccccgaccgagcgtctagccgcccccgcccgcaagaaacagtgctcagcctaccttgcgattgcgactggttagacgctttcgtcgaaaggttttcagatcccgtggatcttgagacgatcaggtccttgcgcggagtacctacggggcaattgataaaatgcataatcagcgcggtgtccctgcccaacggagagcctcccagtcaccacttcagggagatgcgcggaggcgtcttcactctgagacccagggagaacggtcgtgccgtcaccgagaccatgcgccgccgccgcggagaggtcattgaaagattcatcgaccgtctgcccgtgcgccgccggcgtcgccgcgttccccctcctcctgcagccccacctgaagaggaagagatgttagtggaagaagaagagattgaggaagaaatcccgggggatttcgagcgcgaggtgcgcaccaccattgccgaactcatccgtcttctggaagaggagttgaccgtgtccgcgcgtaactcccagtttttcaactttgccgtggacttctacgaggccatggagcgcttggaagcgctgggcgatgtcagcgagatgccgctgagacgatggatcatgtatttcttcgtcaccgagcacatcgccaccacactcaactaccttttccagcgcctatgcaactatgcggtcttcacccgccacgtagagcttaacctcgcccaggtggttatgcgcgcgagagatcccgtgggggctgtggtctacagccgcgtctggaacgaggcgggcatgaatgcattctctcaactcattgggcgcatctccaacgacctagcggccaccgtcgagagagcgggccgcggagatcttcaagaggaagagatccagcagttcatggccgagatcgcctaccaggataactctggcgacgtgcaagaaatccttaggcaagccgccgtcaacgataccgagattgattctgttgaactctctttcaggttcaagctcacggggccggtagctttcacccagaggcgtcagatccaggatgtcaaccgccgcgtcgtcgcacatgcgagtcttctcagggcgcagtaccagaacctacccgcgcgcggcgccgacgtaccactgccagccatgccgccgggtcccgagccgcccctgccgcccggtgcgcgccctcgacaccgctcctaaacatgcaagaagcaacagagccaccgccgcccaaaaggaaaaacaagggcacggtggtagcgcccaaggggcacggaaccctgcaagccattgacatctccaccaacggacccgtggagatcaagtaccatctgaacctccctcacgccctcgaaaagatcatgcaagtcaatctcctgacactgcctactaacctgactccgcagcgtctcaggaccctggacagctccggcctgcgcgctctcgtcctcgagctccgcccctgccgcgccgaggtctggacttgcctcccgcgagggctcgtcagcatgaccaccatcgagacagaagatggtcatgccgatgcagacaacatagtagagcgccaggtacaaacgccaggcctcaattttccactgaaatttctcgtcaaaggaagtcaggtacaactcattcatgaggtgcatcccgtgaatcgctgcgagtactgcggccgtctgtacaagcacaagcatgaatgctcggcgcgtcgcagggagttctacttccatcacatcaacagccattcctccaactggtggcaggagatccagttcttcccgattggctctcatcctcgcacagaaaggctcttcctcacctacgatgtggaaacctacacctggatggggtcctttggcaagcagctaatccccttcatgctggtcatgaaactctctggagaccagcggctcgtcaacatcgcctatgacctcgccatgaaacttaagtgggatcgctggcggcaggacccccaaaccttctattgcgtcaccccagaaaaaatggcagtcgggcagcattttcgtcaataccgggaccagttacaaacagcactcgcagtggacctctggtcctccttcctcaaagcgaaccctcacgtgcacgaatgggccctcgaacactatgctctcactgaccctacagatctcacttttgaagaactcaagaagctgcctcatgtcaggggcacccctcgattcttagaactgtacatagtggggcacaacatcaatggctttgatgagatcgtcttggccgctcaggttatcaataaccgagcagaggtccctcagcctttcagaatcacccgaaatttcatgcccagggccggcaagatcctcttcaatgatgttactttcgctttgcccaaccccgcctacaagaagcgggtggacttccaactctgggaacagggggcctgtgatgacatggacttcaagtatcaattcctcaaagtcatggtcagggacacttttgccctcactcatacctcgctgcgcaatgcagcccaagcatactctctcccagtggagaagggatgctgtccctacaaggcagtcaatcagttctacatgttgggctcttaccgtgcagaaaaagacgggtttcccctcgaagagtactggaaggatcgcgaagaataccttctcaaccgcgagctgtgggaaaagaaaagccaaccgcgttatgacatcatccaggaaactctcgactactgtgccctggatgtactcgtcaccgccgagctggtagccaagctgcaagagtcatatgcccacttcataagggactctgtaggcctacctcatgcccattttaacatattccagagacctactatctcttcaaattcccatgccatctttcgccagatcgtttacagggcggaaaaacccaaccgcaccaatctgggcccgggtcttctcgccccctcacatgaactctatgactatgtgcgagcaagcatcagaggggggcgctgttatcccacttacatcggcatcctcgaagagcccctctatgtatacgatatctgtggcatgtatgcctccgcgctcacccaccccatgccctggggcacccctcttaacccctatgagcgcgcgctggcagttcgagaatggcagatgaccttggatgatcccaccaccatcagctattttgacaaagatttgctaccgggaatatttaccatagatgcggacccccctgatgagctcatgctagaccccctcccccctttctgttcaagaaaaggaggtcgactctgctggaccaatgagcccctccgaggcgaggtggccaccagtgtggatctgataaccctgcacaataggggatggcgagtcagaatagttccggatgaactgacaaccatcttccctgaatggaaatgtgtggcgcgcgagtacgtccagcttaacatcgccgccaaggagcgcgcggacaaggaaaagaaccaaaccatgcgctccatcgccaagcttctatccaatgccctctatggatcatttgctaccaagctggacaacaagaagattgtgttttctgaccagatggacgagagtcttatgaaaggcatctctgctggtactgtcaatatcaaatcctcctcgttcctagaaactgacaacctgagtgcagaggtcatgcccgccttcgagagggaatacctaccccaacagctggcgctcctggacagcgatccggaagacagtgaggacgaacagaggcccgcccccttttatacccccccggcggggacccctggtcacgtggcctacacttacaagccaatcacattcttggatgtggaggagggggacatgtgtttacataccgtagagaaggtggaccccctggttgacaacgaccgctacccctcccacgtggcctcctttgtgctggcctggacacgcgcttttgtatcagagtgggctgggttcctctacgaagaggaccgaggcactccgctcgaggacaggcccataaagtcggtctacggggacacggacagcctctttgtcacccagcggggacacgacctcatggaaaccaaaggtaagaaacgcatcaaaaaacatggcggaaaacttgtttttgaccccgatgagccggatctgacctggctcgtggagtgcgaaaccgtctgcgcctcctgcggtgcggatgcatactcccccgaatccattttcctcgcgcccaagctgtatgccctcaaatgtatctactgccccgcctgccataaaacttccaaaggtaagctccgtgccaaaggccacgcggccgaggcgctcaactacgaactcatggtaaactgctacctggccgacatgcagggcgccgatcggcagcggttctcgaccagcaggatgagtctgaagcgcaccctcgcaagcgcccaaccaggcgcgcacccattcaccgtgacggaaacaaccctgactcggacgctgcgaccatggaaggatcggaccctggcagcgctggacgcccatcgtctgattccctactccaggagccgtcccaacccgcgaaacgaggaggtctgctggatcgagatgccatagagcacatcaccgagctctgggaccggctcgagctcttgcaacagactctttccaaaatgcccatggctgacgggctgaagccgctgaaaaacttctcctcgctccaggagcttctatcccttgggggagagcgcctcctaacggacttggtgcgggaaaatatccatgtaagggaaatgatgaacgaagtggcccccctactccgggaggacggcagctgtcgctccctaaactaccatctgcaacccgtaattggggtcatttacggtcccactgggtgcggcaagtctcagctgcttaggaatttgctctcatcccagttaatcaccccggctccagaaacggtattttttatagccccgcaggtggacatgatccccccctctgaactgaaagcctgggaaatgcaaatatgtgaggggaactatgctcccgggccagagggaactttcatcccccaatctggcaccctccgcccaaagtttattaaaatggcttatgatgacctgactcaggagcataactatgatgtttcagacccccggaacgtgttcgcccgtgccgctgcccacggccccatcgctatcattatggatgagtgcatggagaatctggggggtcacaaaggcgtctccaaattttttcatgcttttccctctaagctgcatgataaatttcccaagtgcaccggatacactgtcttagtggtcctgcacaatatgaacccgagacgggatctaggcggcaacattgccaacctcaagatccagtccaaaatgcatataatttcaccccggatgtacccgtcccagctcaatagatttgtaaacacctacactaagggcctccccgttgcaattagtctgctcctaaaagatattgtgcaacaccatgcactccgaccttgctatgactgggtgatttataacactaccccggagcaagaggctcttcaatggagctatctccacccccgagacggactaatgcctatgtatctaaacattcaatcccacctttacagggtactggaaaagatccaccgagttctcaatgatcgagaccgatggtccagggcataccgcgcgcgaaaaatcaaataaaca

SEQ ID NO: 51 - DNA, 4038 bp, Human adenovirus
  misc_feature 1..4038: note = Ad7 E3; 27308 - 31345
  source 1..4038: mol_type = genomic DNA
tataaaacgcctggtgatcagaggccgaggtatccagctcaacgacgagtcggttagctcttcgcttggtctgcgaccagacggagtcttccagatcgccggctgtgggagatcttccttcacccctcgtcaggctgtactgactttggagagttcgtcctcgcagccccgctcgggcggcatcggaactctccagttcgtggaggagtttactccctctgtctacttcaaccccttctccggctctcctggccagtacccagacgagttcataccgaacttcgacgcaatcagcgagtcagtggatggctatgattgatgtctaatggtggcgcggctgagctagctcgactgcgacacctagaccactgccgccgctttcgctgcttcgcccgggaactcaccgagttcatctacttcgaactccccgaggagcaccctcagggtccggcccacggagtgcggattaccatcgaagggggaatagactctcgcctgcatcgaatcttctcccagcgacccgtgctgattgagcgcgaccagggaaatacaaccatctccatttactgcatctgtaaccaccccggattgcatgaaagcctttgctgtcttgtttgtgctgagtttaataaaaactgagttaagaccctcctacggactaccgcttcttcaatcaggactttacaacaccaaccagatcttccagaagacccagacccttcctcctctgatccaggactctaactctaccttaccagcaccatccactactaaccttcccgaaactaacaagcttggatctcatctgcaacaccgcctttcacgaagccttctttctgccaatactaccactcccaaaaccggaggtgagctccgcggtctccctactgacgacccctgggtggtagcgggttttgtaacgttaggagtagttgcgggtgggcttgtgctaatcctttgctacctatacataccttgctgtgcatatttagtcatattgcgctgttggtttaaaaaatgggggccatattagtcgtgcttgctttactttcgcttttgggtctgggctctgctaatctcaatcctcttgatcacgatccatgtctagacttcgacccagaaaactgcacacttacttttgcacccgacacaagccgtctctgtggagttcttattaagtgcggatgggactgcaggtccgttgaaattacacataataataaaacatggaacaataccttatccaccacatgggagccaggagttcccgagtggtatactgtctctgtccgaggtcctgacggttccatccgcattagtaacaacacttttattttttctgaaatgtgcgatctggccatgttcatgagcagacagtatgacctatggcctcccagcaaagagaacattgtggcattttccattgcttattgcttggtaacatgcatcatcactgctatcatttgtgtgtgcatacacttgcttatagttattcgccctagacaaagcaataaggaaaaagagaaaatgccttaacctttttactcataccttttctttacagcatggcttttgttacagctctaattattgccaacattgtcactgtcgctcacgggcaaacaattatccatattaccttaggacataatcacacccttgtagggcccccaattacttcagaggttatttggaccaaacttggaagtgttgattattttgatataatttgcaacaaaactaaaccaatatttgtaatctgtaacagacaaaatctcacgttaattaatgttagcaaaatttataacggttactattatggttatgacagatccagtagtcaatataaaaattacttagttcgcataactcagcccaaattaacagtgcccactatgacaataattaaaatggctaataaagcattagaaaattttacatcaccaacaacgcccaatgaaaaaaacattccaaattcaatgattgcaattattgcggcggtggcattgggaatggcactaataataatatgcatgttcctatatgcttgttgctataaaaagtttcaacataaacaggatccactactaaattttaacatttaattttttatacagatgttttccactacaatttttatcattactagccttgcagctgtaacttatggccgttcacacctaactctacctgttggctcaacatgtacactacaaggaccccaacaaggctatgtcacttggtggagaatatatgataatggagggttcgctagaccatgtgatcagcctggtacaaaattttcatgcaacggaagagacttgaccataattaacataacatcaaatgagcaaggcttctattatggaaccaactataaagatagtttagattacaacattattgtagtgccagccaccacttctgctccccgcaaaaccactttctctagcagcagtgccaaagcaagcacaattcctaaaacagcttctgctatgttaaagcttcaaaaaatcgctttaaataattccacagccgctcccaatacaattcctaaatcaacaattggcatcattactgccgtggtagtgggattaattattatatttttgtgcataatgtactatgcctgctgctatagaaaacatgaacaaaaaggtgatgcattactaaattttgacatttaattttttatagaattatgatattgtttcaatcaaataccactaacactatcaatgtgcagactactttaaatcatgacatggaaaaccacactacctcctatgcatacacaaacattcagcctaaatacgctatgcaatagaaattctaaaagacgtcccatctattctcctatgattagtcgtccccatatggctttgaatgaaatctaagatcttttttttttttctcttacagtatggtgaacaccaatcatgatccctagaaatttcttcttcaccatactcatctgtgctttcaatgtctgtgctactttcacagcagtagccactgcaagcccagactgtataggaccatttgcttcctatgcactttttgccttcgttacttgcatctgcgtgtgtagcatagtctgcctggttattaattttttccaactggtagactggatctttgtacgaattgcctacctacgtcaccatcccgaataccgcaatcaaaatgttgcggcacttcttaggcttatttaaaaccatgcaggctatgctaccagtcattttaattctgctactaccctgcattgccctagcttccaccgccactcgcgctacacctgaacaacttagaaaatgcaaatttcaacaaccatggtcatttcttgattgctaccatgaaaaatctgatttccccacatactggatagtgattgttggaataattaacatactttcatgtacctttttctcaatcacaatataccccacatttaattttgggtggaattctcccaatgcactgggttacccacaagaaccagatgaacatatcccactacaacacatacaacaaccactagcactggtagagtatgaaaatgagccacaaccttcactacctcctgccattagttacttcaacctaaccggcggagatgactgaaatactcaccacctccaattccgccgaggatctgcttgatatggacggccgcgtctcagaacagcgactcgcccaactacgcatccgccagcagcaggaacgcgtgaccaaagagctcagagatgtcatccaaattcaccaatgcaaaaaaggcatattttgcttggtaaaacaagccaagatatcctacgagatcaccgctactgaccatcgcctctcttacgaacttggcccccaacgacaaaaatttacatgcatggtgggaatcacccctatagttatcactcagcaaagtggagatactaaggggtgcattcactgctcttgcgattccatcgagtgcacctacaccctgctaaagaccctatgcggcctaagagacctgctacccatgaattaaaaattaataaaaaa

SEQ ID NO: 52 - DNA, 978 bp, Human adenovirus
  misc_feature 1..978: note = Ad7 fiber; 31529 - 32506
  source 1..978: mol_type = genomic DNA
atgaccaagagagtccggctcagtgattccttcaaccctgtctacccctatgaagatgaaagcacctcccaacacccctttataaacccagggtttatttccccaaatggctttacacaaagcccagacggagttcttactttaaaatgtttaaccccactaacaaccacaggcgggtctctacagttaaaagtgggagggggtcttacaatagatgacaccgacggttttttgaaagaaaacataagtgccaccacaccactcgttaagactggtcactctataggtttgtcgctaggacccggattaggaacaaatgaaaacaaactttgtgccaaattgggagaaggacttacattcaattccaacaacatttgcattaatgacaatattaacaccctatggacaggagttaaccccaccagagccaactgtcaaataatggcctccagtgaatctaatgattgcaaattaattctaacactagttaaaactggagccctcgtcactgcatttgtttatgttataggagtatctaacgattttaatatgctaactacacataaaaatataaatttcactgcagagctgttttttgattctactggtaatttattaactagcctttcatccctaaaaactccacttaatcataaatcagggcaaaacatggctactggtgcccttactaatgctaaaggtttcatgcccagcacaactgcctatcctttcaatgttaattccagagaaaaagaaaactacatttacggaacttgttactacacagctagtgatcacactgcttttcccattgacatatctgtcatgcttaaccaaagagcattaaataatgagacatcatattgtattcgtgtaacttggtcctggaatacaggagttgccccagaagtgcaaacctctgctactaccctagtcacctctccatttaccttttactacattagagaagacgactga

SEQ ID NO: 53 - DNA, 126 bp, Human adenovirus
  misc_feature 1..126: note = Ad7 fiber tail; 31529 -31654
  source 1..126: mol_type = genomic DNA
atgaccaagagagtccggctcagtgattccttcaaccctgtctacccctatgaagatgaaagcacctcccaacacccctttataaacccagggtttatttccccaaatggctttacacaaagccca

SEQ ID NO: 54 - DNA, 273 bp, Human adenovirus
  misc_feature 1..273: note = Ad7 fiber shaft; 31655 - 31927
  source 1..273: mol_type = genomic DNA
gacggagttcttactttaaaatgtttaaccccactaacaaccacaggcgggtctctacagttaaaagtgggagggggtcttacaatagatgacaccgacggttttttgaaagaaaacataagtgccaccacaccactcgttaagactggtcactctataggtttgtcgctaggacccggattaggaacaaatgaaaacaaactttgtgccaaattgggagaaggacttacattcaattccaacaacatttgcattaatgacaatattaacacc

SEQ ID NO: 55 - DNA, 576 bp, Human adenovirus
  misc_feature 1..576: note = Ad7 fiber knob; 31928 - 32503
  source 1..576: mol_type = genomic DNA
ctatggacaggagttaaccccaccagagccaactgtcaaataatggcctccagtgaatctaatgattgcaaattaattctaacactagttaaaactggagccctcgtcactgcatttgtttatgttataggagtatctaacgattttaatatgctaactacacataaaaatataaatttcactgcagagctgttttttgattctactggtaatttattaactagcctttcatccctaaaaactccacttaatcataaatcagggcaaaacatggctactggtgcccttactaatgctaaaggtttcatgcccagcacaactgcctatcctttcaatgttaattccagagaaaaagaaaactacatttacggaacttgttactacacagctagtgatcacactgcttttcccattgacatatctgtcatgcttaaccaaagagcattaaataatgagacatcatattgtattcgtgtaacttggtcctggaatacaggagttgccccagaagtgcaaacctctgctactaccctagtcacctctccatttaccttttactacattagagaagacgac

SEQ ID NO: 56 - DNA, 1635 bp, Human adenovirus
  misc_feature 1..1635: note = Ad7 penton; 14153 - 15787
  source 1..1635: mol_type = genomic DNA
atgaggagacgagccgtgctaggcggagcggtggtgtatccggagggtcctcctccttcttacgagagcgtgatgcagcaacaggcggcgatgatacagcccccactggaggttcccttcgtacccccgcggtacctggcgcctacggaagggagaaacagcattcgttactcggagctgtcgcccctgtacgataccaccaagttgtatctggttgacaacaagtcggcggacatcgcctccctgaactatcagaacgaccacagcaacttcctgaccacggtggtgcagaacaatgactttacccccacggaggctagcacccagaccatcaactttgacgaacggtcgcgatggggcggtcatctgaagaccatcatgcacaccaacatgcccaacgtgaacgagtacatgttcagcaacaagttcaaggcgagggtgatggtgtccagaaaagctcctgaaggtgttacagtaaatgacacctatgatcataaagaggatatcttgaagtatgagtggtttgagttcattttaccagaaggcaacttttcagccaccatgacgatcgacctgatgaacaatgccatcattgacaactacctggaaattggcagacagaatggagtgctggaaagtgacattggtgttaagtttgacactagaaatttcaggctcgggtgggaccccgaaactaagttgattatgccaggagtctacacttatgaggcattccatcctgacattgtattgctgcctggttgcggggtagactttactgaaagccgacttagcaacttgcttggcatcaggaagagacatccattccaggagggtttcaaaatcatgtatgaagatcttgaagggggtaatattcctgcccttttggatgtcactgcctatgaggaaagcaaaaaggataccactactgaaacaaccacactggctgttgcagaggaaactagtgaagatgataatataactagaggagatacctatataacagaaaaacacaaacgtgaagctgcagctgctgaagttaaaaaagagttaaagatccaacctctagaaaaagacagcaagagtagaagctacaatgtcttggaagacaaaatcaacacggcctaccgcagttggtacctgtcctacaattacggtaaccctaagaaaggaataaggtcttggacactgctcaccacttcagatgtcacctgtggggcagagcaggtttactggtcgctccctgacatgatgcaagacccagtcacgttccgctccacaagacaagtcaacaactacccagtggtgggtgcagagcttatgcccgtcttctcaaagagtttctacaatgagcaagccgtgtactctcagcagctccgacaggccacttcgctcacgcacgtcttcaaccgcttccctgagaaccagatcctcatccgcccgccggcgcccacaattaccaccgtcagtgaaaacgttcctgctctcacagatcacgggaccctgccgttacgcagcagtatccggggagtccagcgcgtgaccgttactgacgccagacgccgcacctgtccctacgtttacaaggccctgggcatagtcgcgccgcgcgttctttcaagccgcactttctaa

SEQ ID NO: 57 - DNA, 2805 bp, Human adenovirus
  misc_feature 1..2805: note = Ad7 hexon; 18666 - 21470
  source 1..2805: mol_type = genomic DNA
atggccaccccatcgatgatgccccaatgggcatacatgcacatcgccggacaggatgcttcggagtacctgagtccgggtctggtgcagttcgcccgtgcaacagacacctacttcagtatggggaacaagtttagaaaccccacagtggcgcccacccacgatgtgaccaccgaccgtagccagcgactgatgctgcgcttcgtgcccgttgaccgggaggacaatacatactcttacaaagtgcggtacaccctcgccgtgggcgacaacagagtgcttgacatggccagcacattctttgacattaggggggtgcttgatagaggtcctagcttcaagccatattccggcacagcttacaattcactggctcctaagggcgcgcctaacacatctcagtggatagttacaacgggagaagacaatgccaccacatacacatttggcattgcttccacgaagggagacaatattactaaggaaggtttagaaattgggaaagacattactgcagacaacaagcccatttatgccgataaaacatatcagccagagcctcaagttggagaagaatcatggactgatattgatggaacaaatgaaaaatttggaggtagagctcttaaaccagctactaaaatgaagccatgctacgggtcttttgcaagacctacaaacataaaagggggccaagctaaaaacagaaaagtaacaccaaccgaaggagatgttgaagctgaggagccagatattgatatggaatttttcgatggtagagaagctgctgacgctttttcgcctgaaattgtgctttacacggaaaatgtcaatttggaaactccagacagccatgtggtatacaagccaggaacttctgatggtaactctcatgcaaatttgggtcaacaagccatgcctaacagacccaattacattggcttcagggataactttgtaggtcttatgtactacaacagtactggaaatatgggagttttggccggccaagcatcacaactgaatgcagtggttgacttgcaggacagaaacactgaactgtcatatcagcttttgcttgattctctgggagacagaagcagatacttcagcatgtggaatcaggctgtggacagctatgatcccgatgttcgtattattgaaaatcatggcgtcgaggatgaactgcctaattactgttttcctctggatggcataggaccagggaacaaatatcaaggcattaaacctagagacactgcatgggaaaaagatactaaagtttctacagctaatgaaatagccataggcaacaatctggctatggaaattaatatccaagctaatctttggagaagttttctgtactccaatgtggctttgtaccttccagatgtttacaagtacacgccaactaacattactctgcccgctaacaccaacacctatgagtacatgaacgggcgagtggtttccccatctctggtcgattcatacatcaacattggcgccaggtggtctcttgacccaatggacaatgtgaatccatttaaccaccaccgcaatgctggcctacgctaccggtccatgcttctgggcaatggccgttatgtgcctttccacatacaagtgcctcaaaaattctttgctgtcaagaacctacttcttctacctggctcctacacctatgagtggaacttcagaaaggatgtgaacatggtcctgcaaagttcccttggaaatgacctcagaacagatggtgctaacataagtttcaccagcatcaacctctatgccaccttcttccccatggctcacaacaccgcttcaactcttgaagccatgctgcgcaacgataccaatgatcagtcattcaacgactacctctctgcagctaacatgctttaccccatccctgccaatgcaaccaacattccaatttccatcccatctcgcaactgggcagccttcaggggctggtccttcaccagactcaaaaccaaggagactccatctcttggatcagggttcgatccctacttcgtttattctggatctattccctacctggatggcactttttaccttaaccacactttcaagaaggtctccatcatgtttgactcctcagtcagctggcctggcaatgacaggctgttgtctccaaatgagtttgaaatcaagcgcactgtggatggggaaggatacaatgtggcccaatgcaacatgaccaaagactggttcctggttcagatgcttgccaactacaacattggctaccagggcttttacatccctgagggatacaaggatcgcatgtactcctttttcagaaacttccagcctatgagcaggcaggtggttgatgaggttaattacactgactacaaagccgtcaccttaccatatcaacacaacaactctggctttgtaggataccttgcgcctactatgagacaaggggaaccttacccagccaattatccatacccgctcatcggaactactgccgttaaaagtgttacccaaaaaaagttcctgtgcgacaggaccatgtggcgcataccgttctccagcaacttcatgtccatgggagcccttacggacctgggacagaacctgctctatgccaactcggcccatgcgctggacatgacttttgaggtggatcccatggatgagcccaccctgctttatcttcttttcgaagtcttcgacgtggtcagagtgcaccagccacaccgcggcgtcatcgaggccgtctacctgcgcacaccgttctcggccggcaacgccaccacataa

SEQ ID NO: 58 - protein, 325 aa, Human adenovirus
  REGION 1..325: note = misc_feature - Ad7 fiber; 1 - 325 (GenBank accession no. AP_000564); Human adenovirus 7
MTKRVRLSDSFNPVYPYEDESTSQHPFINPGFISPNGFTQSPDGVLTLKCLTPLTTTGGSLQLKVGGGLTIDDTDGFLKENISATTPLVKTGHSIGLSLGPGLGTNENKLCAKLGEGLTFNSNNICINDNINTLWTGVNPTRANCQIMASSESNDCKLILTLVKTGALVTAFVYVIGVSNDFNMLTTHKNINFTAELFFDSTGNLLTSLSSLKTPLNHKSGQNMATGALTNAKGFMPSTTAYPFNVNSREKENYIYGTCYYTASDHTAFPIDISVMLNQRALNNETSYCIRVTWSWNTGVAPEVQTSATTLVTSPFTFYYIREDD

SEQ ID NO: 59 - protein, 91 aa, Human adenovirus
  REGION 1..91: note = misc_feature - Ad7 fiber shaft; 43 - 133 (GenBank accession no. AP_000564); Human adenovirus 7
DGVLTLKCLTPLTTTGGSLQLKVGGGLTIDDTDGFLKENISATTPLVKTGHSIGLSLGPGLGTNENKLCAKLGEGLTFNSNNICINDNINT

SEQ ID NO: 60 - protein, 192 aa, Human adenovirus
  REGION 1..192: note = misc_feature - Ad7 fiber knob; 134 - 325 (GenBank accession no. AP_000564); Human adenovirus 7
LWTGVNPTRANCQIMASSESNDCKLILTLVKTGALVTAFVYVIGVSNDFNMLTTHKNINFTAELFFDSTGNLLTSLSSLKTPLNHKSGQNMATGALTNAKGFMPSTTAYPFNVNSREKENYIYGTCYYTASDHTAFPIDISVMLNQRALNNETSYCIRVTWSWNTGVAPEVQTSATTLVTSPFTFYYIREDD

SEQ ID NO: 61 - protein, 544 aa, Human adenovirus
  REGION 1..544: note = misc_feature - Ad7 penton; 1 - 544 (GenBank accession no. AP_000543); Human adenovirus 7
MRRRAVLGGAVVYPEGPPPSYESVMQQQAAMIQPPLEVPFVPPRYLAPTEGRNSIRYSELSPLYDTTKLYLVDNKSADIASLNYQNDHSNFLTTVVQNNDFTPTEASTQTINFDERSRWGGHLKTIMHTNMPNVNEYMFSNKFKARVMVSRKAPEGVTVNDTYDHKEDILKYEWFEFILPEGNFSATMTIDLMNNAIIDNYLEIGRQNGVLESDIGVKFDTRNFRLGWDPETKLIMPGVYTYEAFHPDIVLLPGCGVDFTESRLSNLLGIRKRHPFQEGFKIMYEDLEGGNIPALLDVTAYEESKKDTTTETTTLAVAEETSEDDNITRGDTYITEKHKREAAAAEVKKELKIQPLEKDSKSRSYNVLEDKINTAYRSWYLSYNYGNPKKGIRSWTLLTTSDVTCGAEQVYWSLPDMMQDPVTFRSTRQVNNYPVVGAELMPVFSKSFYNEQAVYSQQLRQATSLTHVFNRFPENQILIRPPAPTITTVSENVPALTDHGTLPLRSSIRGVQRVTVTDARRRTCPYVYKALGIVAPRVLSSRTF

SEQ ID NO: 62 - protein, 934 aa, Human adenovirus
  REGION 1..934: note = misc_feature - Ad7 hexon; 1 -934 (GenBank accession no. AP_000548); Human adenovirus 7
MATPSMMPQWAYMHIAGQDASEYLSPGLVQFARATDTYFSMGNKFRNPTVAPTHDVTTDRSQRLMLRFVPVDREDNTYSYKVRYTLAVGDNRVLDMASTFFDIRGVLDRGPSFKPYSGTAYNSLAPKGAPNTSQWIVTTGEDNATTYTFGIASTKGDNITKEGLEIGKDITADNKPIYADKTYQPEPQVGEESWTDIDGTNEKFGGRALKPATKMKPCYGSFARPTNIKGGQAKNRKVTPTEGDVEAEEPDIDMEFFDGREAADAFSPEIVLYTENVNLETPDSHVVYKPGTSDGNSHANLGQQAMPNRPNYIGFRDNFVGLMYYNSTGNMGVLAGQASQLNAVVDLQDRNTELSYQLLLDSLGDRSRYFSMWNQAVDSYDPDVRIIENHGVEDELPNYCFPLDGIGPGNKYQGIKPRDTAWEKDTKVSTANEIAIGNNLAMEINIQANLWRSFLYSNVALYLPDVYKYTPTNITLPANTNTYEYMNGRVVSPSLVDSYINIGARWSLDPMDNVNPFNHHRNAGLRYRSMLLGNGRYVPFHIQVPQKFFAVKNLLLLPGSYTYEWNFRKDVNMVLQSSLGNDLRTDGANISFTSINLYATFFPMAHNTASTLEAMLRNDTNDQSFNDYLSAANMLYPIPANATNIPISIPSRNWAAFRGWSFTRLKTKETPSLGSGFDPYFVYSGSIPYLDGTFYLNHTFKKVSIMFDSSVSWPGNDRLLSPNEFEIKRTVDGEGYNVAQCNMTKDWFLVQMLANYNIGYQGFYIPEGYKDRMYSFFRNFQPMSRQVVDEVNYTDYKAVTLPYQHNNSGFVGYLAPTMRQGEPYPANYPYPLIGTTAVKSVTQKKFLCDRTMWRIPFSSNFMSMGALTDLGQNLLYANSAHALDMTFEVDPMDEPTLLYLLFEVFDVVRVHQPHRGVIEAVYLRTPFSAGNATT

SEQ ID NO: 63 - protein, 42 aa, Human adenovirus
  REGION 1..42: note = misc_feature - Ad7 fiber tail; 1 - 42 (GenBank accession no. AP_000564); Human adenovirus 7
MTKRVRLSDSFNPVYPYEDESTSQHPFINPGFISPNGFTQSP

SEQ ID NO: 64 - DNA, 137 bp, Human adenovirus
  misc_feature 1..137: note = Ad11 5' (left) ITR; 1 - 137
  source 1..137: mol_type = genomic DNA
catcatcaataatataccttatagatggaatggtgccaatatgtaaatgaggtgattttaaaaagtgtggatcgtgtggtgattggctgtggggttaacggctaaaaggggcggtgcgaccgtgggaaaatgacgtt

SEQ ID NO: 65 - DNA, 137 bp, Human adenovirus
  misc_feature 1..137: note = Ad11 3' (right) ITR; 34658 - 34794
  source 1..137: mol_type = genomic DNA
aacgtcattttcccacggtcgcaccgccccttttagccgttaaccccacagccaatcaccacacgatccacactttttaaaatcacctcatttacatattggcaccattccatctataaggtatattattgatgatg

SEQ ID NO: 66 - DNA, 342 bp, Human adenovirus
  misc_feature 1..342: note = Ad11 Packaging Sequence; 138 - 479
  source 1..342: mol_type = genomic DNA
ttgtgggggtggagtttttttgcaagttgtcgcgggaaatgtgacgcataaaaaggcttttttctcacggaactacttagttttcccacggtatttaacaggaaatgaggtagttttgaccggatgcaagtgaaaattgttgattttcgcgcgaaaactgaatgaggaagtgtttttctgaataatgtggtatttatggcagggtggagtatttgttcagggccaggtagactttgacccattacgtggaggtttcgattaccgtgttttttacctgaatttccgcgtaccgtgtcaaagtcttctgtttttacgtaggtgtcagctgatcgctagggtatt

SEQ ID NO: 67 - DNA, 3452 bp, Human adenovirus
  misc_feature 1..3452: note = Ad11 E1; 480 - 3931
  source 1..3452: mol_type = genomic DNA
tatacctcagggtttgtgtcaagaggccactcttgagtgccagcgagaagagttttctcctctgcgccggcagtttaataataaaaaaatgagagatttgcgatttctgcctcaggaaataatctctgctgagactggaaatgaaatattggagcttgtggtgcacgccctgatgggagacgatccggagccacctgtgcagctttttgagcctcctacgcttcaggaactgtatgatttagaggtagagggatcggaggattctaatgaggaagctgtaaatggcttttttaccgattctatgcttttagctgctaatgaagggttagaattagatccgcctttggacacttttgatactccaggggtaattgtggaaagcggtacaggtgtaagaaaattacctgatttgagttccgtggactgtgatttgcactgctatgaagacgggtttcctccgagtgatgaggaggaccatgaaaaggagcagtccatgcagactgcagcgggtgagggagtgaaggctgccaatgttggttttcagttggattgcccggagcttcctggacatggctgtaagtcttgtgaatttcacaggaaaaatactggagtaaaggaactgttatgttcgctttgttatatgagaacgcactgccactttatttacagtaagtgtgtttaagttaaaatttaaaggaatatgctgtttttcacatgtatattgagtgtgagttttgtgcttcttattataggtcctgtgtctgatgctgatgaatcaccatctcctgattctactacctcacctcctgagattcaagcacctgttcctgtggacgtgcgcaagcccattcctgtgaagcttaagcctgggaaacgtccagcagtggaaaaacttgaggacttgttacagggtggggacggacctttggacttgagtacacggaaacgtccaagacaataagtgttccatatccgtgtttacttaaggtgacgtcaatatttgtgtgacagtgcaatgtaataaaaatatgttaactgttcactggtttttattgctttttgggcggggactcaggtatataagtagaagcagacctgtgtggttagctcataggagctggctttcatccatggaggtttgggccattttggaagaccttaggaagactaggcaactgttagagaacgcttcggacggagtctccggtttttggagattctggttcgctagtgaattagctagggtagtttttaggataaaacaggactataaccaagaatttgaaaagttgttggtagattgcccaggactttttgaagctcttaatttgggccatcaggttcactttaaagaaaaagttttatcagttttagacttttcaaccccaggtagaactgctgctgctgtggcttttcttacttttatattagataaatggatcccgcagactcatttcagcaggggatacgttttggatttcatagccacagcattgtggagaacatggaaggttcgcaagatgaggacaatcttaggttactggccagtgcagcctttgggtgtagcgggaatcctgaggcatccaccggtcatgccagcggttctggaggaggaacagcaagaggacaacccgagagccggcctggaccctccagtggaggaggcggagtagctgacttgtctcctgaactgcaacgggtgcttactggatctacgtccactggacgggataggggcgttaagagggagagggcatctagtggtactgatgctagatctgagttggctttaagtttaatgagtcgcagacgtcctgaaaccatttggtggcatgaggttcagaaagagggaagggatgaagtttctgtattgcaggagaaatattcactggaacaggtgaaaacatgttggttggagcctgaggatgattgggaggtggccattaaaaattatgccaagatagctttgaggcctgataaacagtataagattactagacggattaatatccggaatgcttgttacatatctggaaatggggctgaggtggtaatagatactcaagacaaggcagttattagatgctgcatgatggatatgtggcctggggtagtcggtatggaagcagtaacttttgtaaatgttaagtttaggggagatggttataatggaatagtgtttatggccaataccaaacttatattgcatggttgtagcttttttggtttcaacaatacctgtgtagatgcctggggacaggttagtgtacggggatgtagtttctatgcgtgttggattgccacagctggcagaaccaagagtcaattgtctctgaagaaatgcatatttcaaagatgtaacctgggcattctgaatgaaggcgaagcaagggtccgccactgcgcttctacagatactggatgttttattttgattaagggaaatgccagcgtaaagcataacatgatttgcggtgcttccgatgagaggccttatcaaatgctcacttgtgctggtgggcattgtaatatgctggctactgtgcatattgtttcccatcaacgcaaaaaatggcctgtttttgatcacaatgtgatgacgaagtgtaccatgcatgcaggtgggcgtagaggaatgtttatgccttaccagtgtaacatgaatcatgtgaaagtgttgttggaaccagatgccttttccagaatgagcctaacaggaatttttgacatgaacatgcaaatctggaagatcctgaggtatgatgatacgagatcgagggtacgcgcatgcgaatgcggaggcaagcatgccaggttccagccggtgtgtgtagatgtgactgaagatctcagaccggatcatttggttattgcccgcactggagcagagttcggatccagtggagaagaaactgactaaggtgagtattgggaaaactttggggtgggattttcagatggacagattgagtaaaaatttgttttttctgtcttgcagctgtcatgagtggaaacgcttcttttaaggggggagtcttcagcccttatctgacagggcgtctcccatcctgggcaggagttcgtcagaatgttatgggatctactgtggatggaagacccgtccaacccgccaattcttcaacgctgacctatgctactttaagttcttcacctttggacgcagctgcagctgccgccgccgcttctgttgccgctaacactgtgcttggaatgggttactatggaagcatcatggctaattccacttcctctaataacccttctaccctgactcaggacaagttacttgtccttttggcccagctggaggctttgacccaacgtctgggtgaactttctcagcaggtggtcgagttgcgagtacaaactgagtctgctgtcggcacggcaaagtctaaataaaaaaatcccagaatcaatgaataaataaa

SEQ ID NO: 68 - DNA, 21483 bp, Human adenovirus
  misc_feature 1..21483: note = Ad11 E2; 25445 - 3963
  source 1..21483: mol_type = genomic DNA
ttggaggctgtgattggtcctcatagaacttgatttcataggggtggtaatcttccggagcaaacttgcgcaagtaggcggaggtccacagtcccggggtcagttttaaactttgcccaggagaagacccatcgccttggctgctggggccttgcaattcaaaggtgcctattatctgggtttcgctcatcaactgggggttgcaagctagggaccggtggggcgtgcacagattgcagcggcagtgacactccagcaagccgtctccgctcacatcctcgatcacatccgagtggtaggagagatagttggccagacggaacaggtagcagtgactccatagcggcggggggcactcgcggtaggtgagaggcacaaagtcggagggcagtgcgcagcaggtggcgggcaggataccggagcgttccaggatgaaagagcgaaaattgttaagcatgctctggctcataaagtcaggcaatccgtttcgcaaagtaaccctgagacgctctgggaagatgaggtctgccaggtcggaagcgacggtgcgctcgtcgaaccctgtccacagaaccttaagagatttctgtaagagcttgtcaagctctttcaagttctgttcttctaaacattgctgccatacacccatgccggtttgccacgtgtggcacaggtacagatagacacaatcgcggatgtaatcacggcgggcttcccccttcagggtgctgtgcagcacgctttgtcctaggcgattctcatgcagaatacccatgtaggaaaccaggttggtgagttccacgttagatatcttgcatgcctgccgcacaaagccgtgtctaaaagtgtagtgcagattctcttcgagtttgcgcaaggtttctgaatcggtaaagaaacgtcggagacactctagttctacggtaaccagcaccacggccatcataagcttgcgacgctcttccaaatccctgggagagtcggtgcccagccatcgggttagctgctcatcactgaccactggtttaccctcatcacaggcatctgggtcatgcatgtcttctgaaaggggacttgcgcgcttaatgagtaactggtccatgaccgccgtcatgactttagggggcaggttgacagcgggatatgcgaagtgtgtgacctcgatgcttcgcttgagtactgcgagtctggcattatcgccttccaattccaccagaacgctgtgatgctcatccatgccattttctcccttttgcagagcatttgcggcccgagtctcattattgcccagaccctcgaagatctttggaacctcttccaaggaagctatatcaggtaagcgtgaaccaggtcccagattgagtagggcatcggcgcgggtgcgattagcgcggcaggagactggaattttttgatttttaaaaaagatgtgataggtagccagtacttctggcacagcaaaagctggataaaagtttaagcgaggatttggctcgcaggtgccgtttggctgacgtttggggggagtacgaggtgaaaagaggttaagctcgtaggcgcggctgagctcttccacactgatgggcacttcagttctgtccaataatgcatccttgactatgagcgactgtcttgctagatgtttaaggagcgcgtcttccccgtcaagccctatgaggtagtcggtgttctgatccctatttccagcatcttggtgatagttatctgctcgttgttttgggcagttttcatcctctctctctagaaagcgtttcaactcttcctcgtgttccaccggtgtcacatagcccgggtcttgctcgatgtctgtctcagactctttcgcttttttattctgcatgtcatgagatgcgtcgacctccttatcttctagggtagaggtggtggcaggactgggcggtggaatgcttaagctctgctccttttcctcgtcgctgaggacgagatgtgatggcactcgtggcgatgttgacagcaatggctgagtttccatgtctgttgtttctctgcctaggagaacacaatggccagccgcgaaggaaatcagttaagcgaccgccacagggagcacacccccgaacgcggaaggggttctgccagtcatccgccttccaggtcggaccgcagcccttcgcaatcgcctccacctctgcccccgaagagaaacacctgtcgccgtgtggggtcaggttcttctaccgacagtcagttggtaatggtgagcgaaacgtcacaatcctccctgtctccggaacggagcgacagtcctcctcctccgataccccccaaaaagaagccaaggaagaccaaacatatccccatgcaagacatcagtcaagacagcgaagaagaaagagaagaggcgcaacttgtagcagtgggtttcagctacccgcccgtgcgcatcgttgagaaggatggcaaaagaagcattgagaagatcgctaaagatgaccctctggctaaaggagctgctgcctgcactgttaagaatccgattagcttgcccctggtgtctgcttgggagaaaggcatggaagtgatgtgtctgctgatggagaagtacaggctggataacgaacttagaacctcttttaaactaatgcctgagcaacacgaacaatacaagcgcatctgtcaccagtacgtaaacgaggagcaccgaggcatccagttaactttcactagtcacaagacactgagcacgatgatgggaagatttctgcagggaatgatacattctttttctcagatcgcccaccataattgggaatgtacaggctgtgcgttgtggcctcatggctgcaatgattatgagggcaagctgaagtgcctgcatggcaatattatgattcagaaggagcagattatcgagatggatgtggccagcgagaacggacaacgagccttaaaggagaatcccgagcgaaccaaaatcacccaaaaccgctggggcagaagtgtggtgcaaatagctaacaatgacgcccgctgctgtgtgaatgatgccggctgtgcagctaaccagttttcgagcaggtcctgcgggatgttttataccgagggtagtaaagcccagcaggctttcaagcaatatgatgctttcatgagagccgtgtatccaggaatcagacaggatcaggccaagatgatactgatccccctgcactgcgattgcaaccacaagcctaattgggtgcccgccatgggtaggcagacctgcaagatgaccccgttcagcattgccaatgctgaagatctggatgtgggcatgattgcagatcccaccgtgctggcaagcgtgagacatccgtcgctgatggtgtttcagtgctgcaatccggtgtaccgcaactctcgcgctcaaagcactggtcctaattgtgatttcaagatttcggctcctgacctgcttggagctttgcagctgaccagaaagctgtggagtgacatcctgcccgatataccggttcccaagttggtgattcccgaattcaagtggcaacccaagtatcagttccgcaacgtatcactgcctgcgggtcattctgattctcgtcagaacccattcgacttgtaaataaataagtaatgcagagccttgatacatgtaaaaaaataaagtgatgtttattgaacacgttgtttacatgagtcattattgaacatccatacggtcgaacgcagtggccctttcgatgtgtgtacgatgggagcgaaaataaggcgaatgggtattaagaaaatggtagagtgctttttgattgtcacacagggtgggctggactttaggagaatgaagcatgttgtttggcactccagttagcaatttcatggtggggtttccgtccatgggacggtcaggccagtgcacaaaggcgtgaaggaacatgcagcagaaaagtccgcaggcggcagaacggggaccctgcacggtctgggtagatttttccagcgtaatacagcggtccttggtagcaagagcgctgcggcgcaggagaccctcatattcaaactggtaaatctgtttgagacgatcatccgagaatccaaaaggatcaaaaaggtagcaggtgttagaacgtgggttccaaccgaaagccaaccagtgctctccccccgtctcacgtccggccgtatttacaatggcacaggcgagcttatcgggggccatgaaccccgggaagcgcttatcgtaggttcccaaaaaatagggtccgcaacccaggtcttggacaatggctctgagctcttgctcgctggagccgttttgggatccgcaggccatggttgcagctgctatttgcaagaagcaagaagcttcttacgtggtagcgttaccggccgagaacggtgtacgcaggtagactgcctcgatgatgccgcggtgtggctgatgcactctgaccacgtcgaaaacttcgaagagaagataaagcagggtgggctcatccatgggatccacctcaaaggtcatgtccagagcatgagctgagttggcatagagcatattctgtcccaagtctgtaagggcccccatagacatgaagttgctcgagaacggtatgcgccacatggttctgtcacacaagaactttttctgcgtaacactatttacggcagttgttccaatgagtggatagggatagttagcgggatagggttgaccttggcgcatggtcggagccatgtaacccacaaagccagagttgttgtgttggtagggtatggcgacggccttgaagtctttgtaattgacctcatcaaccacctgcctgctcatgggctggaagtttctgaaaaatgaatacatgcgatctttgtatccttctggaatgtagaagccctgatagccgatgttgtagttggcgagcatctgtaccaagaaccagtctttggtcatgttgcattgggctacgttgtagccttcgccatccacagtgcgctttatttcaaattcgttaggagatagtaacctgtcatttccaggccagctcactgaagagtcaaacatgatggaaaccttcttaaaagtgtggttcaggtagaaggtaccatccaggtagggaatagaaccagaatagacaaagtaggggtcaaatccagaccccaaagagggagtttctttggttttcagtctggtaaatgaccagcctctgaaagccgcccagttgcgagaaggaatggaaatgggaatattggttgcattggcaggaatggggtagagcatgttagctgcagataggtagtcgttgaatgactgatcattggtgtcattccgcagcatggcttcaagggtggaagcggtgttgtgagccatggggaaaaaagtagcatagaggttgatgctcgtgaaactgatgctggcgccatctacccgcaggtcgttaccgagggaactctgtagaaccatgttcacatccttcctaaagttccactcataagtgtaggagcctgggagaagcagcaggtttttaacagcgaagaatttttgaggcacttgtatgtggaaaggcacataacgtccgttacccagaagcatggatcggtaacgcaagccagcgttacggtggtggttgaatgggttgacattgtccatggcatccagagaccacctggcaccaatgttcacataggtgtctactagagatggcggcaccacccgcccgttcatgtagtcgtaggtgtttttgttttctggaagagtgacattggacggggtgtatttgtacgagtctgggagatatagagccacattggaataaaggaaacttcgccatagattggcttgaaggttaatttccatggcaaacaaattaccctgtccgatctcacttgttccatttacttcaggttccttccaattaggcgcattgtctccatttggaactattgatttgtaactggttgttggaacacctatgccgtccagtggaaaacagtagttgggaagttcatcttccacaccatgattttcaataacacgtacatcaggatcataactgtccacagcctgattccacatgctaaagtatctggttctgtcgcccagagagtcaagcaagagttggtaagaaagttctgtgtttctgtcctgcaagtcaaccactgcatttaactgagacgcttgaccagccagcacccccatgttaccagtactgttatagtacataagtccaataaagttatctctgaagccaatgtagttgggtctgttgggcatagattgttgtcccaaattagcttcggaacttgtgtcttctgttccaggtttgtacactacatgagtgtctggagtttccaaatttacattttctgcatacatgacaattttaggacttaagtttgttttctgcgatgccgcatcaaaaaactccatgtcgatatcatattcgactttctgatttggctgctccgttgttttttgttttgcctgaccgcctttcacattagtaggtttggcaaaggacccgtagcatggtttcatcttagtatcgggtttgagagccctgcctccatacttttcggtttttccatcaaggtcagtccaagtttcatctcccagctgaggttctggctgatatgttttatcagcataaatcggtttactttcttcatctgaaacttccaaacctactgggagtccttcttttgtaatttcagcttcagcttttacaggagcattgccaaaagtgtaagtagtagtattggtttcctcttctgttacgtgttcctcaccagttgtattttttacaccttctgcaatccactgagatgtatttggagcgcctttaggagccagggagttgtaagccgtaccagaatagggtttgaaactgggacctctgtccaacacacccctaatgtcaaagaacgtgctggccatatccagcactctgttgtcgcccacggccagggtgtaccgcactttgtaagagtatgtattgtcctcccggtcaacgggcacgaagcgcaacatgagccgctggctacggtcggtggtcacatcgtgggtcggcgctacggtgggatttctaaacttatttcccagattgaagtaggtgtctgtggcgcgggcgaactgcaccagacccggactcaggtactccgaagcatcctgtccggcgatgtgcatgtatgcccattggggcagcatcgatggggtggccatcttgaaagtaactcagcgtcgacgcacgacctcttccttttttcctctgctgctgtgacggcgtgtaatgacacatatacacagataggcaagttaagcgctactccatatttaattaaaagcagcgacggcgttttacactttgcacgcctagacccacgatgctgttcagagtattttgccagtgcgcatttggacgaggagcgcccccgggacgtgacctggctacggcgactggtttcggggcagcgacaggcttagaagcgggtacagcagtagcagcagggggagggggcaaatccaaggtgacgggtcgatgcaactgagaaggtttcatcaccccggtggccattggggctatcggtctagtggtgggcattccaagcttcgttgcttcctcataagaaggcggttcatctacgcgcgtcaccagcgtctcttccaaatcgggacgcggacgcttgtcgcctcgtttttctggcggaggaatttcttcctccacttgcatttcacctggggttgctggcggcgggtccaaacgactgtttatctttttctgcacagcctggttagccaaatctaccactccattgatgccggaagctatcccatcgactactttttgttggaagttctggtctttaagtttatttctaagcgcctgtcctgtactgctgttccaagctttgttcccgtatgtttttatggttgagccaaaatttttaagcccgctccagatactgctccaattgaaggcgcccccgttcagttggctcgtgccgatgtcgctccaggtgcccatgtacggcttcgtgccgtgtcgcggagccaaggatgaaaaattgatgtcttccatctctaagaaaacatagtcacaggaccaggagtgtcagagtccattgtatttttttttttttatttatacgtttttttccaatgtcaatgtcgttgcgaggcctgaaccgccacggaagctatgcctggtatcgcgccaattgcagcagcgataattggaattaaggctggtaaaaaaccaccccgcaattgcttgcggatagcacgccgtcgcctgtagcgtcgcattccgcgtcccaacatccctcttctacggcgcgagtttcttcctcggtaaccagtgatgggaacgcgaaggcgacaagtgagggccatatctgcaaggaggcagcggcaacattgattaagtgatgatactcggatggtaacgcgcacgcggcagtgtcaaaggttccgcactaccattgcggtacacttgccgcaccagggcgccgggagtcggtttgcttgtgcgtctacggcgacgactgcgatttgcaggtgtcttgcggcgacggcgggaggtactgtttcggctgcgatagtagcgagtgcctcggtaaccaggagtaggaataatagatgggtgtacaacataattgggcatcaacagacttgctggaccgtactttcgtcgggatcttcgagtgggaccggcggcgtcagttgtaataggcatgggcatccatggatccgtttgcacttcagtggaggtggcagtaggctttgcgggttcagtttgcacttccatactttcagtgggaatcttaatgtctacagtttgtacccccagaccaggcgctacctgcttaatgggtctcactttaacctcaggttgaatatctggatccacttttactttctccaaaacgtcctccaacttctggcgtttgggtaccatcagttgcatagtgggatacaaatcttcaccttcgcgtttaacacctgttcgcggagttacgggtaacacttgctgcaaagtgaccggtttaagactaggggtgggatttccatgatccaagggtatcgacactgtctcatccttggaagttattctactacgcttgccataagcaaactcgcctaatcggtcagccgcctgctcaagaatatcatcatccccgtacacctcatcataggaacgcttaaaagtagcgcttgaacgctcgccgggtgtaaagaccaccgaagttccaggtctcaacacatgtcgaactttgcgcccacgccattgcacgcgtcgccgtggggcaaactcgcgcacaaactccgccagcccatcatcgccatcttcctcttcttttttgtcctttttaacccgcttgattttgcggggttttttttcatccttcaacggttggccgtagacttcaggtgcgataacctgcagcatttcttccttgtatttgcgcttggacatcctcgccgctgggacacaacatcggagactgctcagtatcttctaagtgcgagggggacgggtgcgcacgggtacacgttgaccggtggcagcgtcacgcacccagtatacattgcctcttcgcgattgggccatgtcggcaatagtcgccgctgcgacagcggctgcttgcctgcgggacctgccggcgctggcgcccgaagctgcacgtctggccgccctaagcatggctcttcgccccacgcgtctagctcttcgtagcagagctcttgcggctcgcatggcagtggtagctcggtggcgtctggcaatgcgccttcgccggctcttacgtcgagcatagttgcgagcgtcagccactacactgtcaataactgcatccacagtagatgtaggcgcagtaggagtataattacgggcgtcggcaaccacctgatcgattacatcatcgacggtggttcgaacgcgagtgcggcccttgagggcgccccatggagcgcgaaaatgtccgcgaacacggacaggatgttgggtagaacgtttgcgtgcgcctccgtacatcttgcttggagcgcgcagaccccaaccggtgttattactgggcgagataagaatggacattttttttttttttagaaagtgcggcttgaaaggacgcgcggtgcgactatgcccagtgccttgtacacgtagggacaggtgcggcgtctggcgtcagtaacggtcacacgttggactccccggatactgctgcgcaacggcagggtcccgtgatctgtgagagcaggaacgttttcactgacggtggtaatggtgggcgccggcggacggattaaaatctggttctcaggaaagcggttgaagacgtgcgtaagcgaggtggactggcggagctgctgggagtacacagcttgttcgttgtagaagctctttgagaagacgggcataagctctgcacccaccacagggtagttactgacttgtctagtggagcggaaagtgacaggatccttcatcatgtctggaagcgaccagtagacctgctctgctccgcaggtgacatctgaggtggtgagcaatgtccaggaacgcactcctttttcgggatcgccataattgtacgaaagataccaactgcgataggctgtgttgattttgtcttccaacacattatagcttctattcttactatctttttctacaggttgaatagtgagtttcacgtccgttccttcagacacatcggccaataatgattctgcagtcggaacaggtgttggcgcaaaattgtctcctctgacctctccagcgttagcaacccttgtagagtcgctggcaactatgtttgccttagcttctgcagcagctgtagcagcttctattttggctttttgttctttcttactgttctcataggcatctacatccaagagggccggaatattaccaccttctaaatcttcatacaaaatcttaaaaccctcttgaaatggctgtttttttctgataccaagaaggttgctcaaacgactctcggtaaaatccactccgcagccaggcagtaagacaatgtcaggatggaaggcttcatacgtatacactccaggcatgatcaacttggtttcgggatcccatcccagcttgaagttcctggtgtcgaacttaacaccaatgtcactttcaagcactccattctgtctacccactttcaagtaattatctatgatggcattgttcatcaaatcaatagtcatagtaactgaaaagttgccttctggcaaagtaaactcgaaccactcatatttcaaaatatcctgcttgtgatcataagtatccccaactgcagcaccgtcgggaggttttctggacaccatcacacgcgctttgaacttgttactaaacatatactcgttcacgtttggcatgttagtatgcatgatggtctttagctgaccgccccaccgcgatcgttcatcaaagttaatggtctgggtgctggcttccgtaggggtaaagtcattgttttgcaccaccgtggtcaagaagttgctgtggtcattctgatagttcagagaagcaatgtccgccgacttgttgtccaccagatacaacctggtggtatcgtactgaggtgccagttccgaataacgaatgctgtttctgccctccgtaggtgccaggtatcgcggaggcacaaagggagcctccagtggggattgcatcaccgccgtcgcctgctgctgctgcatcacgctctcgtacgaaggaggaggaccctccggatacaccaccgctccgcctagcacgactcgcctcattatactagacacagataataaagaagaacgaacgtacgctcgtcgccatggccttggtgagttttttttttatttttttttacaacataccacccaagcgagggcgcaaatgagcaaacgggttgccccttcctctcccacccaagtccagcacgctgctatcatcggccgaatcctcatcgtcccacacaagacccctctgtctgtcatggcgctggcgtctacggctcgctctacttgtaatccccatgatcccaggctcgtctctgtgatcctgagcataagtcttccatctactcattttatccaccaaactttctattccattgtttgggaaatttttttctcttgccggtctgagcaaggaatcgtttagatactcctcttcgcccattaaactcgggcgacttattctacccacttcgctgctacgtacactgtgtagagaaaagggtagactaggaaaaggacttgcagactcgggctcagccgcggtagcacccatgaccccggacagcgatgcagaagaatgcattctatcgccgccttcctttttccacgtgcgatgatcagaaagaggtgaaaaaacatcgctgtccacgtcgtcccacagaaatccgtcattagggtcgggcatgtcatattcgcccgtgtagaaaccaggtgggggcagccagtgcgggtttaagatggcattggtgaaataatcagagttcatagcggcagctctgtgcaagtagtccagcagtttgttaatgaaaggtcggttactggcatacatgctgggctccatatttcgcgctgtcatgtccagtgctgcagtcggagttgccccctcttgcatcagaaacaatcccacgctctgctgcacatatctaaggatcctctcctcctccgcagtaagagcatattgaggagggatcttttgagaccgattggtaagcaagaagttcagagtggcttccaaactgccagtgtcttcctgtcccaaagcgcgactgacttgggtaatttcttgataggtctgctcgtccacctgactttgccctatggcttcgcgatacaggtttagtaggtaacccaaataggaattacggtcgatgctaccgctgtcggtgaaaggagctaccaacagtaataataggcgggagttcggagttaacaagctagacacggttgctctttctcctaccggggcatgcactccccacaaacctttaaggtttttaaaagcttggctcagatttaccgtctgcaagccctgtctgctagtctgaaagaagtaatcaggaccggactgatacacttcgctctgaggtacttctgataccatcagtctcaaagcgcttaaaaagttagtataatcctgttgaccacgcggcacattagcaggctgagtactcaagaaagcatttaacgccaccagcgaacccaggttggcatcacgctggaacctttcgcgctgagacacggcttcgcgtacatctgttatcatacggtccaaattggtttgcacattgctactgttgtagcgagccacgcgttctaagagagcgttgtataccagtccggcctcatctggacgaatagctttgttctccaccaacgcgttcacgatggccaggaccttctcatgagtgggattagagcgggaaggcactacagcttccatgatggccgatagacggttggcctggggttgctgtctaaaggcttcggggttgcgagtcgtcaacgccatgatacgttgcatggcctgggtccaatcgtccgaggagttaatgccggacggctggctctgcagcgccgcccgcattgcgggatccggtgcttgctgttccatctagcaaaaaacacgggttgtgccatcagtcttccaagtactcgccctcttcctcctcgccttcatccgcctcttctatgtaaggaagctcacatcctgccgtcgcggcgctcagagccctgcgactaggctgccactgcaagtcagctcccatgtcgaagtaattctcaccctcggttccagctccagtcagagctctttgcaaactgtgcatcagttccctgtcgcttaactcgcgcctcctgctggcgctaaccgcgcgatgcattctgtcattgcgatacaccccaagatcatcgctcagggtcaagaccttgagcgtcatgcgcatgtagaacccatctatcttcacctccttgtctatgggaacgtatggagtcttgtagattttgcgagcgtaatattttcccaagctcaaaaccgagtaattgatggcagccaccttctcggccaggcccaggctccgctcctgcactatgatactctgtagaatgttgataagatcatacaaccatctcccctcgggttcggtgatgttcagcagcgcctctctgaaagcctcattgtctctgctgtgttgcaccaccagaaacagctgggcggtcagaggtttgctagtagggttctgaatgatagcttccatcaaatcccacaaatgcatcaaaccaagggtaacttcttcgcgggcaatcagggttcgcacatgattattaaaagacttttggaagttacgctcttcctttactgtctgctcgtaagccgatacaaggttggctgcagccacgtgtgccctggcaggactgatccctgtcatttcatcaacttcgaaatcctcgtcccgcaacactcgtcttcggtccaaaccgtgacgcagctcacgacccgcgttaaagcgggaagctcgcatctcctccggctcctcgccgcttctgtctctaaataggttctgttggggcacatacgcctcgcgagaatcttttttcagttgaactcgcggatgccgctcgggtgaaggcgcacctagacgtgccagtccttcgccctcttccaagtccagatcataggcgggctgtcccgcaccgctcacggcggcagttgcagtagttgcagggacagccttttgtgattgctgctgctgctgctgcgaggggggctgttgttgggggcgcatctgtcgcagcacgggatgcatctgagcggcaaaaaaaaaaaataggactcacttccctgccattcggaaaccagcaaaacgactcgattccgtatcctggatttttgtaggctgggtcgagacgggagtgccaataccacgttagccgcggctccggccggctcgagtacaagtctcgaaccggggtacaccgcgacccaacccgttcacgttcctccaggctacggagtcgagtcgctgaacgctttcattttctccgtgtctatagagcatcaatgactgcgcgcgcctcactggtcaaaccgtgcctacaatgaactacttcatgccgctacgcaacatttggaaccgcgtacgcgagtttcctcgggcttctactaccgccgcaggaatcacctggatgtccaggtacatctacggctatcaccgccttatgttggaagacctcgcccctggcgctccagctacagaacgatggcctctctaccgccaaccaccgccgcattttcttatagggtaccagtatctggtgcgcacctgcaacgattacatctttgacacccgcgcctattcgcgccttaaatacaccgagctcgtgcgccctggtcaccagacagttaactggtcagtcatggccaactgtgcttacaccattaatacaggagcttaccaccgctttgtggattttgatgactttcaagccacccttacccaagtacagcaagccatcctcgccgaaagagtcgtagctgacttggcactggtacaaccaatgcgcggatttggactcacacgtatgcatggcagaacgggtgaggaagaagtgcccgtagaacggctcatgcaagactactacaaagatcttgctagatgtcaggataatgcttggggaatggccaatcgcctgcgtatccagcaagccggacccaaagacctggtgctcctcgccaccatccgccgtcttagaactgcctactttaatttcatcaccagcagcatcgtctcaccttcccgagatgaagaagaaacagaagacccagaccgaacacataaccacccccgcccacaagaagccgtactcagcctaccttgtgactgtgactggttagacgctttcgtcgaaaggttttcagatcccgtggatcttgacacgatcagatctctgcgtgcagtccctacgggccaattaataaaatgtataatcagcgccctctccctcccaaacggagaacctcccagtcaccactttaaggagatgcgcggcggtgtttttactctgcgaccgcgcgagaacggccgcgccgtcactgaaaccatgcgccgccgccgcggagaggtcattgaacgattcatcgaccgtttgcccgtgcgccgtcgacgtcgccgcgtgccccctccgcccccgcctgaagacgaagaagagatgttagtggaagaagagatagaagaggaagaagagatcccgggagccttcgaacgcgaagtacgggccaccatagccgaactcatccgtcttctcgaggaggaattgaccgtgtccgcgcgaaactcccagttttttaattttgccgtggacttctacgaggccatggagcgcttggaagctctgggcgatgttagcgaaatgccgctgagacgatggatcatgtatttcttcgtcgccgaacacattgccaccacactcaactacctttttcagcgcctatgcaactatgcggtcttcaccagacacgtggagcttaacctcgctcaggtggtgatgcgcgcaagagactccgagggggccgtggtttacagccgcgtctggaacgaggcgggcatgaatgcattctcccaactcatgggccgtatctccaatgacctcgcggccaccgtcgaaagagcgggtcgcggagatcttcaggaggaagaaatcgagcagttcatggcggagatcgcctaccaggacaactctggtgacgtacaagaaatactgagacaagctgccgttaacgataccgaaattgattctgttgaactctctttcaggttcaagctcacggggccggtagctttcacccagagacgtcagatacaagacgtcaatcgacgcgtggtggcgcacgcaagtcttctcagagcgcagtaccagaacctgcccgtgcgcggcgccgacgtgccactaccagccatgccctcgggtccggaacaaccgctgccgcccggcgcgcgtccccgtcaccgcttctgagcatgcaagaagcaagagagccaccaccgatcaaaagaaaaaacaaaggtacggtagtggcgcccaaaggacacggaaccctgcaagccattgacgtctctacaaacgaacctgtggaaatcaagtaccatctgaacctcccgcacgccctggaaaagatcatgcaagttaatcttctgtccctacctactaacctgagtccgcagcgtctcaggactctggacagctccagcctgcgcgctctcgtccttcagctccgcccctcccgcgccgaggtctggacttgcctcccgcgggggctcgtcagcatgaccaccatcgaaacagaagatgaacaggccgatacagcgaatatagaagagcacgagatacaatcgccaggcctcggcttcccactgaaatttctcgtcaagggaagccaggtacaactcattcacgagatacaacccgtgcaacgctgcgactactgcggccgtctgtacaagcacaaacacgaatgctcggcgcgccgcagaaacttctacttccatcacatcaacagccaatcctccaactggtggcaggaaatccagttcttcccgatcggctctcatcctcgcacagaaagactcttcctgacctacgatgtggaaacttacacctggatgggatcctttggcaaacaactagttcctttcatgctggtcatgaaactctcaggagaagagcgtctcgtcaacatggcccacgatctagccattaaactcaagtgggatcgatggcaacaagaccccagaaccttctactgtgtcactccagaaaaaatggcaattggccggcattttcgtcagtatcgggaccagttacaaacagcactggcggtagatctttggtcatcattcctacatgcaaatcctcacctgcacgaatgggctctcgaacactacgccttatctgaccccacagacctaacctttgatgagctcagtaagctacctcacgtcagaggcacgccgcgtttcatagaattatacatcgtaggacacaacatcaacggtttcgacgagatcgtcctagctgcccaggtgatcaacaatcgagcggaagtaccacagccttttcgcatcactcgcaattttatgcccagagccggtaagattctcttcaatgatgttactttcgctttgcccaaccccgcctacaagaaacgggtagacttccaactctgggaacagggagcctgtgacgacatcgacttcaaataccaatttctcaaagtcatggtcagagacacctttgcccttactcacgcttcgctacgaaaagctgctcaagcatactctctacccgtagagaagggctgctgcccttacaaggcagttaatcagttctacatgctaggatcttaccgtgcagacaaagacgggtttccgctagaagagtactggaaggatcgcgaagaataccttctcaaccgcgaactgtgggaaaagaaaaaccaaccaggttatgacatcattcaagaaacacttgactactgcgccctagacgtacttgtcaccgccgaactggtaaccaagcttcaagaatcttatgcccactttgtcagagactctgtaggtctacctcatgcccatttcaacatttttcaaagacccaccatctcttccaattctcacgccatctttcgccagatcgtctacagaacagaaaaacccaatcgcaccaacttgggtccggggctgctagcgccatcacatgaactatatgactatgtgcgagcaagtatcagaggggggcgatgctatccaacctacataggcatctttgaggatcccatctacgtctatgacatctgtggcatgtatgcctctgcactcacccatcccatgccatggggcagtccccttaacccatatgagcgcgcactggcagctcgagaatggcaaatggccttagatgaccccactcccatcagctattttgataaggatttacttccgggaatctttaccatggatgcagaccctcccgatgaacttatgctagacccacttccccctttctgttctaggaaaggaggtaggctctgttggaccaatgaaccccttcgaggcgaggtggccaccagtgtggatttaattaccttgcataatcgagggtggcaagtgagaatcgtgccagatgaattaacaactatcttccccgaatggaagtgcctggcacgcgagtatgtccaactcaacatcgccgccaaagagcgcgcggacaaggaaaagaaccaaaccatgcgatccattgccaaacttttatccaacgccctgtatggatcatttgccaccaaacttgacaataaaaaaattgtgttttctgaccaaatggacgaaaacctcatgaaaggcatctcaaccggcactgtcaatatcaaatcctcctcgttcttagaaactgacaacctgagtgcagaggtcatgcccgccttcgagagggaatacctaccccaacagctgacgttcctggacagcgatccggaagacagtgaggaagagcaaagaaccgcccccttttatacccccccagcggggaccccaggtcacgtgaaatacacctacaagccaatcacattcctggatgttgaagagggtgacatgtgtttgcatactttggaaaaggtggaccccctggttgacaacgatcgctacccctcccacatagcctcctttgtgctggcctggacgcgcgcctttgtatcagagtggtcagagttcctgtacgaagaagaccgaggcactccactggagaagaggcctgtaaaatcagtctacggggacacggacagcctgtttgtcactcaacgaggacacgaactcatggagaccaaaggtaagaaacgcatcaaaaaatatggcggaaaacttgtttttgaccccaatgaaccggatttaacctggctggtggaatgtgaaactgtttgcgcctcctgcggcgcagatgcatactccccagaatccgttttccttgcgcccaagttgtatgcgctgaaatgcctatactgcccggtatgcaagaaaacttccaaaggtaagctccgcgccaaaggccacgcagccgaggcgctcaactacgaactcatggtaaactgctacttggccgacatacagggcgccaagcgacagaagttttcgaccagcaggatgagtctgaagcgcaccctggcaagcgcccaagcaggcgcacaccccttcactgtgacggaaacaaccctgactcgaacactgagaccctggaaggaccgaaccctggcagcgctggacgcccatcgtctcataccctattccaggagccgtccaaacccgcgaaacgaggaggtctgctggatcgagatgccatagaacacatcactgaactgtggaacagactagaacttttgcagcaaactctctccaaaatgcccatggctgacggtctgaaaccgctgaaaaacttttcctcactacaagaacttctatcactaggaggagagcgcctcctaatggatttggtgcgggaaaatatgcatgtaagggaaatgatgaacgaggtggcccccttgcttcgagaagacggcagttgccgttccctaaactaccacctgcaacccgtaatcggaatcatttatggccccaccggatgtggcaaatctcaattgctcagaaatttgctatcatcacaattaatcacccccgccccagaaacggtgtttttcatagccccccaggtggacatgattccaccctcggaactgaaagcttgggaaatgcaaatctgtgaggggaactatgctccggggcccgaaggaacattcataccccaatctggtactctccgccccaaattcattaaaatggcttatgatgatttaactcaggaacataactatgatgtgtcagacccacggaacgtgtttgcccgcgccgctgcccacggccccattgctattatcatggatgagtgcatggaaaatcttggaggacacaagggtgtctccaaatttttccacgcttttccatccaagctgcacgataaatttcctaaatgtaccggatacaccgtcttggtggtccttcataacatgaacccaagacgggatcttggcggcaatattgccaacttaaaaatccaatccaaaatgcacataatttcaccccgaatgcacccatcccagctcaaccggtttgtaaacacctacaccaagggcttatctgtggcaatcagcctacttctaaaagatattgtgcaacaccatgcactgcgaccttgttatgactgggtgatttacaacactaccccggagcatgaatcccttcaatggagctatctccaccccaaagacggcctaatgcccatgtatctaaacattcaatcccacctctataggatcctggaaaaaatccaccgagttctcaatgatagagatcggtggtctagggcataccgtgcgcgaaaaatgaaataaa

SEQ ID NO: 69 - DNA, 3759 bp, Human adenovirus
  misc_feature 1..3759: note = Ad11 E3; 26866 - 30624
  source 1..3759: mol_type = genomic DNA
tataaaacgcctgatgatcagaggccgaggtatccagctcaacgacgagtcggtgagctctccgcttggtctacgaccagacggaatctttcagattgccggctgcgggagatcttccttcacccctcgtcaggctgttctgactttggaaagttcgtcttcgcaaccccgctcgggcggaatcgggaccgttcaatttgtggaggagtttactccctctgtctacttcaaccccttctccggatctcctgggcattacccggacgagttcataccgaacttcgacgcgattagcgagtcagtggacggctacgattgatgtctggtgacgcggctgagctatctcggctgcgacatctagaccactgccgccgctttcgctgctttgcccgggaactcattgagttcatctacttcgaactccccaaggatcaccctcaaggtccggcccacggagtgcggatttctatcgaaggcaaaatagactctcgcctgcaacgaattttctcccagcggcccgtgctgatcgagcgagaccagggaaacaccacggtttccatctactgcatttgtaatcaccccggattgcatgaaagcctttgctgtcttatgtgtactgagtttaataaaaactgaattaagactctcctacggactgccgcttcttcaacccggattttacaaccagaagaacgaaacttttcctgtcgtccaggactctgttaacttcacctttcctactcacaaactagaagctcaacgactacaccgcttttccagaagcattttccctactaatactactttcaaaaccggaggtgagctccaaggtcttcctacagaaaacccttgggtggaagcgggccttgtagtgctaggaattcttgcgggtgggcttgtgattattctttgctacctatacacaccttgcttcactttcttagtggtgttgtggtattggtttaaaaaatggggcccatactagtcttgcttgttttactttcgcttttggaaccgggttctgccaattacgatccatgtctagacttcgacccagaaaactgcacacttacttttgcacccgacacaagccgcatctgtggagttcttattaagtgcggatgggaatgcaggtccgttgaaattacacacaataacaaaacctggaacaataccttatccaccacatgggagccaggagttcccgagtggtacactgtctctgtccgaggtcctgacggttccatccgcattagtaacaacactttcattttttctgaaatgtgcgatctggccatgttcatgagcaaacagtattctctatggcctcctagcaaggacaacatcgtaacgttctccattgcttattgcttgtgcgcttgccttcttactgctttactgtgcgtatgcatacacctgcttgtaaccactcgcatcaaaaacgccaataacaaagaaaaaatgccttaacctctttctgtttacagacatggcttctcttacatctctcatatttgtcagcattgtcactgccgctcatggacaaacagtcgtctctatccctctaggacataattacactctcataggacccccaatcacttcagaggtcatctggaccaaactgggaagcgttgattactttgatataatctgcaacaaaacaaaaccaataatagtaacttgcaacatacaaaatcttacattgattaatgttagcaaagtttacagcggttactattatggttatgacagatacagtagtcaatatagaaattacttggttcgtgttacccagttgaaaaccacgaaaatgccaaatatggcaaagattcgatccgatgacaattctctagaaacttttacatctcccaccacacccgacgaaaaaaacatcccagattcaatgattgcaattgttgcagcggtggcagtggtgatggcactaataataatatgcatgcttttatatgcttgtcgctacaaaaagtttcatcctaaaaaacaagatctcctactaaggcttaacatttaatttctttttatacagccatggtttccactaccacattccttatgcttactagtctcgcaactctgacttctgctcgctcacacctcactgtaactataggctcaaactgcacactaaaaggacctcaaggtggtcatgtcttttggtggagaatatatgacaatggatggtttacaaaaccatgtgaccaacctggtagatttttctgcaacggcagagacctaaccattatcaacgtgacagcaaatgacaaaggcttctattatggaaccgactataaaagtagtttagattataacattattgtactgccatctaccactccagcaccccgcacaactactttctctagcagcagtgtcgctaacaatacaatttccaatccaacctttgccgcgcttttaaaacgcactgtgaataattctacaacttcacatacaacaatttccacttcaacaatcagcattatcgctgcagtgacaattggaatatctattcttgtttttaccataacctactacgcctgctgctatagaaaagacaaacataaaggtgatccattacttagatttgatatttaatttgttctttttttttttatttacagtatggtgaacaccaatcatggtacctagaaatttcttcttcaccatactcatttgtgcatttaatgtttgcgctactttcacagcagtagccacagcaaccccagactgtataggagcatttgcttcctatgcactttttgcttttgttacttgcatctgcgtatgtagcatagtctgcctggttattaattttttccaacttatagactggatccttgtgcgaattgcctacctgcgccaccatcccgaataccgcaaccaaaatatcgcggcacttcttagactcatctaaaaccatgcaggctatactaccaatatttttgcttctattgcttccctacgctgtctcaaccccagctgcctatagtactccaccagaacaccttagaaaatgcaaattccaacaaccgtggtcatttcttgcttgctatcgagaaaaatcagaaattcccccaaatttaataatgattgctggaataattaatataatctgttgcaccataatttcatttttgatataccccctatttgattttggctggaatgctcccaatgcacatgatcatccacaagacccagaggaacacattcccctacaaaacatgcaacatccaatagcgctaatagattacgaaagtgaaccacaacccccactactccctgctattagttacttcaacctaaccggcggagatgactgaaacactcaccacctccaattccgccgaggatctgctcgatatggacggccgcgtctcagaacagcgactcgcccaactacgcatccgccagcagcaggaacgcgcggccaaagagctcagagatgtcatccaaattcaccaatgcaaaaaaggcatattctgtttggtaaaacaagccaagatatcctacgagatcaccgctactgaccatcgcctctcttacgaacttggcccccaacgacaaaaatttacctgcatggtgggaatcaaccccatagttatcacccagcaaagtggagatactaagggttgcattcactgctcctgcgattccatcgagtgcacctacaccctgctgaagaccctatacggcctaagagacctgctaccaatgaattaaaaaatgattaataaa

SEQ ID NO: 70 - DNA, 978 bp, Human adenovirus
  misc_feature 1..978: note = Ad11 fiber; 30811 - 31788
  source 1..978: mol_type = genomic DNA
atgaccaagagagtccggctcagtgactccttcaaccctgtctacccctatgaagatgaaagcacctcccaacacccctttataaacccagggtttatttccccaaatggcttcacacaaagcccaaacggagttcttactttaaaatgtttaaccccactaacaaccacaggcggatctctacagctaaaagtgggagggggacttacagtggatgacaccaacggttttttgaaagaaaacataagtgccaccacaccactcgttaagactggtcactctataggtttaccactaggagccggattgggaacgaatgaaaataaactttgtatcaaattaggacaaggacttacattcaattcaaacaacatttgcattgatgacaatattaacaccttatggacaggagtcaaccccaccgaagccaactgtcaaatcatgaactccagtgaatctaatgattgcaaattaattctaacactagttaaaactggagcactagtcactgcatttgtttatgttataggagtatctaacaattttaatatgctaactacacacagaaatataaattttactgcagagctgtttttcgattctactggtaatttactaactagactctcatccctcaaaactccacttaatcataaatcaggacaaaacatggctactggtgccattactaatgctaaaggtttcatgcccagcacgactgcctatcctttcaatgataattctagagaaaaagaaaactacatttacggaacttgttactacacagctagtgatcgcactgcttttcccattgacatatctgtcatgcttaaccgaagagcaataaatgacgagacatcatattgtattcgtataacttggtcctggaacacaggagatgccccagaggtgcaaacctctgctacaaccctagtcacctccccatttaccttttactacatcagagaagacgactga

SEQ ID NO: 71 - DNA, 126 bp, Human adenovirus
  misc_feature 1..126: note = Ad11 fiber tail; 30811 - 30936
  source 1..126: mol_type = genomic DNA
atgaccaagagagtccggctcagtgactccttcaaccctgtctacccctatgaagatgaaagcacctcccaacacccctttataaacccagggtttatttccccaaatggcttcacacaaagccca

SEQ ID NO: 72 - DNA, 273 bp, Human adenovirus
  misc_feature 1..273: note = Ad11 fiber shaft; 30937 - 31209
  source 1..273: mol_type = genomic DNA
aacggagttcttactttaaaatgtttaaccccactaacaaccacaggcggatctctacagctaaaagtgggagggggacttacagtggatgacaccaacggttttttgaaagaaaacataagtgccaccacaccactcgttaagactggtcactctataggtttaccactaggagccggattgggaacgaatgaaaataaactttgtatcaaattaggacaaggacttacattcaattcaaacaacatttgcattgatgacaatattaacacc

SEQ ID NO: 73 - DNA, 576 bp, Human adenovirus
  misc_feature 1..576: note = Ad11 fiber knob; 31210 - 31785
  source 1..576: mol_type = genomic DNA
ttatggacaggagtcaaccccaccgaagccaactgtcaaatcatgaactccagtgaatctaatgattgcaaattaattctaacactagttaaaactggagcactagtcactgcatttgtttatgttataggagtatctaacaattttaatatgctaactacacacagaaatataaattttactgcagagctgtttttcgattctactggtaatttactaactagactctcatccctcaaaactccacttaatcataaatcaggacaaaacatggctactggtgccattactaatgctaaaggtttcatgcccagcacgactgcctatcctttcaatgataattctagagaaaaagaaaactacatttacggaacttgttactacacagctagtgatcgcactgcttttcccattgacatatctgtcatgcttaaccgaagagcaataaatgacgagacatcatattgtattcgtataacttggtcctggaacacaggagatgccccagaggtgcaaacctctgctacaaccctagtcacctccccatttaccttttactacatcagagaagacgac

SEQ ID NO: 74 - DNA, 1686 bp, Human adenovirus
  misc_feature 1..1686: note = Ad11 penton; 13682 - 15367
  source 1..1686: mol_type = genomic DNA
atgaggcgagtcgtgctaggcggagcggtggtgtatccggagggtcctcctccttcgtacgagagcgtgatgcagcagcagcaggcgacggcggtgatgcaatccccactggaggctccctttgtgcctccgcgatacctggcacctacggagggcagaaacagcattcgttattcggaactggcacctcagtacgataccaccaggttgtatctggtggacaacaagtcggcggacattgcttctctgaactatcagaatgaccacagcaacttcttgaccacggtggtgcaaaacaatgactttacccctacggaagccagcacccagaccattaactttgatgaacgatcgcggtggggcggtcagctaaagaccatcatgcatactaacatgccaaacgtgaacgagtatatgtttagtaacaagttcaaagcgcgtgtgatggtgtccagaaaacctcccgacggtgctgcagttggggatacttatgatcacaagcaggatattttgaaatatgagtggttcgagtttactttgccagaaggcaacttttcagttactatgactattgatttgatgaacaatgccatcatagataattacttgaaagtgggtagacagaatggagtgcttgaaagtgacattggtgttaagttcgacaccaggaacttcaagctgggatgggatcccgaaaccaagttgatcatgcctggagtgtatacgtatgaagccttccatcctgacattgtcttactgcctggctgcggagtggattttaccgagagtcgtttgagcaaccttcttggtatcagaaaaaaacagccatttcaagagggttttaagattttgtatgaagatttagaaggtggtaatattccggccctcttggatgtagatgcctatgagaacagtaagaaagaacaaaaagccaaaatagaagctgctacagctgctgcagaagctaaggcaaacatagttgccagcgactctacaagggttgctaacgctggagaggtcagaggagacaattttgcgccaacacctgttccgactgcagaatcattattggccgatgtgtctgaaggaacggacgtgaaactcactattcaacctgtagaaaaagatagtaagaatagaagctataatgtgttggaagacaaaatcaacacagcctatcgcagttggtatctttcgtacaattatggcgatcccgaaaaaggagtgcgttcctggacattgctcaccacctcagatgtcacctgcggagcagagcaggtctactggtcgcttccagacatgatgaaggatcctgtcactttccgctccactagacaagtcagtaactaccctgtggtgggtgcagagcttatgcccgtcttctcaaagagcttctacaacgaacaagctgtgtactcccagcagctccgccagtccacctcgcttacgcacgtcttcaaccgctttcctgagaaccagattttaatccgtccgccggcgcccaccattaccaccgtcagtgaaaacgttcctgctctcacagatcacgggaccctgccgttgcgcagcagtatccggggagtccaacgtgtgaccgttactgacgccagacgccgcacctgtccctacgtgtacaaggcactgggcatagtcgcaccgcgcgtcctttcaagccgcactttctaa

SEQ ID NO: 75 - DNA, 2847 bp, Human adenovirus
  misc_feature 1..2847: note = Ad11 hexon; 18254 - 21100
  source 1..2847: mol_type = genomic DNA
atggccaccccatcgatgctgccccaatgggcatacatgcacatcgccggacaggatgcttcggagtacctgagtccgggtctggtgcagttcgcccgcgccacagacacctacttcaatctgggaaataagtttagaaatcccaccgtagcgccgacccacgatgtgaccaccgaccgtagccagcggctcatgttgcgcttcgtgcccgttgaccgggaggacaatacatactcttacaaagtgcggtacaccctggccgtgggcgacaacagagtgctggatatggccagcacgttctttgacattaggggtgtgttggacagaggtcccagtttcaaaccctattctggtacggcttacaactccctggctcctaaaggcgctccaaatacatctcagtggattgcagaaggtgtaaaaaatacaactggtgaggaacacgtaacagaagaggaaaccaatactactacttacacttttggcaatgctcctgtaaaagctgaagctgaaattacaaaagaaggactcccagtaggtttggaagtttcagatgaagaaagtaaaccgatttatgctgataaaacatatcagccagaacctcagctgggagatgaaacttggactgaccttgatggaaaaaccgaaaagtatggaggcagggctctcaaacccgatactaagatgaaaccatgctacgggtcctttgccaaacctactaatgtgaaaggcggtcaggcaaaacaaaaaacaacggagcagccaaatcagaaagtcgaatatgatatcgacatggagttttttgatgcggcatcgcagaaaacaaacttaagtcctaaaattgtcatgtatgcagaaaatgtaaatttggaaactccagacactcatgtagtgtacaaacctggaacagaagacacaagttccgaagctaatttgggacaacaatctatgcccaacagacccaactacattggcttcagagataactttattggacttatgtactataacagtactggtaacatgggggtgctggctggtcaagcgtctcagttaaatgcagtggttgacttgcaggacagaaacacagaactttcttaccaactcttgcttgactctctgggcgacagaaccagatactttagcatgtggaatcaggctgtggacagttatgatcctgatgtacgtgttattgaaaatcatggtgtggaagatgaacttcccaactactgttttccactggacggcataggtgttccaacaaccagttacaaatcaatagttccaaatggagacaatgcgcctaattggaaggaacctgaagtaaatggaacaagtgagatcggacagggtaatttgtttgccatggaaattaaccttcaagccaatctatggcgaagtttcctttattccaatgtggctctatatctcccagactcgtacaaatacaccccgtccaatgtcactcttccagaaaacaaaaacacctacgactacatgaacgggcgggtggtgccgccatctctagtagacacctatgtgaacattggtgccaggtggtctctggatgccatggacaatgtcaacccattcaaccaccaccgtaacgctggcttgcgttaccgatccatgcttctgggtaacggacgttatgtgcctttccacatacaagtgcctcaaaaattcttcgctgttaaaaacctgctgcttctcccaggctcctacacttatgagtggaactttaggaaggatgtgaacatggttctacagagttccctcggtaacgacctgcgggtagatggcgccagcatcagtttcacgagcatcaacctctatgctacttttttccccatggctcacaacaccgcttccacccttgaagccatgctgcggaatgacaccaatgatcagtcattcaacgactacctatctgcagctaacatgctctaccccattcctgccaatgcaaccaatattcccatttccattccttctcgcaactgggcggctttcagaggctggtcatttaccagactgaaaaccaaagaaactccctctttggggtctggatttgacccctactttgtctattctggttctattccctacctggatggtaccttctacctgaaccacacttttaagaaggtttccatcatgtttgactcttcagtgagctggcctggaaatgacaggttactatctcctaacgaatttgaaataaagcgcactgtggatggcgaaggctacaacgtagcccaatgcaacatgaccaaagactggttcttggtacagatgctcgccaactacaacatcggctatcagggcttctacattccagaaggatacaaagatcgcatgtattcatttttcagaaacttccagcccatgagcaggcaggtggttgatgaggtcaattacaaagacttcaaggccgtcgccataccctaccaacacaacaactctggctttgtgggttacatggctccgaccatgcgccaaggtcaaccctatcccgctaactatccctatccactcattggaacaactgccgtaaatagtgttacgcagaaaaagttcttgtgtgacagaaccatgtggcgcataccgttctcgagcaacttcatgtctatgggggcccttacagacttgggacagaatatgctctatgccaactcagctcatgctctggacatgacctttgaggtggatcccatggatgagcccaccctgctttatcttctcttcgaagttttcgacgtggtcagagtgcatcagccacaccgcggcatcatcgaggcagtctacctgcgtacaccgttctcggccggtaacgctaccacgtaa

SEQ ID NO: 76 - protein, 325 aa, Human adenovirus
  REGION 1..325: note = misc_feature - Ad11 fiber; 1 - 325 (GenBank accession no. YP_002213828); Human adenovirus 11
MTKRVRLSDSFNPVYPYEDESTSQHPFINPGFISPNGFTQSPNGVLTLKCLTPLTTTGGSLQLKVGGGLTVDDTNGFLKENISATTPLVKTGHSIGLPLGAGLGTNENKLCIKLGQGLTFNSNNICIDDNINTLWTGVNPTEANCQIMNSSESNDCKLILTLVKTGALVTAFVYVIGVSNNFNMLTTHRNINFTAELFFDSTGNLLTRLSSLKTPLNHKSGQNMATGAITNAKGFMPSTTAYPFNDNSREKENYIYGTCYYTASDRTAFPIDISVMLNRRAINDETSYCIRITWSWNTGDAPEVQTSATTLVTSPFTFYYIREDD

SEQ ID NO: 77 - protein, 91 aa, Human adenovirus
  REGION 1..91: note = misc_feature - Ad11 fiber shaft; 43 - 133 (GenBank accession no. YP_002213828); Human adenovirus 11
NGVLTLKCLTPLTTTGGSLQLKVGGGLTVDDTNGFLKENISATTPLVKTGHSIGLPLGAGLGTNENKLCIKLGQGLTFNSNNICIDDNINT

SEQ ID NO: 78 - protein, 192 aa, Human adenovirus
  REGION 1..192: note = misc_feature - Ad11 fiber knob; 134 - 325 (GenBank accession no. YP_002213828); Human adenovirus 11
LWTGVNPTEANCQIMNSSESNDCKLILTLVKTGALVTAFVYVIGVSNNFNMLTTHRNINFTAELFFDSTGNLLTRLSSLKTPLNHKSGQNMATGAITNAKGFMPSTTAYPFNDNSREKENYIYGTCYYTASDRTAFPIDISVMLNRRAINDETSYCIRITWSWNTGDAPEVQTSATTLVTSPFTFYYIREDD

SEQ ID NO: 79 - protein, 561 aa, Human adenovirus
  REGION 1..561: note = misc_feature - Ad11 penton; 1 - 561 (GenBank accession no. YP_002213807); Human adenovirus 11
MRRVVLGGAVVYPEGPPPSYESVMQQQQATAVMQSPLEAPFVPPRYLAPTEGRNSIRYSELAPQYDTTRLYLVDNKSADIASLNYQNDHSNFLTTVVQNNDFTPTEASTQTINFDERSRWGGQLKTIMHTNMPNVNEYMFSNKFKARVMVSRKPPDGAAVGDTYDHKQDILKYEWFEFTLPEGNFSVTMTIDLMNNAIIDNYLKVGRQNGVLESDIGVKFDTRNFKLGWDPETKLIMPGVYTYEAFHPDIVLLPGCGVDFTESRLSNLLGIRKKQPFQEGFKILYEDLEGGNIPALLDVDAYENSKKEQKAKIEAATAAAEAKANIVASDSTRVANAGEVRGDNFAPTPVPTAESLLADVSEGTDVKLTIQPVEKDSKNRSYNVLEDKINTAYRSWYLSYNYGDPEKGVRSWTLLTTSDVTCGAEQVYWSLPDMMKDPVTFRSTRQVSNYPVVGAELMPVFSKSFYNEQAVYSQQLRQSTSLTHVFNRFPENQILIRPPAPTITTVSENVPALTDHGTLPLRSSIRGVQRVTVTDARRRTCPYVYKALGIVAPRVLSSRTF

SEQ ID NO: 80 - protein, 948 aa, Human adenovirus
  REGION 1..948: note = misc_feature - Ad11 hexon; 1 - 948 (GenBank accession no. YP_002213812); Human adenovirus 11
MATPSMLPQWAYMHIAGQDASEYLSPGLVQFARATDTYFNLGNKFRNPTVAPTHDVTTDRSQRLMLRFVPVDREDNTYSYKVRYTLAVGDNRVLDMASTFFDIRGVLDRGPSFKPYSGTAYNSLAPKGAPNTSQWIAEGVKNTTGEEHVTEEETNTTTYTFGNAPVKAEAEITKEGLPVGLEVSDEESKPIYADKTYQPEPQLGDETWTDLDGKTEKYGGRALKPDTKMKPCYGSFAKPTNVKGGQAKQKTTEQPNQKVEYDIDMEFFDAASQKTNLSPKIVMYAENVNLETPDTHVVYKPGTEDTSSEANLGQQSMPNRPNYIGFRDNFIGLMYYNSTGNMGVLAGQASQLNAVVDLQDRNTELSYQLLLDSLGDRTRYFSMWNQAVDSYDPDVRVIENHGVEDELPNYCFPLDGIGVPTTSYKSIVPNGDNAPNWKEPEVNGTSEIGQGNLFAMEINLQANLWRSFLYSNVALYLPDSYKYTPSNVTLPENKNTYDYMNGRVVPPSLVDTYVNIGARWSLDAMDNVNPFNHHRNAGLRYRSMLLGNGRYVPFHIQVPQKFFAVKNLLLLPGSYTYEWNFRKDVNMVLQSSLGNDLRVDGASISFTSINLYATFFPMAHNTASTLEAMLRNDTNDQSFNDYLSAANMLYPIPANATNIPISIPSRNWAAFRGWSFTRLKTKETPSLGSGFDPYFVYSGSIPYLDGTFYLNHTFKKVSIMFDSSVSWPGNDRLLSPNEFEIKRTVDGEGYNVAQCNMTKDWFLVQMLANYNIGYQGFYIPEGYKDRMYSFFRNFQPMSRQVVDEVNYKDFKAVAIPYQHNNSGFVGYMAPTMRQGQPYPANYPYPLIGTTAVNSVTQKKFLCDRTMWRIPFSSNFMSMGALTDLGQNMLYANSAHALDMTFEVDPMDEPTLLYLLFEVFDVVRVHQPHRGIIEAVYLRTPFSAGNATT

SEQ ID NO: 81 - protein, 42 aa, Human adenovirus; identical to SEQ ID NO: 63
  REGION 1..42: note = misc_feature - Ad11 fiber tail; 1 - 42 (GenBank accession no. YP_002213828); Human adenovirus 11

SEQ ID NO: 82 - DNA, 137 bp, Human adenovirus
  misc_feature 1..137: note = Ad14 5' (left) ITR; 1 - 137
  source 1..137: mol_type = genomic DNA
catcatcaataatataccttatagatggaatggtgccaatatgtaaatgaggtgattttaaaaagtgtgggctgtgtggtaattggctgtggggttaacggctaaaaggggcggcgcggccgtgggaaaatgacgtt

SEQ ID NO: 83 - DNA, 137 bp, Human adenovirus
  misc_feature 1..137: note = Ad14 3' (right) ITR; 34628 - 34764
  source 1..137: mol_type = genomic DNA
aacctcattttcccacggccgcgccgccccttttagccgttaaccccacagccaattaccacacagcccacactttttaaaatcacctcatttacatattggcaccattccatctataaggtatattattgatgatg

SEQ ID NO: 84 - DNA, 342 bp, Human adenovirus
  misc_feature 1..342: note = Ad14 Packaging Sequence; 138 - 479
  source 1..342: mol_type = genomic DNA
ttttgggggtggagtgtttttgcaagttgtcgcggtaaatgtgacgcaaacaaaggctttttttttacggaactacttagtgttcccacggtatttaacaggaaatgaggtagttttggccggatgcaagtaaaaattgttcattttcgcgcgaaaactgaatgaggaagtggttttctgaataatgcggtatttatggcagggtggagtatttgttcagggccaggtagactttgacccattacgtggaggtttcgattaccgcggaggtttcgattaccgtgttttttacctaaatttccgcgtaccgtgtgaaagtcttctgtttttacgtaggtgtca

SEQ ID NO: 85 - DNA, 3468 bp, Human adenovirus
  misc_feature 1..3468: note = Ad14 E1; 480 - 3947
  source 1..3468: mol_type = genomic DNA
gctgatcgctacggtatttatacctcagggtttgtgtcaagaggccactcttgagtgccagcgagaagagttttctcctctgcgccggcagtttaatattaaaaaaaatgagacacttgcgatttatgcctcaggaaataatttctgctgagactggaaacgaaatactggagtttgtggtgcacgccctgatgggagacgatccggagccacctgtgcagctttttgagcctcctacgcttcaggaactgtatgatttagaggtagagggatcggaggattctaatgaggaagctgtgaatggcttttttaccgattctatgcttttagctgctaatgaaggattagaattagatccgcctttggacactttcgatactccaggggtgattgtggaaagcggtacagctgtaagaaaattacctgatttgggttccgtggactgtgatttgcactgctatgaagacgggtttcctttgagtgatgaggaggaccatgaaaaggagcagtctatgcagactgcagcgggtgagggagtgaaggctgccattggttttcagttggattgcccggagcttcctggacatggctgtaagtcttgtgaatttcacaggaaaaatactggagtaaaggaactgttatgttcgctttgttatatgagagcgcactgccactttatttacagtaagtgtgtttaagttaaaatttaaaggaatatgctgtttttcacatgtatattgagtgggaaatttgtgcttcttattataggtcctgtgtctgatgctgatgagtcaccatctcctgattctactacctcacctcctgagattcaagcacctgttcctgtggacgtgcacaagcccattcctgtaaagcttaagcctggaaaacgtccagcagtggaaaaactcgaggacttgttacagggtggggacggacctttggacttgagtacacggaaacggccaagacaataagtgttccatatccgtgtttacttaaggtgacgtcaatatttgtgtgagagtgcaatgtaataaaaatatgttaactgtgtactggtttttattgctttttgggcggggactcaggtatataagtagaagcagacctgtgtggttagctcatagaagctggctttgattcatggaggtttgggccattttggaagaccttagaaagactaggcaactgttagagaacgcttcggacggagtctccggtttttggagattctggttcgctagtgaattagctagggtagtttttaggataaaacaggactataaagaagaatttgaaaagttgttggtagattgtccaggactttttgaagctcttaatttgggccatcaagttcactttaaagaaaaagttttatcagttttagacttttcgaccccaggtagaactgccgctgctgtggcttttcttacttttatattagataaatggatcccgcagactcatttcagcaggggatacgttttggatttcgtagccacagcattgtggagaacatggaaggttcgcaagatgaggacaatcttaggttactggccagtgcagcctttgggtgtagcgggaatcctgaggcatccaccggtcatgccagcggttctggaggaggaacagcaagaggacaacccgagagccggcctggaccctccagtggaggaggcggagtagctgacttgtctcctgaactgcaacgggtgcttactggatctacgtccactggacgggataggggcgttaaaagggagagggcatctagtggtactgatgctagatctgagttggctttaagtttaatgagtcgcagacgtcctgaaaccatttggtggcatgaggtccagaaagagggaagggatgaagtttctgtattgcaggagaaatattcactggaacaggtgaaaacatgttggttggagcctgaggatgattgggaggtggccattaaaaattatgccaagatagctttgaggcctgataaacagtataagattactagacggattaatatccggaatgcttgttacatatctggaaatggggctgaggtggtaatagatactccagacaagacagttattagatgctgcatgatggatatgtggcctggagtagtcggtatggaagcagtaacttttgtaaatgttaagtttaggggagatggttataatggaatagtgtttatggccaataccaaacttatattgcatggttgtagcttttttggttttaacaatacctgtgtagatgcctggggacaggttagtgtacggggatgtagtttctatgcgtgttggattgccacagctggcagaaccaagagtcaattgtctctgaagaaatgcatattccaaagatgtaacctgggcattcttaatgaaggcgaagcaagggtccgccactgcgcttctacagatactggatgttttattttaattaagggcaatgccagcgtaaagcataacatgatttgcggtgcttccgatgagaggccttatcaaatgctcacttgtgccggagggcattgtaacatgctggctactgtgcatattgtttctcatcaacgcaaaaaatggcctgtttttgatcacaatgtgttgaccaagtgtaccatgcatgcaggtgggcgtagaggaatgtttatgccttaccagtgtaacatgaatcatgtaaaagtgttgttggaaccagatgccttttccagaatgagtctaacaggaatgtttgacatgaacatgcaaatctggaagatcctgaggtatgatgatacaagatcgagggtgcgcgcatgcgaatgcggaggcaagcatgccaggttccagccggtgtgtgtagatgtgactgaagatctgagaccggatcatttggttattgcccgcactggagcagagttcggatccagtggagaagaaactgactaaggtgagtattgggaaaactttggggtgggattttcagatggacagattgagtaaaaatttgtttttctgtcttgcagctgtcatgagtggaaacgcttcttttaatgggggagtcttcagcccttatctgacagggcgtctcccatcctgggcaggagttcgtcagaatgttatgggatctactgtggatggaagacccgtccaacccgccaattcttcaacgctgacctatgctactttaagttcttcacctttggacgcagctgcagccgccgctgccgcctctgttgccgctaacactgtgcttggaatgggttactatggaagcatcctggctaattccacttcctctaataacccttctaccctgactcaggacaagttacttgtccttttggcccagctggaggctttgacccaacgtctgggtgaactttctcagcaggtggccgagttgcgagtacaaactgagtctgctgtcggcacggcaaagtctaaataaaaaaaaaaaattccagaatcaatgaataaa

SEQ ID NO: 86 - DNA, 19427 bp, Human adenovirus
  misc_feature 1..19427: note = Ad14 E2; 23389 - 3963
  source 1..19427: mol_type = genomic DNA
atggccagccgcgaaggaaatcagttaagcgaccgccacagggagcacacccccgaacgcggaaggggttctgccagtcatccgccttccaggtcggaccgcagcccttcgcaatcgcctccacctctgcccccgaagagaaacacctgtcgccgtgtggggtcaggttcttctaccgacagtcagttggtaatggtgagcgaaacttcacaatcctccctgtctccggaacggagcgacagtcctcctcccccgataccccccaaaaagaagccaaggaagaccaaacatgttcccatgcaagacatcagtcaagacagcgaagaagaaagagaagaggcgcagcttgtagcagtaggtttcagctacccgcccgtgcgcatcgttgagaaggatggcaaaagaagcattgaaaagattgccaaagatgatcctctggctaaaggagctgctgcctgtactgttaagaatccgattagcttgcccctggtgtctgcttgggagaagggcatggaagtgatgtgtgtactgatggagaagtacaggctggataacgaacttagaacctcttttaaactaatgcctgagcagcacgaacaatacaagcgcatctgtcaccagtacgtaaacgaggagcaccgaggcatccagttaactttcactagtcacaagacactgagcacgatgatgggaagatttctgcagggaatgatacattctttttctcagatcgcccaccataattgggaatgtacaggctgtgcgttgtggcctcatggctgcaatgattatgagggcaagctgaagtgcctgcatggcactattatgattcagaaggagcagattatcgagatggatgtggccagcgagaatggacaacgagccttgaaggagaatcccgagcgaaccaaaatcacccaaaaccgctggggcagaagtgtggtgcaaatagccaacaatgacgcccgctgctgtgtgaatgatgccggctgcgcagctaaccagttttcgagcaggtcctgcgggatgttctataccgagggtagtaaagcccagcaggctttcaagcaatatgatgctttcatgagagccgtgtatccaggaatcagacaggatcaggccaagatgatactaatccccctgcactgcgattgcaaccacaagcctaattgggtgcccgccatgggtaggcagacctgcaagatgaccccgttcagcattgccaatgctgaagatctggatgtgggcatgattgcagatcccaccgtgctggcaagcgtgagacatccgtcgctgatggtgtttcagtgctgcaatccggtgtaccgcaactctcgcgctcagagcactggtcctaattgtgatttcaagatttcggctcctgacctgctgggagctttgcagctgaccagaaagctgtggagtgacatcctacccgatataccggttcccaagttggtgattcccgaattcaagtggcaacccaagtatcagttccgcaacgtatcactgcccgcgggtcattctgattctcgtcagaacccattcgacttgtaaataaataagtaatccagagccttgatacgtgtaaaaaataaagtgctgtttattcaacacgttgtttacatgagtcattattgcacatccatacggtcgaacgcagtggccctttcgatgtgtgtacgatgggagcgaaaataaggcgaatgggtattgagaaaatggtagagtgctttttgattgtcacacagggtgggctggactttaggagaatgaagcatgttgtttggcactccagtcagcaatttcatggtggggtttccgtccatgggacggtcaggccagtgcacaaaggcatgaaggaacatgcagcagaaaagtccgcaggcggcagaacgggggccctgcacggtctgggtagatttttccagcgtaatacagcggtccttggtagcaagagcgctgcggcgcaggagaccctcatattcaaactggtaaatctgtttaagacgatcatccgagaatccaaaaggatcaaaaaggtagcaggtgttagaacgtgggttccaaccgaaagccaaccagtgctctccccccgtctcacgtccggccgtgtttacaatggcacaggcgagcttatcgggggccatgaaccccgggaagcgcttatcgtaggttcccaaaaaatagggtccgcaacccaggtcttggacaatggctctgagctcttgctcgctggagccgttttgggatccgcaggccatggttgcagctgctgtttgcaagaagcaagaagctttttacgtggtagcgttaccggccgagaacggtgtacgcaggtagactgtctcgatgatgccgcgatgtggctgatgcactctgaccacgtcgaaaacttcgaagagaagataaagcagggtgggctcatccatgggatccacctcaaaggtcatgtccagagcatgagctgagttggcataaagcatgttctgtcccaagtctgtaagggcccccatagacatgaagttgctcgagaacggtatgcgccacatggttctgtcacacaagaactttttctgcgtaacactatttacggcagttgttccaatgagtggatagggatagttagcgggatagggttgaccttggcgcatggtcggagccatgtaacccacaaagccagagttgttgtgttggtagggtatggcgacggccttgaagtctttgtaattgacctcatcaaccacctgcctgctcatgggctggaagtttctgaaaaatgaatacatgcgatctttgtatccttctggaatgtagaagccctgatagcctatgttgtagttggcgagcatctgtaccaagaaccagtctttggtcatgttgcattgggctacattgtagccttcgccatccacagtgcgctttatttcaaattcgttgggagatagtaacctgtcatttccaggccagctcactgaagagtcaaacatgatggaaaccttcttaaaagtgtggttcaggtagaaggtaccatccaggtagggaatagaaccagaatagacaaagtaggggtcaaatccagaccccaaagagggagtttctttggttttgagtctggtaaatgaccagcctctgaaagccgcccagttgcgagaaggaatggaaatgggaatattggttgcattggcaggaatgggatagagcatgttagctgcagatagatagtcgttgaatgactgatcattggtgtcattccgcagcatggcttcaagggtggaagcggtgttgtgagccatggggaaaaaggtagcatagaggttgatgctcgtgaaactgatgctggcgccatctacccgtaggtcgttaccgagggaactctgtagcaccatgttcacatccttcctgaagttccactcataagtgtaggagcctgggagaagcagcaggtttttgacagcgaagaatttttgaggcacttgtatgtggaaaggcacataacgtccgttacccaaaagcatggatcggtaacgcaagccagcgttacggtggtggttgaatgggttgacattgtccatagcatccagagaccacctggcgccaatgttcacataggtgtctactagagatggcggcaccacccgcccgttcatgtagtcgtaggtgtttttgttttctggaagagtgacattggacggggtgtatttgtacgagtctgggagatacagagccacattggaataaaggaaacttcgccatagattggcttgaaggttaatttccatggcaaatggatttcccttaacaagttcactgataccatttggatttacatctttccaagcttggtctccatttaactgaatctccttgtaactatctgttcgcggaccgatgccgtccagtggaaaacagtagttgggaagttcatcttccacaccatgattttcaataacacgcacatcgggatcataactgtcaacagcctgattccacatgctaaagtatctggttctatcgcccagggagtcaagcaagagttggtaagacagttctgtgtttctgtcctgcaagtcaaccactgcattcaactgagatgcttggccagccagcacccccatgttaccagtactgttatagtacataagaccaataaaattatctctgaagccaatgtagttgggtctgttgggcatagactgctgtccaagattagcatttgaactagcatctgaaacttcaggtttgtacacaacatgagtatctggagattccaggtccacattttctgcatacattacaatcttaggtttaagaccttgtttttgtgatcttaagtcaaaaaagttcatgtcaatgtcatattcaatgttgttgccttcttctgttttcacttttgcctgtccgcctttcacattagtaggtttagcaaaagacccatagcacggtttcattttagtgtccggtttaagtactctgcctccgtatttttcttcagtgccatctgtatcagtccacgattcctgtcccacctggggttctggttggtaaagcttattagcgtagataggtttagggtcaccttcagctgggacttccaaacctattggtagtccgtcttttgtaatgtcagcatcggcttttactggggcattgccaaaagtgtatgtagctttttcgtcattttccccgtcttcattttgccgttcttcagtagtttcaacccctttatccaaccactgagatgcatttggagcgcctttaggagccagagagttgtaagccgtaccagaatagggtttgaaactgggacctctgtccaacacgcccctaatgtcaaagaacgtgctggccatatccagcactctgttgtcgcccacggccagggtgtaccgcactttgtaagagtatgtattgtcctcccggtcaacgggcacgaagcgcaacatgagccgctggctacggtcggtggtcacatcgtgggttggcgctacggtgggatttctaaacttatttcccagattgaagtaggtgtctgtggcgcgggcgaactgcaccagacccggactcaggtactccgaagcatcctgtccggcgatgtgcatgtatgcccactggggcagcatcgatggggtggccatcttgaaagtaactcagcgtcgacgcacgacctcttccttttttcctctgctgctgtgacggcgtgtaatgacacatatacacagataggcaagttaagcgctactccatatttaattaaaagcagcgacggcgttttacactttgcacgcctagacccacgatgctgttcagagtattttgccagtgcgcatttggacgaggagcgcccccgggacgtgacctggctacggcgactggtttcggggcagcgacaggcttagaagcgggtacagcagtagcagcagggggagggggcaaatccaaagtgacgggtcgatgcaactgagaaggtttcattaccccggtagccataggggctatcggtctagtggtgggcattccaagcttcgttgcttcctcataagaaggcggttcatctacgcgcgtcaccagcgtctcttccaaatcgggacgcggacgcttgtcgcctcgtttttctggcggaggaatttcttcctccacttgtatttcacctggggttgctggcggcgggtccaaacgactgtttatctttttctgcacagcctgattagccaaatctaccactccattgatgccggaagctatcccatcgactactttttgttgaaagttctggtctttaagtttatttctaagcgcctgtcctgtactgctgttccaagctttgttcccgtatgtttttatggttgagccaaaatttttaagcccgctccagatactgctccaattgaaggcgcccccgttcagttggctcgtgccgatgtcgctccaggtgcccatgtacggcttcgtgccgtgtcgcggagccaaggatgaaaaattgatgttttccatctctaagaaaacatagtcacaggaccaggagtgtcagagtccattgtatttttttttttatttatacttttttttccaatgtcaatgtcgttgcgaggcctgaaccgccacggaagctatgcctggtatcgcgccaattgcagcagcgataattggaattaaggctggcaaaaaaccaccccgcaattgcttgcggatagcacgccgtcgcctgtagcgtcgcattccgcgccccaacatccctcttctacggcgcgaatttcttcctcggtaaccagtgatgggaacgcgaaggcgacaagtgagggccatatctgcaaggaggcagcggcaacattgattaagtgatgatacttggatggtaacgcgcacgcggcagtgtcaaaggttccgcactactattgcggtacacttgccgcaccagggcgccgggagtcggtttgcttgtgcgtctacggcgacgactgcgatttgcaggtgtcttgcggcgacggcgggaggtactgtttcggctgcgatagtagcgagtgcctcggtaaccaggagtaggaataatagatgggtgtacaacatagttgggcatcaacagacttgctggaccgtactttcgtcgggatcttcgagtgggaccggcggcgtcagttgtaataggcatcggcatccatggatccgtttgcacttcagtggaggtggcagtaggctttgcgggttcagtttgcacttccatactttcagtgggaatcttaatgtctacagtttgtactcccagaccaggcgctacctgcttaatgggtctcactttaacctcaggttgaatatctggatccacttttactttctccaaaacgtcctccaacttttggcgtttgggtaccattagttgcatagtgggatacaaatcttcaccttcgcgtttaacacctgttcgcggagttacgggtaacacttgctgcaaagtgaccggtttaagactaggggtgggatttccatgatccaagggtatggacactgtctcatccttgggatttattctactacgcttgccataagcaaactcgcctaatcggtcagccgcctgctcaagaatatcatcatccccgtacacctcatcataggaacgcttaaaagtagcgcttgaacgctcgccgggtgtaaagaccaccgaagttccaggtctcaacaaatgtcgaactttgcgtccacgccattgcacgcgtcgccgtggggcaaactcgcgcacaaactccgccagcccatcatcgccatcttcctcttcttttttgtcctttttagcccgcttgattttgcggggttttttttcatccttcagcggttggccgtagacttcaggtgcgataacctgcagcatttcttccttgtatttgcgcttggacatcctcgccgctgggacacaacatcggagactgctcagtatcttctaagtgcgagggggacgggtgcgcacgggtacacgttgaccggtggcagcgtcacgcacccagtatacattgcctcttcgcgtttgggccatgtcggcaatagtcgccgctgcgacagcggctgcttgcctgcgggacctgccggcgctggcgcccgaagctgcacgtctggccgccctaagcatggctcttcgtcccacgcgtctagctcttcgtagcagagctcttgcggctcgcatggcagtggtagctcggtggcgtctggcaatgcgccttcgccggctcttacgtcgagcatagttgcgagcgtcagccactacactgtcaataactgcatccacagtagatgtaggcgcagtaggagtataattacgggcgtcggcaaccacctcatcgattacatcatcgacggtggttcgaacgcgagtgcggcccttgagggcaccccatggagcgcgaaaatgaccgcgaacacgcacgggatgttgggtagaacgtttgcgtgcgcctccgtacatcttgcttggagcgcgcagaccccaaccggtgttattactgggcgagataagaatggacatttttttagaaagtgcggcttgaaaggacgcgcggtgcgactatgcccagtgccttgtacacgtagggacaggtgcggcgtctggcgtcagtaacggtcacacgttggactccccggatactgctgcgcaacggcagggtcccgtgatctgtgagagcaggaacgttttcactgacggtggtaatggtgggcgccggcggacggattaaaatctggttctcaggaaagcggttgaagacgtgcgtaagcgaggtggactggcggagctgctgggagtacacagcttgttcgttgtagaagctctttgagaagacgggcataagctctgcacccaccacagggtagttgctgacttgtctagtggagcggaaagtgacaggatcctgcatcatgtctggaagcgaccagtagacctgctctgctccgcaggtgacatctgaggtggtgagcaatgtccaggaacgcactcctttttcgggatcgccataattgtacgaaaggtaccaactgcgataggctgtgttgattttatcttccaacacattatagcttctattcttactatctttttctacaggttgaatagtgagtttcacgtccgttcctccagttacatcggccaataatgattctgcagtcggaacaggtgttggtgcaaaattgtctcctctgacctctccagcgttagcaacccttgtaaagtcgctggcaactatgtttgccttagcttccgcagcagcttctattttggctttttgttctttcttactgttctcataggcatctacatccaagagggccggaatattacctccttctaaatcttcatacaaaatcttaaaaccctcttgaaatggctgtttttttctgataccaagaaggttgctcaaacgactttcggtaaagtccactccacagccaggcagtaagacaatgtcaggatgaaaggcttcatacgtatacactccaggcataatcaacttggtttcgggatcccatcccagcttgaagttcctggtgtcgaacttaacaccaatgtcactttcaagcactccattctgtctgcccactttcaagtagttatctatgatggcattgttcatcaaatcaatggtcatagtaactgaaaagttgccttctggcaaagtaaactcgaaccactcatattccaaaatatcctgcttgtgatcatatgtatccccaactgcagcaccttcgggaggttttctggacaccatcacacgcgctttgaagttgttactaaacatatactcgtttacgttgggcatgttagtatgcatgatggtctttagctgaccgccccaccgcgatcgttcatcaaagttaatggtctgggtactggcttccgtaggggtaaagtcattgttctgcaccaccgtggtcaagaagttgctgtggtcattctgatagttcagagaagcaatgtccgccgacttgttgtccaccagatacaacctggtggtatcgtactgaggtgccagttccgagtaacgaatgctgtttctgccctccgtaggtgccaggtatcgcggaggtacaaagggagcctccagtggggattgcatcaccgccgtcgcctgctgctgctgcatcacgctctcgtacgaaggaggaggaccctccggatacaccaccgctccgcctagcacgactcgcctcattatactagacacaaataataaagaagaacgaacgtacgctcgtcgccatggccttggtgagttttcctttttattttttttttacaacataccacccaagcgagggcgcaaatgagcaaacgggttgccccttcctctcccacccaagtccaacacgctgctatcatcggccgaatcctcatcttcccacacaagacccctctgtctgtcatgacgctggcgtctacggctcgctctacttgtagtccccatgatcccaggctcgtctctgtgatcctgagcataagtcttccatctactcatcttatccaccaaactttctattccattgtttgggaaatttttttctctcgccggtctgagcaaggaatcgtttaggtattcctcttcgcccattaaactcgggcgacttattctacccacttcgctgctacgtacactgtgtagagaaaagggtagactaggaaaaggacttgcagactcgggctcagccgcggtagcacccatgaccccggacagcgatgcagaagaatgcattctatcgccgccttcctttttccacgtgcgatgatcaaaaagaggtgaaaaaacattactgtccacgtcgtcccacagaaacccgtcattagggtcgggcatgtcatattcgcccgtgtagaaaccaggtgggggcagccagtgcgggtttaggatggcattggtaaaataatcagagttcatagcggcagctctgtgcaagtagtccagcagtttgttaatgaaaggccggttactggcatacatgctgggctccatatttcgcgctgtcatgtccaatgccgcagtcggagttgccccctcttgcatcagaaacaatcccacgctctgctgcacatatctaaggatcctctcctcctccgcagtaagagcatattgaggagggatcttctgagaccgattggtaagcaagaagttcagagtggcttccaaactgccagtgtcttcctgacccaaagcgcgactgacttgggtaatttcttgataggtctgctcgtccacctggctttgccctatggcttcgcgatacaggtttagtaggtaacccaaataggaattacggtcgatgctgccgctgtcggtgaaaggagctaccaacagtagtaataggcgggagtttggagttaacaagctagacacggttgctctttctcctaccggggcatgcactccccacaaacctttaaggtttttaaaagcttggctcagatttaccgtctgcaaaccctgtctgctagtctgaaagaagtagtcaggtccggactgatacacttcgctctgaggtacttcagataccatcagtctcaacgcactcaaaaagttagtataatcctgttgaccacgcggcacattagcaggctgagtactcaaaaaagcatttaacgccaccagcgaaccaaggttggcatcgcgctggaacctttcacgctgagacacggcttcgcgtacatctgttatcatacggtccaaattggtttgcacattgctactgttgtagcgagccacgcgttctaaaagagcgttgtataccagtccggcctcatctggacgaatagctttgttctccaccaacgcgtttacaatggccaggaccttctcatgagtgggattagagcgggaaggcactacagcttccatgatggccgatagacggttggcctggggttgctgtctaaaggcttcggggttgcgagtcgtcaacgccatgatacgttgcatggcctgggtccaatcgtccgaggagttaatgccggacggctggctctgcagcgccgcccgcgttgcgggatccggtgcttgctgttccatctagcaaaaaacacgggttgtgccatcagtcttccaagtactcgccctcttcctcctcgccttcatccgcctcttctatgtaaggaagctcacatcctgccgtcgcggcgctcagagccctgcgactaggctgccactgcaagtcagctcccatgtcaaagtaattctcaccctctgttccagctccagtcagagctctttgcaaactgtgcatcagttccctgtcgcttaactcgcgcctcctactggcgctaacggcgcgatgcattctgtcattgcggtacaccccaagatcatcgctcagggtcaagaccttgagcgtcatacgcatgtagaacccatctatcttcacctccttgtctatgggaacgtatggagtcttgtagatcttgcgagcgtaatattttcccaaacttaaaaccgagtaattgatggcagccaccttttcggccaggcccaggctccgctcctgcactatgatactctgtagaatgttgataagatcatacaaccatctcccctcgggttcagtgatgttgagcagtgcctctctgaaagcctcgttgtctctgctgtgttgcaccaccagaaacagctgtgcggtcagaggtttgctagtagggttctgaatgatagcttccatcaaatcccacaaatgcatcaaaccaagagtaacttcttcgcgggcaatcagggttcgcacatgattattaaaagacttttggaagttacgctcttcctttactgtctgctcgtaagccgatacaaggttggctgcagccacgtgtgccctggcaggactgatccctgtcacttcatcaacttcgaaatcctcgtcccgcaacactcgtcttcggtccaaaccgtgacgcagctcacgacccgcgttaaagcgggaagctcgcatctcctccggctcctcgccgcttctgtctctaaataggttctgttggggcacatacgcctcgcgagaatcttttttcagttgaactcgcggatgccgctcgggcgagggcgcacctagacgtgccagtccttcgccctcttccaagtccagatcataggcgggctgtcccgcaccgctcacggcggcagttgcagtagttgcagggacagccttttgtggttgctgctgctgcgaggggggctgttgttggggacgcatctgtcgcagcacgggatgcatctgagcggcaaaaaaaaaaataggactcacttccctgccattcagcaaccagcaaaacgactcgattccgtatcctggatttttgtaggctgggtcgagacgggagtgccaataccacgttagccgcggctccggccggctcgagtacaagtcttgaaccggggtacaccgcgacccaacccgttcacgttcctccaggctacagagtcgagtcgctgaacgctttcattttcttcgtgtctatagagcatcaatgactgcgcgcgcctcactggtcaaaccgtgcctacaatgaactacttcatgccgctacgcaacatttggaaccgcgtacgcgagtttcctcgggcttccactaccgccgcaggaatcacctggatgtccaggtacatctacggctatcaccgccttatgttggaagacctcgcccccggcgctccagctacagaacaatggcctctctaccgccaaccaccaccgcattttcttatagggtaccagtatctggtgcgcacctgcaacgattacatttttgacacccgcgcctattcgcgccttaaatacaccgagctcgtgcgccatggtcaccaaacagttaactggtcagtcatggccaactgtgcttacaccatcaataccggggcttaccaccgcttcgtggattttgatgactttcaagccaccctcacccaagtacagcaagccatcctcgccgaaagagttgtagctgacttggcactggtccaaccaatgcgcgggtttggactcacacgtatgcatggcagaacgggtgaagaagaagtgcccgtagaacggctcatgcaagactactacaaagatctggctagatgtcaggataatgcttggggaatggccaatcgcctgcgtatccagcaagccggacccaaagacctggtgctcctcgccaccatccgccgtcttagaactgcctactttaatttcatcaccagcagcatcgtctcaccttcccgagatgaagaaggaatagaagacccagaccgaacacataaccacccccgcccacaagaagccgtactcagcctaccttgtgactgtgactggttagacgctttcgttgaaaggttttcagatcccgtggatcttgacacgattagatctctgcgcgcagtccctacgggccaattaataaaatgtataatcagcgccctttccctcccaaacggagaacctcccagtcaccactttaaggagatgcgcggcggtgtttttactctgcgaccgcgcgagaacggccgcgccgtcactgaaaccatgcgccgccgccgcggagaggtcattgaacgattcatcgaccgtttgcccgtgcgccgtcgacgtcgccgcgtgccccctccgcccccgcctgaagacgaagaagagatgttagtggaagaagagatagaagaggaagaagagatgccgggagccttcgaacgcgaagtacgggccaccatagccgaactcatccgtcttctcgaggaggaattgaccgtgtccgcgcgaaactcccagttttttaattttgccgtggacttctacgaggccatggagcgcttggaagctctgggcgatgtcagcgaaatgccgctgagacgatggatcatgtatttctttgtcgccgaacacatcgccaccacactcaactacctttttcagcgcctatgcaactatgcggtcttcaccagacacgtggagcttaacctcgctcaggtggtgatgcgcgcaagagactccgagggggccgtggtttacagccgcgtctggaacgaggcgggcatgaatgcattctcccaactcatgggccgtatctccaatgacctcgcggccaccgtcgagagagcgggtcgcggagatcttcaggaggaagaaatcgagcagttcatggcggagatcgcctaccaggacaactctggtgacgtacaagaaatactgagacaagctgccgttaacgataccgaaattgattctgttgaactctctttcaggttcaagctcacggggccggtagctttcacccaaagacgtcagatacaagacgtcaatcgacgcgtggtggcgcacgcaagtcttctcagagcgcagtaccagaacctgcccgtgcgcggcgccgacgtgccactaccagccatgcccccgggtccggaacaaccgctgccgcccggcgcgcgtccccgtcaccgcttttaagcatgcaagaagcaagagagccaccaccgatcaaaagaaaaaacaaaggtacggtagtggcacccaaaggacacggaaccctgcaagccattgacgtctctacaaacgaacctgtggaaatcaagtaccatctaaacctcccgcacgccctggaaaagatcatgcaagttaatcttctgtccctacctactaacctgagtccgcagcgtctcaggactctggacagctccagcctgcgcgctctcgtccttcagctccgcccctcccgcgccgaggtctggacttgcctcccgcgggggctcgtcagcatgaccaccatcgaaacagaagatgaacaggccaatacagcgaatatagaagagcacgagatacaatcgccaggcctcggcttcccactgaaatttctcgtcaagggaagccaggtacagctcattcacgagatacaacccgtgcaacgctgcgactactgcggccgtctgtacaagcacaaacacgaatgctcggcgcgccgcagaaacttctacttccatcacatcaacagccaatcctccaactggtggcaggaaatccagtttttcccaatcggctctcatcctcgcacagaaagactcttcctgacctacgatgtggaaacttacacctggatggggtcctttggcaaacaactagttcctttcatgctggtcatgaaactctcaggagaagagcgtctcgtcaacatggcccacgatctagccattaaacttaagtgggatcgatggcaacaagatcccggaaccttctactgtgtcactccagaaaaaatggcaattggccagcattttcgtcagtatcgggaccagttacaaacagcactggcggtggatctttggtcatcattcctacatgcaaatcctcatctgcacgaatgggcccttgaacactacgccttatctgaccctacagacctaacctttgatgagctcaataagctacctcacgtcagaggcacgccgcgtttcatagaattatacattgtaggacacaacatcaacggcttcgacgagatcgtcctagctgcccaggtgatcaacaatcgagcggaagtaccacagccttttcgcatcactcgcaattttatgcccagagccggtaagattctcttcaacgatgttactttcgctttgcccaaccccgcctacaagaaacgggtagacttccaactctgggaacagggagcctgtgacgacatggactttaaataccaatttgtcaaagtcatggttagagacaccttcgcccttactcacgcttcgctacgaaaagctgctcaagcatactctctacccgtagagaagggctgctgcccttacaaggcagttaatcagttctacatgctaggatcttaccgtgcagacaaagacgggtttccgctagaagagtactggaaggatcgcgaagaataccttctcaaccgcgaactgtgggaaaagaaaaaccaaccaggttatgacatcattcaagaaacacttgactactgcgccctggacgtacttgtcaccgcccaactggtaaccaagcttgaagaatcttatgcccactttatcagagactctgtaggtctacctcatgcccacttcaacatttttcaaagacccaccatctcttccaattctcacgccatctttcgccagattgtctacagaacagaaaaacccaatcgcaccaacttgggtccggggctgctagcgccgtcacatgaactatatgactatgtgcgagcaagtatcagaggggggcgatgctatccaacctacataggcatctttgaggatcccatctacgtctatgacatctgtggcatgtatgcctctgcactcacccatcccatgccctggggcagtccccttaacccatatgagcgcgcactggcagctcgagaatggcaaatggccttagatgaccccactcccatcagctattttgataaggatttacttcctggaatctttaccatggatgcagaccctcccgatgaacttatgctagacccacttccacctttctgttctaggaaaggaggtaggctctgctggaccaacgaaccccttcgaggcgaggtggccaccagtgtggatttaattaccttgcataaccgagggtggcaagtgagaattgtgccagatgaattgacaactatcttccccgaatggaagtgcctggcacgcgaatatgtccaactcaacatcgctgccaaagagcgcgcggacaaggaaaagaaccaaaccatgcgatccattgccaaacttttatccaacgccctgtatggatcatttgccaccaaacttgacaataaaaaaattgtgttttctgaccaaatggacgaaaacctcatgaaaggcatctcaagcggcactgtcaatatcaaatcctcctcgttcttagaaactgacaacctgagtgcagaggtcatgcccgccttcgagagggaatacctaccccaacagctgacgttcctggacagcgatccggaagacagtgaggaagagcagagaaccgcccccttttatacccccccagctgggaccccaggtcacgtgaaatacacctacaagccaatcacattcctggatgttgaagagagtgacatgtgtttgcatactttggaaaaggtggaccccctggttgacaacgatcgctacccctcccacatagcctcctttgtgctggcctggacgcgcgcctttgtatcagagtggtcagagttcctatacgaagaagaccgaggcactccactggaaaagaggcctgtaaaatcagtctacggggacacggacagcctgtttgtcactcaacgaggacacgaactcatggagaccaaaggtaagaaacgcatcaaaaaatatggcggaaaacttgtttttgaccccaatgaaccggatttaacctggctggtggaatgtgaaactgtttgcgcctcctgcggcgcggatgcatactccccagaatccattttccttgcgcccaagctgtatgcgctgaaatgcctatactgcccggtatgcaagaaaacttccaaaggtaagctccgcgccaagggccacgcagccgaggcgctcaactacgaactcatggtaaactgctacttggccgacatacagggcgccaagcggcacaagttttcgaccagcaggatgagtctgaagcgcaccctggcaagcgcccaagcaggcgcacaccccttcactgtgacggaaacaaccctgacccgaactttgagaccctggaaggaccgaaccctggcagcgctggacgcccatcgtctcataccctactccaggagccgtccaaacccgcgaaacgaggaggtctgctggatcgagatgccatagaacacatcactgaactgtggaacagactagaacttttgcaacagactctctccaaaatgcccatggctgacggtctaaaaccgctgaaaaacttttcctcactacaagaacttctatcactaggaggagagcgcctcctaatggatttggtgcgggaaaatatgcatgtaagggaaatgatgaacgaggtggcccccttgcttcgagaagacggcagttgccgttccctaaactaccaactgcaacctgtaatcggaatcatttatggccccaccggatgtggcaaatctcaattgctcagaaacttgctatcatcccaactaattaccccagccccagaaacggtgttctttatagccccccaggtggacatgattccaccctcggaactgaaagcttgggaaatgcaaatctgtgaggggaactatgctccggggcccgaaggaacattcataccccaatcgggtactctccgtcccaaatttattaaaatggcctatgatgatttaactcaggaacataactatgatgtgtcagacccacggaacgtgtttgcccgcgctgctgcccacggccctattgctattatcatggatgagtgcatggaaaatctcggaggacacaagggtgtctccaaatttttccacgcttttccatccaagctgcacgataaatttcctaaatgtaccggatacaccgtcttggtggtacttcataacatgaacccaagacgagatcttggcggcaatattgccaacttaaaaatccaatccaaaatgcacataatttcaccccgaatgcacccctcccagctcaaccggtttgtaaacacctacaccaagggcttatctgtggcaatcagcctacttctaaaagatattgtgcaacaccatgcacagcgaccttgttatgactgggtaatttacaacactaccccggagcatgaatcccttcaatggagctatctccaccccaaagacggcctaatgcccatgtatctaaacattcaatcccacctttataggattttggaaaaaatccaccgtgttctcaatgatcgagatcggtggtctagggcataccgtgcgcgaaaaatgaaataaaaaacacttgattttaaatcaa

SEQ ID NO: 87 - DNA, 3748 bp, Human adenovirus
  misc_feature 1..3748: note = Ad14 E3; 26854 - 30601
  source 1..3748: mol_type = genomic DNA
tataaaacgcctgatgattagaggccgaggtattcagcttaacgacgagtcggtgagctctccgcttggtctacgaccagacggaatctttcaaattgccggctgcgggagatcttccttcacccctcgtcagactgttttgactttggaaagttcgtcttcgcaaccccgctcgggcggaatcgggaccgttcaatttgtggaggagtttactccctctgtctacttcaaccctttctccggatctcctgggcactacccggacgagttcataccgaactttgacgcaattagcgagtcagtggacggctacgattgatgtctggtgacgcggctgagctatctcggctgcgacatctagaccactgccgccgctttcgctgttttgcccgggaactcattgagttcatttacttcgaactccccaaggatcaccctcaaggtccggcccacggagtgcggattactatcgaaggtaaaataaactctcgcctgcatcgaattttctcccagcggcccgtgctgatcgagcgagaccagggaaacaccacggtttctatctactgcatttgtaatcacccaggattgcatgaaagcctttgctgtcttatgtgtactgagtttaataaaaactgaattaagactctcctacggactgccgcttcttcaacccggattttacaaccagaagaacgaaacttttcctctcatccaggactctgttaactttacctttcctacttacaaaccagaagctcaacgacaacaccgcttttccagaagcattttccctactaatactactttcaaaaccggaggtgagctccacagtctccccgcagaaaacccttgggtggaagcgggccttgtagtgctaggaattcttgcgggcgggcttgtgattattctttgctacctatacacaccttgcttcactttcctagtggtgttgtggtattggtttaaaaaatggggcccatactagtcttgcttgttttactttcgcttttgggaccgggttctgccaactacaatccatgtctagactttgacccagaaaactgcacacttacttttgcacccgacacaagccgcatctgtggagttcttattaagtgcggatgggaatgcaggtccgttgaaattacacacaataacaaaacctggaacaataccttatccaccacatgggagccaggagttcccgagtggtacactgtctctgtccgaggtcctgacggttccatccgcattagtaacaacacttttattttttctacaatgtgcgatctggccatgttcatgagcaaacagtattctctatggcctcccagcaaggacaacattgtaacgttctccattgcttattgcttgtgcgcttgccttcttactgctttactgtgcgtatgcatacacctgcttgtaaccactcgtatcaaaaacgccaataacaaagaaaaaatgccttaacctctttctgtttacagacatggcttttcttacagctctcatacttgtcagcattgtcactgccgctcacggacaaacagtcgtctctatccctctaggtcataattacactctcataggacccccaatcacttcagaggtcatctggaccaaactgggaagcgttgattactttgatataatctgtaacaaaacaaaaccaataatagtaacctgcaacatacaaaatcttacattaattaatgttagcaaagtttacagcggttactattatggttatgacagatacagtagtcaatatagaaattacttggttcgtgttacccagtccaaaaccacgaaaatgccaaatatggcagaaattcgatccgatgacaattctctagaaacttttacatcttccaccacacctgacgaaaaaaatatcccagattcaatgattgcaattatcgcagcggtggcagtggtgatggcactaacagtaatatgcatgcttttatatgcttgtcgctacaaaaagtttcatcctaaaaaacaagatctcctactaaggcttaacatttaatttctttttacacagccatggtttccactaccacattccttatgcttactagtatagcaactctgacttctgctcgctcacacctcactgtaactataggctcaaactgcacactaaaaggacctcaaggtggtcatgtcttttggtggagaatatatgacaatggatggtttacaaaaccatgtgaccaacctggtagatttttctgcaacggcagagacctaaccattatcaacgtgacagcaaatgacaaaggcttctattatggaaccgactataaaagtagtttagattataacattattgtactgccatccaccactccagcgccccgcaaaactactttctctagcagcagtgccgctaacaatacaatttccaatccaacctttaccgcgcttttaaaacgcactgtgaataattctacaacaatttccacttcaacaatcagcatcatcgctgccgtgacaattggaatatctattcttgtttttaccataacctactacacctgctgctataaaaaagacgaacataaaggtgatccattacttagatttgatatttaatttgttctttttttttttatttacagtatggtgaacaccaatcatggtacctagaaatttcttcttcaccatactcatctgtgcttttaatgtttgcgctactttcacagcagtagccacagcaagcccagactgtataggagcatttgcttcctatgcactttttgcttttgtcacttgcatctgcgtatgtagcatagtctgcctggttattaattttttccaacttctagactggatccttgtgcgaattgcctacctgcgccaccatcccgaataccgcaaccaaaatatcgcggcacttcttagacttatctaaaaccatgcaggctatactaccaatatttttgcttctattgcttccctacgctgtctcaaccccagctacctatagtactccaccagaacaccttagaaaatgcaaattccaacaaccgtggtcatttcttgcttgctatcgagaaaaatctgaaattcccccaactttaataatgattgctggaataattaatgtaatctgttgcaccataatttcatttctgatataccccctatttgattttggctggaatgctcccaatgcacatgattattcccaagacccagaggaacacattcccctacataacatgcaacaaccaatagcgctaatagaatacgaaagtgaaccacaacccccactactccctgctattagttacttcaacctaaccggcggagatgactgaaacactcaccacctccaattccgccgaggatctgcttgatatggacggccgcgtctcagaacagcgactcgcccaactacgcatccgccagcagcaggaacgcgtggccaaagagctcagagatgtcatccaaattcaccaatgcaaaaaaggcatattctgtttggtaaaacaagccaaaatatcctacgagatcaccgctaccgaccatcgcctctcttacgagcttggcccccaacgacaaaaatttacctgcatggtgggaatcaaccccatagttatcacccaacaaagtggagatactaagggttgcattcactgctcctgcgattccatcgagtgcacctacaccctgctgaagaccctatgcggactaagagacctgctacccatgaattaaaaaaatgattaataaa

SEQ ID NO: 88 - DNA, 978 bp, Human adenovirus
  misc_feature 1..978: note = Ad14 fiber; 30788 - 31765
  source 1..978: mol_type = genomic DNA
atgaccaagagagtccggctcagtgactccttcaaccctgtctacccctatgaagatgaaagcacctcccaacacccctttataaacccagggtttatttccccaaatggcttcacccaaagcccagacggagttcttactttaaaatgtttaaccccgctaacaaccacaggcgggtctctacagctaaaagtgggagggggacttacagtagatgacactgatgggaccttacaagaaaacataggtgccaccacaccacttgttaagactgggcactctataggtttatccctaggagccggattgggaacagatgaaaataaactttgtaccaaattgggagaaggacttacattcaattcaaacaacatttgcattgatgacaatattaacaccctgtggacaggagttaaccccaccgaagccaactgtcaaatgatggactccagtgaatctaatgattgcaaattaattctaacactagttaaaactggagccctagtcactgcatttgtttatgttataggagtatctaacaattttaatatgctaactacatacagaaatataaattttactgcggagctgttttttgattctgcgggtaatttactaactagcctgtcatccctaaaaactccacttaatcataaatcaggacaaaacatggctactggtgccattactaatgctaaaagtttcatgcccagcacaactgcttatcctttcaataataattctagagaaaaagaaaactacatttacggaacttgtcactacacagctagtgatcacactgcttttcccattgacatatctgtcatgcttaaccaaagagcaataagagctgatacatcatattgtattcgtataacttggtcctggaacacaggagatgccccagaggggcaaacctctgctacaaccctagttacctccccatttaccttttactacatcagagaagacgactga

SEQ ID NO: 89 - DNA, 126 bp, Human adenovirus
  misc_feature 1..126: note = Ad14 fiber tail; 30788 - 30913
  source 1..126: mol_type = genomic DNA
atgaccaagagagtccggctcagtgactccttcaaccctgtctacccctatgaagatgaaagcacctcccaacacccctttataaacccagggtttatttccccaaatggcttcacccaaagccca

SEQ ID NO: 90 - DNA, 273 bp, Human adenovirus
  misc_feature 1..273: note = Ad14 fiber shaft; 30914 - 31186
  source 1..273: mol_type = genomic DNA
gacggagttcttactttaaaatgtttaaccccgctaacaaccacaggcgggtctctacagctaaaagtgggagggggacttacagtagatgacactgatgggaccttacaagaaaacataggtgccaccacaccacttgttaagactgggcactctataggtttatccctaggagccggattgggaacagatgaaaataaactttgtaccaaattgggagaaggacttacattcaattcaaacaacatttgcattgatgacaatattaacacc

SEQ ID NO: 91 - DNA, 576 bp, Human adenovirus
  misc_feature 1..576: note = Ad14 fiber knob; 31187 - 31762
  source 1..576: mol_type = genomic DNA
ctgtggacaggagttaaccccaccgaagccaactgtcaaatgatggactccagtgaatctaatgattgcaaattaattctaacactagttaaaactggagccctagtcactgcatttgtttatgttataggagtatctaacaattttaatatgctaactacatacagaaatataaattttactgcggagctgttttttgattctgcgggtaatttactaactagcctgtcatccctaaaaactccacttaatcataaatcaggacaaaacatggctactggtgccattactaatgctaaaagtttcatgcccagcacaactgcttatcctttcaataataattctagagaaaaagaaaactacatttacggaacttgtcactacacagctagtgatcacactgcttttcccattgacatatctgtcatgcttaaccaaagagcaataagagctgatacatcatattgtattcgtataacttggtcctggaacacaggagatgccccagaggggcaaacctctgctacaaccctagttacctccccatttaccttttactacatcagagaagacgac

SEQ ID NO: 92 - DNA, 1677 bp, Human adenovirus
  misc_feature 1..1677: note = Ad14 penton; 13698 - 15374
  source 1..1677: mol_type = genomic DNA
atgaggcgagtcgtgctaggcggagcggtggtgtatccggagggtcctcctccttcgtacgagagcgtgatgcagcagcagcaggcgacggcggtgatgcaatccccactggaggctccctttgtacctccgcgatacctggcacctacggagggcagaaacagcattcgttactcggaactggcacctcagtacgataccaccaggttgtatctggtggacaacaagtcggcggacattgcttctctgaactatcagaatgaccacagcaacttcttgaccacggtggtgcagaacaatgactttacccctacggaagccagtacccagaccattaactttgatgaacgatcgcggtggggcggtcagctaaagaccatcatgcatactaacatgcccaacgtaaacgagtatatgtttagtaacaacttcaaagcgcgtgtgatggtgtccagaaaacctcccgaaggtgctgcagttggggatacatatgatcacaagcaggatattttggaatatgagtggttcgagtttactttgccagaaggcaacttttcagttactatgaccattgatttgatgaacaatgccatcatagataactacttgaaagtgggcagacagaatggagtgcttgaaagtgacattggtgttaagttcgacaccaggaacttcaagctgggatgggatcccgaaaccaagttgattatgcctggagtgtatacgtatgaagcctttcatcctgacattgtcttactgcctggctgtggagtggactttaccgaaagtcgtttgagcaaccttcttggtatcagaaaaaaacagccatttcaagagggttttaagattttgtatgaagatttagaaggaggtaatattccggccctcttggatgtagatgcctatgagaacagtaagaaagaacaaaaagccaaaatagaagctgctgcggaagctaaggcaaacatagttgccagcgactttacaagggttgctaacgctggagaggtcagaggagacaattttgcaccaacacctgttccgactgcagaatcattattggccgatgtaactggaggaacggacgtgaaactcactattcaacctgtagaaaaagatagtaagaatagaagctataatgtgttggaagataaaatcaacacagcctatcgcagttggtacctttcgtacaattatggcgatcccgaaaaaggagtgcgttcctggacattgctcaccacctcagatgtcacctgcggagcagagcaggtctactggtcgcttccagacatgatgcaggatcctgtcactttccgctccactagacaagtcagcaactaccctgtggtgggtgcagagcttatgcccgtcttctcaaagagcttctacaacgaacaagctgtgtactcccagcagctccgccagtccacctcgcttacgcacgtcttcaaccgctttcctgagaaccagattttaatccgtccgccggcgcccaccattaccaccgtcagtgaaaacgttcctgctctcacagatcacgggaccctgccgttgcgcagcagtatccggggagtccaacgtgtgaccgttactgacgccagacgccgcacctgtccctacgtgtacaaggcactgggcatagtcgcaccgcgcgtcctttcaagccgcactttctaa

SEQ ID NO: 93 - DNA, 2838 bp, Human adenovirus
  misc_feature 1..2838: note = Ad14 hexon; 18252 - 21089
  source 1..2838: mol_type = genomic DNA
atggccaccccatcgatgctgccccagtgggcatacatgcacatcgccggacaggatgcttcggagtacctgagtccgggtctggtgcagttcgcccgcgccacagacacctacttcaatctgggaaataagtttagaaatcccaccgtagcgccaacccacgatgtgaccaccgaccgtagccagcggctcatgttgcgcttcgtgcccgttgaccgggaggacaatacatactcttacaaagtgcggtacaccctggccgtgggcgacaacagagtgctggatatggccagcacgttctttgacattaggggcgtgttggacagaggtcccagtttcaaaccctattctggtacggcttacaactctctggctcctaaaggcgctccaaatgcatctcagtggttggataaaggggttgaaactactgaagaacggcaaaatgaagacggggaaaatgacgaaaaagctacatacacttttggcaatgccccagtaaaagccgatgctgacattacaaaagacggactaccaataggtttggaagtcccagctgaaggtgaccctaaacctatctacgctaataagctttaccaaccagaaccccaggtgggacaggaatcgtggactgatacagatggcactgaagaaaaatacggaggcagagtacttaaaccggacactaaaatgaaaccgtgctatgggtcttttgctaaacctactaatgtgaaaggcggacaggcaaaagtgaaaacagaagaaggcaacaacattgaatatgacattgacatgaacttttttgacttaagatcacaaaaacaaggtcttaaacctaagattgtaatgtatgcagaaaatgtggacctggaatctccagatactcatgttgtgtacaaacctgaagtttcagatgctagttcaaatgctaatcttggacagcagtctatgcccaacagacccaactacattggcttcagagataattttattggtcttatgtactataacagtactggtaacatgggggtgctggctggccaagcatctcagttgaatgcagtggttgacttgcaggacagaaacacagaactgtcttaccaactcttgcttgactccctgggcgatagaaccagatactttagcatgtggaatcaggctgttgacagttatgatcccgatgtgcgtgttattgaaaatcatggtgtggaagatgaacttcccaactactgttttccactggacggcatcggtccgcgaacagatagttacaaggagattcagttaaatggagaccaagcttggaaagatgtaaatccaaatggtatcagtgaacttgttaagggaaatccatttgccatggaaattaaccttcaagccaatctatggcgaagtttcctttattccaatgtggctctgtatctcccagactcgtacaaatacaccccgtccaatgtcactcttccagaaaacaaaaacacctacgactacatgaacgggcgggtggtgccgccatctctagtagacacctatgtgaacattggcgccaggtggtctctggatgctatggacaatgtcaacccattcaaccaccaccgtaacgctggcttgcgttaccgatccatgcttttgggtaacggacgttatgtgcctttccacatacaagtgcctcaaaaattcttcgctgtcaaaaacctgctgcttctcccaggctcctacacttatgagtggaacttcaggaaggatgtgaacatggtgctacagagttccctcggtaacgacctacgggtagatggcgccagcatcagtttcacgagcatcaacctctatgctacctttttccccatggctcacaacaccgcttccacccttgaagccatgctgcggaatgacaccaatgatcagtcattcaacgactatctatctgcagctaacatgctctatcccattcctgccaatgcaaccaatattcccatttccattccttctcgcaactgggcggctttcagaggctggtcatttaccagactcaaaaccaaagaaactccctctttggggtctggatttgacccctactttgtctattctggttctattccctacctggatggtaccttctacctgaaccacacttttaagaaggtttccatcatgtttgactcttcagtgagctggcctggaaatgacaggttactatctcccaacgaatttgaaataaagcgcactgtggatggcgaaggctacaatgtagcccaatgcaacatgaccaaagactggttcttggtacagatgctcgccaactacaacataggctatcagggcttctacattccagaaggatacaaagatcgcatgtattcatttttcagaaacttccagcccatgagcaggcaggtggttgatgaggtcaattacaaagacttcaaggccgtcgccataccctaccaacacaacaactctggctttgtgggttacatggctccgaccatgcgccaaggtcaaccctatcccgctaactatccctatccactcattggaacaactgccgtaaatagtgttacgcagaaaaagttcttgtgtgacagaaccatgtggcgcataccgttctcgagcaacttcatgtctatgggggcccttacagacttgggacagaacatgctttatgccaactcagctcatgctctggacatgacctttgaggtggatcccatggatgagcccaccctgctttatcttctcttcgaagttttcgacgtggtcagagtgcatcagccacatcgcggcatcatcgagacagtctacctgcgtacaccgttctcggccggtaacgctaccacgtaa

SEQ ID NO: 94 - protein, 325 aa, Human adenovirus
  REGION 1..325: note = misc_feature - Ad14 fiber; 1 - 325 (GenBank accession no. AAW33140); Human adenovirus 14
MTKRVRLSDSFNPVYPYEDESTSQHPFINPGFISPNGFTQSPDGVLTLKCLTPLTTTGGSLQLKVGGGLTVDDTDGTLQENIGATTPLVKTGHSIGLSLGAGLGTDENKLCTKLGEGLTFNSNNICIDDNINTLWTGVNPTEANCQMMDSSESNDCKLILTLVKTGALVTAFVYVIGVSNNFNMLTTYRNINFTAELFFDSAGNLLTSLSSLKTPLNHKSGQNMATGAITNAKSFMPSTTAYPFNNNSREKENYIYGTCHYTASDHTAFPIDISVMLNQRAIRADTSYCIRITWSWNTGDAPEGQTSATTLVTSPFTFYYIREDD

SEQ ID NO: 95 - protein, 91 aa, Human adenovirus
  REGION 1..91: note = misc_feature - Ad14 fiber shaft; 43 - 133 (GenBank accession no. AAW33140); Human adenovirus 14
DGVLTLKCLTPLTTTGGSLQLKVGGGLTVDDTDGTLQENIGATTPLVKTGHSIGLSLGAGLGTDENKLCTKLGEGLTFNSNNICIDDNINT

SEQ ID NO: 96 - protein, 192 aa, Human adenovirus
  REGION 1..192: note = misc_feature - Ad14 fiber knob; 134 - 325 (GenBank accession no. AAW33140); Human adenovirus 14
LWTGVNPTEANCQMMDSSESNDCKLILTLVKTGALVTAFVYVIGVSNNFNMLTTYRNINFTAELFFDSAGNLLTSLSSLKTPLNHKSGQNMATGAITNAKSFMPSTTAYPFNNNSREKENYIYGTCHYTASDHTAFPIDISVMLNQRAIRADTSYCIRITWSWNTGDAPEGQTSATTLVTSPFTFYYIREDD

SEQ ID NO: 97 - protein, 558 aa, Human adenovirus
  REGION 1..558: note = misc_feature - Ad14 penton; 1 - 558 (GenBank accession no. AAW33119); Human adenovirus 14
MRRVVLGGAVVYPEGPPPSYESVMQQQQATAVMQSPLEAPFVPPRYLAPTEGRNSIRYSELAPQYDTTRLYLVDNKSADIASLNYQNDHSNFLTTVVQNNDFTPTEASTQTINFDERSRWGGQLKTIMHTNMPNVNEYMFSNNFKARVMVSRKPPEGAAVGDTYDHKQDILEYEWFEFTLPEGNFSVTMTIDLMNNAIIDNYLKVGRQNGVLESDIGVKFDTRNFKLGWDPETKLIMPGVYTYEAFHPDIVLLPGCGVDFTESRLSNLLGIRKKQPFQEGFKILYEDLEGGNIPALLDVDAYENSKKEQKAKIEAAAEAKANIVASDFTRVANAGEVRGDNFAPTPVPTAESLLADVTGGTDVKLTIQPVEKDSKNRSYNVLEDKINTAYRSWYLSYNYGDPEKGVRSWTLLTTSDVTCGAEQVYWSLPDMMQDPVTFRSTRQVSNYPVVGAELMPVFSKSFYNEQAVYSQQLRQSTSLTHVFNRFPENQILIRPPAPTITTVSENVPALTDHGTLPLRSSIRGVQRVTVTDARRRTCPYVYKALGIVAPRVLSSRTF

SEQ ID NO: 98 - protein, 945 aa, Human adenovirus
  REGION 1..945: note = misc_feature - Ad14 hexon; 1 - 945 (GenBank accession no. AAW33124); Human adenovirus 14
MATPSMLPQWAYMHIAGQDASEYLSPGLVQFARATDTYFNLGNKFRNPTVAPTHDVTTDRSQRLMLRFVPVDREDNTYSYKVRYTLAVGDNRVLDMASTFFDIRGVLDRGPSFKPYSGTAYNSLAPKGAPNASQWLDKGVETTEERQNEDGENDEKATYTFGNAPVKADADITKDGLPIGLEVPAEGDPKPIYANKLYQPEPQVGQESWTDTDGTEEKYGGRVLKPDTKMKPCYGSFAKPTNVKGGQAKVKTEEGNNIEYDIDMNFFDLRSQKQGLKPKIVMYAENVDLESPDTHVVYKPEVSDASSNANLGQQSMPNRPNYIGFRDNFIGLMYYNSTGNMGVLAGQASQLNAVVDLQDRNTELSYQLLLDSLGDRTRYFSMWNQAVDSYDPDVRVIENHGVEDELPNYCFPLDGIGPRTDSYKEIQLNGDQAWKDVNPNGISELVKGNPFAMEINLQANLWRSFLYSNVALYLPDSYKYTPSNVTLPENKNTYDYMNGRVVPPSLVDTYVNIGARWSLDAMDNVNPFNHHRNAGLRYRSMLLGNGRYVPFHIQVPQKFFAVKNLLLLPGSYTYEWNFRKDVNMVLQSSLGNDLRVDGASISFTSINLYATFFPMAHNTASTLEAMLRNDTNDQSFNDYLSAANMLYPIPANATNIPISIPSRNWAAFRGWSFTRLKTKETPSLGSGFDPYFVYSGSIPYLDGTFYLNHTFKKVSIMFDSSVSWPGNDRLLSPNEFEIKRTVDGEGYNVAQCNMTKDWFLVQMLANYNIGYQGFYIPEGYKDRMYSFFRNFQPMSRQVVDEVNYKDFKAVAIPYQHNNSGFVGYMAPTMRQGQPYPANYPYPLIGTTAVNSVTQKKFLCDRTMWRIPFSSNFMSMGALTDLGQNMLYANSAHALDMTFEVDPMDEPTLLYLLFEVFDVVRVHQPHRGIIETVYLRTPFSAGNATT

SEQ ID NO: 99 - protein, 42 aa, Human adenovirus; identical to SEQ ID NO: 63
  REGION 1..42: note = misc_feature - Ad14 fiber tail; 1 - 42 (GenBank accession no. AAW33140); Human adenovirus 14

SEQ ID NO: 100 - DNA, 114 bp, Human adenovirus
  misc_feature 1..114: note = Ad16 5' (left) ITR; 1 - 114
  source 1..114: mol_type = genomic DNA
cattatctataatataccttatagatggaatggtgccaacatgtaaatgaggtaatttaaaaaagtgcgcgctgtgtggtgattggctgcggggtgaacggctaaaaggggcgg

SEQ ID NO: 101 - DNA, 114 bp, Human adenovirus
  misc_feature 1..114: note = Ad16 3' (right) ITR; 35409 - 35522
  source 1..114: mol_type = genomic DNA
ccgccccttttagccgttcaccccgcagccaatcaccacacagcgcgcacttttttaaattacctcatttacatgttggcaccattccatctataaggtatattattgataatg

SEQ ID NO: 102 - DNA, 365 bp, Human adenovirus
  misc_feature 1..365: note = Ad16 Packaging Sequence; 115 - 479
  source 1..365: mol_type = genomic DNA
gcaatgctgggatgtgacgtaacttatgtgggaggagttatgttgcaagttatcgcggtaaaggtgacgtaaaacgaggtgtggtttggacacggaagtagacagttttcccacgtttactgacaggatatgaggtagttttgggcggatgcaagtgaaaattctccattttcgcgcgaaaactgaatgaggaagtgaatttctgagtcatttcgcggttatgacagggtggagtatttgccgagggccgagtagactttgaccgtttacgtggaggtttcgattaccgtgtttttcacctaaatttccgcgtacggtgtcaaagtcctgtgtttttacgtaggtgtcagctgatcactagggta

SEQ ID NO: 103 - DNA, 3431 bp, Human adenovirus
  misc_feature 1..3431: note = Ad16 E1; 480 - 3910
  source 1..3431: mol_type = genomic DNA
tttaaacctgtcgagttccgtcaagaggccactcttgagtgccagcgagaagagttttctcctccgcgctgcgagtcagttttgcgctttgaaaatgagacacctgcgattcctgccacaggagattatctccagcgagaccgggatcgaaatactggagtttgtggtaaataccctgatgggagatgacccggaaccgccagtgcagcctttcgatccacctacgctgcacgatctgtatgatttagaggtagacgggcctgatgatcccaatgaggaagctgtaaatgggttttttactgattctatgctgctagctgccgatgaaggattggacataaaccctcctcctgagacccttgataccccaggggtggttgtggaaagcggcagaggtgggaaaaaattgcctgatctgggagcagctgaaatggacttgcgttgttatgaagagggttttcctccgagtgatgatgaagacggggaaactgaacagtccatccataccgcagtgaatgagggagtaaaagctgccagcgatgtttttaagttggactgtccggagctgcctggacatggctgtaagtcttgtgaatttcacaggaataacactggaatgaaagaactattgtgctcgctttgctatatgagaatgcactgccactttatttacagtaagtgtatttaagtgaaatttaaaggaatagtgtagctgtttaataactgttgaatggtagatttatgtttttgcttgcgattttttgtaggtcctgtgtctgatgatgagtcaccttctcctgattcaactacctcacctcctgaaattcaggcgcccgtacctgcaaacgtatgcaagcccattcctgtgaagcctaagtctgggaaacgccctgctgtggataagcttgaggacttgttggagggtggggatggacctttggaccttagtacccggaaactgccaaggcaatgagtgccctgcagctgtgtttatttagtgacgtcatgtaataaaattatgtcagctgctgagtgttttattgcttcttgggtggggacttggatatataagtaggagcagatctgtgtggttagctcatagcaacctgctgccatccatggaggtttgggctatcttggaagacctgagacagactaggctactgctagaaaacgcctcggacggagtctctggcttttggagattctggttcggtggcgatctagctaggctagtgtttaggataaaacaggactatagggaagaatttgaaaagttattggacgacagtccaggactttttgaagctcttaacttgggccatcaggctcattttaaggagaaggttttatcagttttagatttttctactcctggtagaactgctgctgctgtagcttttcttacttttatattggataaatggatccgccaaacccacttcagcaagggatacgttttggatttcatagcagcagctttgtggagaacatggaaggctcgcaggatgaggacaatcttagattactggccagtgcagcctctgggagtagcagggatactgagacacccaccggccatgccagcggttctggaggaggagcagcaggaggacaatccgagagccggcctggaccctccggtggaggagtagctgacttgtttcctgaactgcgacgggtgcttactaggtctacgtccagtggacaggacaggggcattaagagggaaaggaatcctagtgggaataattcaagaaccgagttggctttaagtttaatgagccgtaggcgtcctgaaactgtttggtggcatgaggttcagagcgaaggcagggatgaagtttcaatattgcaggagaaatattcactagaacaacttaagacctgttggttggaacctgaggatgattgggaggtggccattaggaattatgctaagatatctctgaggcctgataaacagtatagaattactaagaagattaatattagaaatgcatgctacatatcagggaatggggcagaggttataatagatacacaagataaagcagcttttagatgttgtatgatgggtatgtggccaggggttgtcggcatggaagcagtaacatttatgaatattaggtttaaaggggatgggtataatggcattgtatttatggctaacactaagctgattctacatggttgtagcttttttgggtttaataatacttgtgtagaagcttgggggcaagttagtgtgaggggttgtagtttttatgcatgctggattgcaacatcaggtagggtcaagagtcagttgtctgtgaagaaatgcatgtttgagagatgtaatcttggcatactgaatgaaggtgaagcaagggtccgccactgcgcagctacagaaactggctgcttcattctaataaagggaaatgccagtgtgaagcataatatgatctgtggacattcgaatgagaggccttatcagatgctgacctgcgctggtggacattgcaatattctggctaccgtgcatatcgtttcccatgcacgcaagaaatggcctgtatttgaacataatgtgattaccaagtgcaccatgcacataggtggtcgcaggggaatgtttatgccttaccagtgtaacatgaatcatgtgaaggtgatgttggaaccagatgccttttccagagtaagcttaacaggaatctttgatatgaatattcaactatggaagatcctgagatatgatgacactaaaccgagggtgcgcgcatgcgaatgcggaggcaagcatgctagattccagccggtgtgcgtggatgtgactgaagacctgagacccgatcatttggtgcttgcctgcactggagcggagttcggttctagtggtgaagaaactgactaaagtgagtagtgggacgagctgtggaggtgggactttgaggttggtaaggtgggcagattgggtaaattttgttaatttctgtcttgcagctgccatgagtggaagcgcttcttttgaggggggagtatttagcccttatctgacgggcaggctcccaccatgggcaggagttcgtcagaatgtcatgggatccactgtggatgggagacccgtccagcccgccaattcctcaacgctgacctatgccactttgagttcgtcaccattggatgcagctgcagccgccgccgctactgctgccgccaacaccatccttggaatgggctattacggaagcatcgttgccaattccagttcctctaataacccttcaaccctggctgaggacaagctacttgttctcttggctcagctcgaggccttaacccaacgcttaggcgaactgtctaagcaggtggcccagttgcgtgagcaaactcagtctgctgttgccacagcaaagtctaaataaagatcttaaatcaataaa

SEQ ID NO: 104 - DNA, 19627 bp, Human adenovirus
  misc_feature 1..19627: note = Ad16 E2; 23580 - 3954
  source 1..19627: mol_type = genomic DNA
atggccagccgcggaggaaatcagtcaagcgaccgccaacgggagcacacccccgaacgcggaatgggctctgccagccatccgcctccaaggccagaccgcagcccatctcagtcgcctccacctctgcccccgaagaggaacacctaccgtcgcgtggggtccgattcttctatcgagagccaggtggtactggtaagcgaaacttcgcggtcatccctgtctccggaacggagcaacagtcctcccccgatccctcccaagaagaagcccaggaagaccaagcatgtccctctgcaagacatcagccaggacagcgaagaagaaagagaacaggctcagttggtggccgtgggcttcagctaccccccggtgcgcatcattgagaaggatggcaagagaagtgttgagaagatcgacaagaatgaccctatagctaaaggagctacttctattgctgttaggaatcctttgagcttgcccctggtatctgcctgggagaagggcatggaagtgatggctgtgctaatggagaggtataggctggataatgacctgagaacctctttcaagctgatgccagagcagcacgagcagtacaagcgtatctgccaccagtatgtgaacgaggagcaccgtggcattccgctgacatttagtagcatgaagaccctgacagcgatgatgggaagattcatgcagggattggtgcattcttattctgagatcgcccacaataattgggagtgcaccgggtgcgctctgtgggctcatggatgcaccgattacgaaggcaaggtgaaatgcctgcatggcactatcatgatccagaaggaccacattatcgagatggatgtggcgagcgagaacgggcagcgcgctatgaaggagaacccagacagagccaagatcacccagaaccgctggggcagaaatgtggttcagttggccaacaacgatgcccgctgctgtgtaaatgatgccaactgtgctactaaccaattttccagcaagtcctgtggaatgttctacaccgagggaagtaaggctcaggaagctttcaagcagtacgaagccttcatgaaggccgtatatccagggataacccccgaccaagccaggatgatgctgattcccattcattgcgattgcaaccacaagccaggctgcgctcccgtgatgggcaggcagacctgtaagatgaccccctttgggatggccaatgctgaagacttggatgtgactaccatcagtgacccgaccgtgctggcaagcgtgagacacccagccttgatggtgttccagtgttgcaacccagtgtaccgcaactcccgtgtccagaatgccggccccaactgtgatttcaagatctctgctcctgacctgcttggcgccctgcaactgaccagaaagttgtggcaagacacctttcccgagattccagttcccaagctggtgatccccgagttcaagtggcagaacaggttacagttccgcaacgtatccctgcccgcgggccactatgactcccgccagaacccatttgatttctgagtgaatgatgaaaacgaatgagcaaaaaaccagagccttagtgcatgtaaaaataaagtgctttttattgaacacggttttacatgacttattgcatatccatacggtcaaacgcggtggccctttcgatgcgtgcgcggtgagaacgaaagtaagatgagtgggtgtttaggaagcggtatagtgcctcctggttgcggcgcagggtgggctggacttggggagattggagcatgctgttgggcaccccagtcagcaacttcatggtggggtttccgttcatgggacggtcgggccagtgcacaaaggcatgaaggaacatacagcaaaaaagtccacaggcggctgagcgtgggccctgcacgctctgggtggacttttccagggtgatgcagcggtctttggtagcaagggcactgcggcgcaggagcccctcgtactcaaactggtaaatctgtttgagtcgctcatccgagaacccaaaaggatcaaaaaggtagcaggtgttggagcgcgggttccaaccaaaagccagccagtgctctccccccgtctcgcgtccggcagtgttgactatggcgcaggcgagcttgtcgggggccatgaaccccgggaaacgcttgtcaaaggttcccaggaaatagggaccgcaacccaggtctcggacgatggctttgagctcttgctcgctggagccgtttccggacccgcatgacatggctgcagctgctgcttgcaagaagcaagaggcttcttatgtggtggcgttgccggccgagaacggtgtgcgcaggtagacggcctcgatgacgccgcggtgtggctggtgcactctgaccacgtcgaagacttcgaaaagaagataaagcagggtgggctcatccatgggatccacctcaaaagtcatgtccagtgcatgggccgagttggcatagagcaggttttgtcccaggtctgtaagggcccccatggacatgaagttgctggagaacggtatgcgccacatggtcctgtcgcacaggaactttttttgggtaacactcttaacggcagtagttccgatgagcgggtatggataattggctgggtaaggttccccttgtctcatagtaggcgcaaggtatcctacaaagccagagttgttgtgttgatatggtaaggtgacggctttgtagtcagtgtaattaacctcatcaaccacctgcctgctcataggctggaagtttctgaaaaaggagtacatgcgatccttgtatccctcagggatgtaaaagccctggtagccaatgttgtagttggcgagcatctgtaccaagaaccagtctttggtcatgttgcattgggctacgttgtagccttcgccatccacagtgcgctttatttcaaattcgttaggagatagtaacctgtcatttccaggccagctcactgaagagtcaaacatgatggaaaccttcttaaaagtgtgatttagatagaaggtaccatccaggtagggaatagaaccggaatagacaaagtatgggtcaaatccagaccccaaagagggagtttctttggttttcagtctggtaaatgaccagcctctgaaagccgcccagttgcgagaaggaatggaaatgggaatattggttgcgttggcaggtatggggtagagcatgttagctgcagataggtagtcgttgaatgactgatcattggtgtcattccgcagcatggcttcaagggtggaagcggtgttgtgagccatggggaaaaaagtagcataaagattgatgctcgtgaaactgatgctggcgccatctacccgtaggtcgttaccaagggaactctgtagaaccatgtttacatccttcctaaagttccactcataagtgtaggagcctgggagaagcagcaggtttttaacagcgaagaatttttgaggcacttgtatgtggaaaggcacataacgtccgttacccagaagcatggatcggtaacgcaagccagcgttacggtggtggttgaatgggttgacattgtccatggcatccagagaccacctggcaccaatgttcacataggtgtctactagagatggcggcaccacccgcccgttcatgtagtcgtaggtgtttttgttttctgggagagtgacattggacggggtgtatttatacgagtctgggagatacaaagccacattggaataaaggaaacttcgccatagattggcttggatgttgatttccatggcaaaaggattgcctccatggatttcattagcagtactaactgtggtgtcatctttgtcccactgtgttccactggttccagcaactgcatctgttttaactttaacaccttggtaagtgtctgtaaatcccacaccattcaacggaaagcaatagtttggcaattcgtcctccacaccatggttttcaataatacgcacatcaggatcatagctgtccaccgcctgattccacatactgaaataccgggttctgtcacccagagagtcaagcaagagctggtaggacagttcagtgtttctgtcttgcaagtcaaccacagcattcagctgagaggcctgaccggccagcacccccatattgccagtgctgttgtagtacatgagcccaataaaattgtctctgaagccaatgtagttgggtctgttaggcatggcttgctgacccaaattggattcagagctggtgtcctctgttccaggtttgtatacaatatgagtatctggagtctgcaagtcaacattttctgtgtacattacaatatctggatcgtagttagcagcaatatttttgttgtcaaagaaagccagatctatatcatagttaggagtggtggcggcggtttctgaatcttttaagttagcctgaccaccttctttgttggtaggcttggcgaaagaaccatagcagggtttcatctttgtagtgtccttcagagctctgcctccatatttttcctctgtaccattggcgtcaacccaactggcatttccaacttgtggttctggttggaaagttttatcagcataaattactgtgtcagttccagaagttgaatctattccaataggcagcccatcagcttctatctttttcccagtaacaccgggcatggcagctaccccaaaggtatgcattttgctgtcagaatccttccactggcaggtgttgggcgctcccttgggagccaggctgttgtaggcggtcccggagtagggtttgaagctagggccccggtccagcacgccgcggatgtcaaagaacgtgctggccatatccagtactctgttgtcccctacagccagcgtgtagcgaactttgtaagagtaggtattgtcttcccggtcaacgggcacgaagcgcagcattagtcgctggctacggtcggtggtcacatcgtgggtgggcgccactgtggggtttctaaacttgttccccatactgaagtaggtgtctgttgcacgggcgaactgcaccagacccggactcaggtactccgaagcatcctgtccggcgatgtgcatgtatgcccattggggcatcatcgatggggtggccatcttgaaagcaactcagcctcggcgcgcgacctcttcctttctcctctgctgcggcggcatggtgatgatacatacacacagacaagcaagttaagcgctactccatatttaattaatagcagcgacggcgctttacactctgcacgcccagacccacgatgctgttcagagtactctgccagtttgctttcgggcgcggtgtgccccaggacgcggtctggctacggcgacgggctgtacggcggtgggctttctggtagcgacaggtttgggaataggcgccgcagaagcagggggaggaggcaagtccaaggtggcaggccgatgcgactgagaaggtttcatcaccccggtagccatgtgagctacaggcctggtagtgggcattccgagctttactgcctcctcgtatgaagggggctcgtctgcgcgcgtcaccaacgtctgttccagctcgggacgcggtcgcttgtcgccccgcttctccagcggaggaagctcttcctccacttccatttcaccaggagttgcgggcggcgggtccaggcggctgtttatctgtttctgcacagcctggttggctagatccactacgccgttaataccagaggcgataccatcgaccaccttttgttggaagttctgctccttaagcttatttctaagggcctgccctgtgctgctgttccaagctttgttcccataggtttttatggtcgagccaaaatttttaagcccgctccagatactgctccaattgaaggcgcccccgttcagttggctcgtgccgatgtcgctccaggtgcccatgtacggcctcgtgccgtgtcgcggagccagggatgaaaaattgatgtcttccatctctacaaaaacatagtcacaggaccaggagcgtcagagtccattctattttttatttataaatttttccattgttagtggcgctgcgaggcctgaaccgccacggaagctatgcctggtatcgccccgatcgccgcggcgatgatgggtataagagctggcagaaagccaccccctaatcgcttgctgatagcgcgccttcgtctgtggcggcgcatccctcgccccaacatccttctacggcgcgagtttcttcctcggtagccagtaatggggacgcgaaggcggcaagtgagagccatatctgcaaggaggcagcgtcaacagtcattaagtggtgatgcttggatgatagcgcgcgcgcggcagcgtcagaggttcagcgcgaccatcgcggtacactctccgcaccagggcggcgggagttaatttgctggcagtggtgcggcggcggcgacggcgagtgcgacttgcaggtagtttgcggcggcgtgaggtgttgctccgacttcgatagtagcgagtgcctctgtaacccggagtgggaatgatggatgggtgcagagcatagttgggcattagcagacttgctgggccatactttcgacgtgatcttctagtggtgctgggggcggcaacgggcgcgggcatccagggttccgtctgaacctcaattgaggtgactgtgggttttgcaggttcggtctgcacttccatggactcagtgggaatcttgatgtcaaaggtttgtactcccaaacctggcgccacttccttgatgggtctcactttcacctcaggctggatatcggcatccactttcattttctccagtacgtcttctaatctctgccgcttgggcaccattagctgcatggtgggatataggtcctcaccctcgcgctttacgcctctgctcgcaggtacgggcagcacttgctgcagggtgactggtttgaggctaggggtgggatttccatgatccaagggaatagataccgcctcctctttgggactggatcttgtgcgcttgccataagcaaactcgccaaggcggtctgccgcctgctcaataatatcgtcatccccatacacctcatcataggaccgtttaaaagtagtgctggaacgctcgccaggtgtaaagaccacagtggtcccgggtctaagcacttggcgtacttttcgaccgcgccactgcacgcgccgtcttggcgcgaactcgcgcacaaactccaccagtccatcatcgccatcttcttcttttttgtcctttttaacccgcttgattttgcggggctttttttcatccttcatcggcggaccgtagatttcaggcgcgatgacctggagcatctcttccttgtatttgcgcttggacatacttgccgctgggacacaacatcggagactgctcagtatcttctaagtgcgaggggggcgggtgcgcacgggcacgcgctggccggtagtggcatcgcgcacccaatacacattgcctcttcgcggttgggccatgttggcaatggccgctgctgccgccgtggccgcgcgcctgcgggacctgccgctgctagcaccagaagccgcgcgtctggccgctctaagcatggctcttcgtcccacacgtttggccctccgcagaatagcttttgcagctcgcatagcgggagtagccctgtggcgcctggcgatgcgcctccttcggctcttccggcgagcataggcgcgagcgtctgccactacactgtcaataactgcatccacagtagatgtaggcgcagtaggagtataattacgagcatcggcaaccacctggtcgatcacatcatcgaccgtggtccgagtgcgggtacggcccttgagggcgccccagggagcgcggaaatgaccgcgaacgcgcacggggtgctgggtagagcgtttgcgggcgcctccgtacatcttggtgggcgcatgcagtccccaaccggtattattactgggcgagatgagaatggacatttttttttttttttagaaagtgcggcttgaaagaacgcgcggcgcgactatgcccagggccttgtaaacgtagggacaggtgcgacgtctggcgtcagtaacggtcacgcgctggactccccggatactgctgcgtaacggcagggtcccgtgatctgtgagagcaggaacgttttcactgatggtggtaattgtgggcgccggcgggcggatgaggatctggttctcagggaagcggttgaagacgtgcgtgagcgaggtggactgtcggagctgctgagagtacacggcttgctcattgtagaaactctttgagaagaccggcataagctctgcacccactactgggtagttgttgacttgtctcgaggagcggaaggtgatggggtcttgcatcatgtcggggagcgaccagtagacctgctcggctccacaggtgacatccgaagtggtgagcagtgtccaggaccttattcctttctcagggttaccataattgtaggacaggtaccagctgcggtaggctgtgttgattttgtcttccaagacattgtagcttctattcttgctgtctttttctaaaggttggatctttaactcttttttaacttcagacataagtaatagttctgcagctgcagcttcacgtttttgtttttcagttatataagtatctcctctagttatattatcatcttcactggtttcctctgcaacagccactgtggttgttttaaccaccgccttttcgcctgtttcagtagtggtatcctttttgctttcctcataggcagtgacatccaaaagggcaggaatattacccccttcaagatcttcatacatgattttgaaaccctcctggaatggatgtctcttcctgatgccaagcaagttgctaagtcggctttcagtaaaatctaccccgcaaccaggcaacaaaacaatgtcaggatggaatgcctcataagtgtagacccctggcataatcaacttagtttcggggtcccacccgagcctgaagtttctagtgtcaaacttaacaccaatgtcactttccagcactccattctgtctgccaattttcaggtagttgtcaatgatggcattgttcatcaggtcgatggtcatggtagctgagaagttaccttctggtaaagtgaactcaaaccactcatatttcaaaatatcatctttatgatcatttactgtaacaccttcaggagccttcctagataccatcaccctcgccttaaacttgttgctgaacatgtactcgttcacgttgggcatgttggtgtgcataatggtcttcagctgaccgccccaccgcgaccgctcgtcaaagttaatggtctgggtgctagcctccgtgggggtaaagtcattgttctgcaccactgtggtcaggaagttgctgtggtcgttctgatagttcagggaggcgatgtccgccgacttgttgtccaccagatacaacttggtggtatcgtactggggtgacagctccgagtaacgaatgctatttctcccttccgtaggcgccaggtaccgagggggtacgaagggagcctccagtgggggctgtatcatcgccgcctgttgctgcatcacgctctcgtaagaaggaggaggaccctccggatacaccaccgctccgcctagcacggctcgtctcctcatcgtactagatacagataacaaaaaaaagaacgaacgcacgctcggttgccatggccttggtgagttgcctttttatttttactttcacttttacaacatgcgaccgaaacggggacgcagatgagcgaacgggttgccaactccttttccacccaagtccaacacgctgctgtcatcggcagagtcctcgtcgtcccacacaagacccatctgcctgtcgtggcgctggcgtctacggctcggtctgcttgtagcccccaagatcctgggctcgtctctgtgatcctgcgcataggtcttccatctactcatcttatccaccaggctctctattccattgttagggaagttcttttccctctctggcctcagcaaagagtcattcaagtactcatcctcgcccatcaagcgcgggcggtttattctccccagttcactgctgcgaacgctgtttagtgaaaaggacaagctagggaaaggactcgcagcttcgggcacggccgcggcagcaccagccgttccgggcaacgatacggaagagtgccttctatcgcccccttccttcttccaaaccgtataacctggcggcggggaaaatatgctactgtccacatcgtcccataggaacccgtcattgggatcgggcatgtcgtattcgccagtgtagaaaccaggtgggggcagccagtgtgggttcagaatagcattggtgaaataatcagagttcatggcggccgccctgtgcaggtagtccagcagtttgttaatgaaaggcctgttactagcatacatgctgggctccatgtttcgagctgtcatatccagcgcggcggtaggtgtcgccccctcctgcatcaaaaacagtccaacgctctgttgcacgtatcttaggatccgctcctcctcagcggtaagcgcatactgaggagggatcttctgcgaccggttggttagtaagaagttcagggtggcttccaaaccgcctgtgtcttcctgacccagggcgcggctcacttgggtgatttcttgataggtctgctcgtccacctggctctgtcctatagcctcgcgatacaggttaagcaggtagcccaagtaggagttgcggtcgatgctaccgctgtcagtgaagggggataccagcagcagcagcaggcgggagttgggagtcagcaagctagacacggtcgcgcgatctcctactggggcgtgcactccccacagacccttcaggttcttgaaagcctgggtcaggttcactgtctgcaagccctgtctgctggtctggaagaagtaatctggcccggactggtacacctcgctctggggcacctcagataccatgagtctcaatgcactcaaaaagtttgtatagtcttgctgaccacggggcacgttggcgggctgggtgctaaggaaagcgtttagcgctaccaatgaccccaagttggcgtcgcgctggaaccgctcgcgctgagacacagcctcgcgcacatcggtcaccatccggtccaggttggtctgcacgttgctgctgttgtaacgggccacgcgctccaaaagagcattgtataccagcccggcctcatcgggacggatggccttgttctccaccagcgcgttcacgatagccaggaccttctcgtgggtggggttggagcgggagggcactacggcctccagtatggccgaaaggcggttggcctggggttgctgtctaaaggcttcggggttgcgggtcgtcagcgccattatacgttgcatggcctgggtccaatcgtccgaggagttaatgccggacggctggctctgtagcgccgcccgcattgcggggtccggtgcctgctgttgttccatctagcaaaaatacgggtcgcgccatcagtcttccaagtactcgccctcctcgtcctcgacttcatccacctcttctatgtaaggaagctcacaccctgcagcctccatggccctgcgactgggttgccattgcaagtccgctcccatgtcaaagtagttctccccatcagttccggcccccgttagagccctttgcaagctgtgcataagttctctgtcgctcagctcgcgcctcctgctggcgctcaccgcgcggtgcatcctgtcattgcgatacacccccagatcgtcgcttaaagtcaacaccttgagagtcatgcgcatgtaaaacccatctatcttcacctccttgtcaatgggtacgtagggggtcttgtagatcttgcgagcgtagtatttgcccaggctcaagaccgagtagttgatagctgccactttctcagccaaacccaggctacgttcctgcactataatactttgcaggatgttaatcagatcatacagccatctcccatcaggctcggtgatattcaacaacgcctccctgaatgcctcgttgtccctgctatgttgaaccaccagaaacagctgagctgtcaggggtttgctagtggggttctgggtgatagcctccatcaggtcccacaggtgcatcagacccagggtcacttcctcgcgggcgatcagggtgcgcacatggttgttaaaagatttttggaagttgcgctcctccttcacggtctgctcgtaggccgagactaggttggccgcggccacatgtgccctagctgggctgatccctgtcacttcatcgacctcaaaatcctcgtcttgcagcacccgtcttcgatccagaccgtggcgcagctcgcgacccgcgttaaatcgagatgctcgcatctcctctggctcctcgccgctcctgtccctgaataggttctgttggggcacgtacgcctcgcgagagtccttttttagttgcacccgcgggtgccgctcgggcgatggagcccccaggcgcgccaatccctcgccctcttccaagtccagatcataggcgggctgtcccgcgccgctgacggctgcagccgcagtagttacaggagcaggaagagccttttgtggctgttgttgtagctgctgctgagaagggggctgttgctgggggcgcatctgtcgcagcacgggatgcatctgggcaacaaaaaacaaaaaaaagagggctcgctcccgtaaactggagaagtcggctggcggggtcttagaaatgacgaggctgccaaaccctcgcttgtcgcggaaaccggccgatccggcgcgctaagactcgaaccggggcacaccgcaacgcaaccctggcgattgattctccagactacgggcgcgagccactcccagccccgagaactgagtgttctaaagcttgacgcagcactggctcccatccaggaaaaagcaaaaaaaaaacgacccgcctccgtatcctggaggttttgtgcaggcctgggtcgagacgggagtgccagtaccacgttagctgcggctccagcctgatccgagattcgaaccggggtacacgcgcagcccaacccgttcgcttagcctccaggccacggagacgagccgctgaccgctttcgtttttgcccgtatgtctagagcatcaacgactgtgcgcgtctcacgggccaaaccgtgcctaccatgaactacttcatgccgctgcgcaacatctggaaccgcgtacgcgagttcccgcgggcatccaccaccgcctccggtatcacctggatgtccaggtacatctacggttatcaccgcctcatgctggaagacctcgcccctggcgccccggctacagagcgatggcccctataccgccagccgccgcctcactttctcatcggctaccagtacctggtgcgcacctgtaacgattacatctttgacacccgcgcctactcgcgcctcaagtacaccgagattgtgcgtccggggcaccagacagtcaactggtcagtcatggccaactgctcctacacaatcaacaccggggcttaccaccgcttcgtggactttgacgacttccaagccaccctcacccaggtgcagcaagccatcctcgcagaaagggttgtagcggacctggcacttgtccagcccatgcgcgggttcgggatcactcgcatgcatggcagagcgggcgaagaagaagtgcccgtggaacgactcatgcaagactactataaagatctggccagatgtcaggataatgcttggggaatggcccatcgcctgcgcatccaacaagccggacccaaagacctggtgctcctcgccaccatccgccgtctcaaaactgcctattttaatttcatcaccagcagcatcgtctcaccctccaaagaggaggaaggagaagaaagagagaaccccgaccgagcgtctagccgcccccgcccgcaagaaacagtgctcagcctaccttgcgattgcgactggttagacgctttcgtcgaaaggttttcagatcccgtggatcttgagacgatcaggtccttgcgcggagtacctacggggcaattgataaaatgcataatcagcgcggtgtccctgcccaacggagagcctcccagtcaccacttcagggagatgcgcggaggcgtcttcactctgagacccagggagaacggtcgtgccgtcaccgagaccatgcgccgccgccgcggagaggtcattgaaagattcatcgaccgtctgcctgtgcgccgccggcgtcgccgcgttccccctcctcctgcagccccacctgaagaggaagagatgttagtggaagaagaagaaattgaggaagaaatcccgggggctttcgagcgcgaggtgcgcaccaccatcgccgaactcatccgtcttctggaagaggagttgaccgtgtccgcgcgtaactcccagtttttcaactttgccgtggacttctacgaggccatggagcgcttggaagcgctgggcgatgttagcgagatgccgctgagacgatggatcatgtatttcttcgtcaccgagcacatcgccaccacactcaactaccttttccagcgcctatgcaactatgcggtcttcacccgccacgtggagctcaacctcgcccaggtggtcatgcgcgcgagagatcccgagggggctgtggtctacagccgcgtctggaacgaggcgggcatgaatgcattctctcaactcattggacgcatctccaacgaccttgcggccaccgtcgagagagcgggccgcggagatcttcaagaggaagagatcgagcagttcatggccgagatcgcctaccaggacaactctggcgacgtgcaagaaatccttaggcaagccgccgtcaacgataccgagattgattctgttgaactctctttcaggttcaagctcacggggccggtagcgttcacccagaggcgtcagatccaggatgtcaaccgccgcgtcgtcgcgcatgcaagtcttctcagggcgcagtaccagaacctacccgcgcgcggcgccgacgtaccactgccggccatgccgccgggtcccgagccgcccctgccgcccggtgcgcgccctcgacaccgcttctaaacatgcaagaagcaacagagccaccgccgcccaaacggaaaaacaagggcacggtggtagcgcccaaggggcacggaaccctgcaagccatcgacatctccaccaacggacccgtggagatcaagtaccatctgaacctccctcacgccctcgaaaagatcatgcaagtcaatctcctgacactgcctactaacctgactccgcagcgtctcaggaccctggacagctccgacctgcgcgctctcgtcctcgagctccgcccctgccgcgccgaggtctggacttgcctcccgcgagggctcgtcagcatgaccaccatcgagacagaagatggtcatgccgatgcagacaacatagtagagcgcgaggtacaagcgccaggcctcaattttccactgaaatttctcgtcaaaggaagtcaggtacaactcattcatgaggtgcatcccgtgaatcgatgcgagtactgcggccgtctgtacaagcacaagcatgaatgctcggcgcgtcgcagggagttctacttccatcacatcaacagccattcctccaactggtggcaggagatccagttcttcccgattggctctcatcctcgcacagaaaggctcttcctcacctacgatgtggaaacctacacctggatggggtcctttggcaagcagctaatccccttcatgctggtcatgaaactctctggagaccagcggctcgtcaacatcgcctatgacctggctataaaactcaagtgggatcgctggcagcaggacccccaaaccttctattgcgtcaccccagaaaagatggcagtcgggcagcattttcgtcagtaccgggaccagttacaaacagcactggcagtggacctctggtcctccttcctcaaagcgaaccctcacctgcacgaatgggccctcgaacactatgctctcactgaccctacagacctcacttttgaagaactcaagaagctgcctcatgtcaggggcacacctcgattcttagaactgtacatagtggggcacaacatcaatggctttgatgagatcgtcttggccgctcaggttatcaataaccgagcagaggtccctcagcctttcagaatcacccgaaattttatgcccagggccggcaagatcctcttcaatgatgttactttcgctttgcccaaccccgcctacaagaagcgggtggacttccaactctgggaacagggggcctgtgatgacatcgacttcaagtatcaattcctcaaagtcatggtcagggacacttttgccctcactcatacctcgctgcgcaatgcagcccaagcatactctctcccagtggagaagggatgctgtccctacaaggcagtcaatcaattctacatgttgggctcttaccgtgcagaaaaagacgggtttcccctcgaagagtactggaaggatcgcgaagaataccttctcaaccgcgagctgtgggaaaagaaaaaccaaccgcgttatgacatcatccaggaaactctcgactactgtgccctagacgtacttgtcaccgccgagctggtagccaagctgcaagagtcatatgcccacttcataagggactctgtaggcctccctcatgcccattttaacatattccagagacctactatctcttccaattcccatgccatctttcgccagatcgtttacagggcggaaaaacccaaccgcaccaatctgggcccgggtcttctcgccccctcacatgaactctatgactatgtgcgagcaagcatcagaggggggcgctgttatcccacttacatcggcatcctcgaagagcccctctatgtctacgatatctgtggcatgtatgcctccgcgctcacccaccccatgccctggggcacccctcttaacccctatgagcgcgcgctggcagttcgagaatggcagatgactttggatgatcccgccaccatcagctattttgacaaggatttgctaccgggaatatttaccatagatgcggacccccctgatgagttcatgctagaccccctcccccctttctgttcaagaaaaggaggtcgactctgctggaccaatgagcccctccgaggcgaggtagccaccagtgtggatctgataaccctgcacaataggggatggcgagtcagaatagttccggatgaactgacaaccatcttccctgaatggaaatgtgtggcgcgcgagtacgtccagcttaacatcgccgccaaggagcgcgcggacaaggaaaagaaccaaaccatgcgctctatcgccaagcttctatccaatgccctctatggatcatttgccaccaagctggacaacaagaagattgtgttttctgaccagatggacgagagtcttatgaaaggcatctctgctggtactgtcaatatcaaatcctcctcgttcctagaaactgacaacctgagtgcagaggtcatgcccgccttcgagagggaatacctaccccaacagctggcgctcctggacagcgatccggaagacagtgaagacgaacagaggcccgcccccttttatacccccccggcggggacccctggtcacgtggcctacacttacaagccaatcacattcttggatgtggaggagggggacatgtgtttacataccgtagagaaggtggaccccctggttgacaacgaccgctacccctcccacgtggcctcctttgtgctggcctggacacgcgcttttgtatcagagtgggctgggttcctctacgaagaggaccgcggcactccgctcgaggacaggcccataaagtcagtctacggggacacggacagcctctttgttacccagcggggacacgaactcatggaaaccaaaggtaagaaacgcatcaaaaaacatggcggaaaacttgtttttgaccccgatgagccggatctgacatggctcgtggagtgcgaaaccgtctgcgcctcctgcggtgcggatgcatactcccccgaatccattttcctcgcgcccaagctgtatgccctcaaatgtatctactgccccgcctgccataaaacttccaaaggtaagctccgtgccaaaggccacgcggccgaggcgctcaactacgaactcatggtaaactgctacctggccgacatgcagggcgccgatcggcagcggttctcgaccagcaggatgagtctgaagcgcaccctcgcaagcgcccaaccaggcgcgcaccccttcaccgtgacggaaacaaccctgactcggacgctgcgaccatggaaggatcggaccctggcagcgctggacgcccatcgtctgattccctactccaggagccgtcccaacccgcgaaacgaggaggtctgctggatcgagatgccatagagcacatcaccgagctctgggaccggctcgagctcttgcaacagactctttccaaaatgcccatggctgacgggctgaagccgctgaaaaacttctcctcgctccaggagcttctatcccttgggggagagcgcctcctaacggacttggtgcgggaaaatatccatgtaagggaaatgatgaacgaagtggcccccctgctccgggaggacggcagctgtcgctccctaaactaccatctgcaacccgtaattggggtcatttacggtcccactgggtgcggcaagtctcagctgcttaggaatttgctctcatcccagttaatcaccccggctccagaaacagtattttttatagccccgcaggtggatatgatccccccctctgaactgaaagcctgggaaatgcaaatatgtgagggaaactatgctcccgggccagagggaactttcatcccccaatctggcacccttcgcccaaagtttattaaaatggcttatgatgacctgactcaggagcataactatgatgtttcagacccccggaacgtgttcgcccgtgccgctgcccacggccccatcgctatcattatggatgagtgcatggagaatctggggggtcacaaaggcgtctccaaattttttcatgcttttccctctaagctgcatgataaatttcccaagtgcaccggatacactgtcttggtggttctgcacaatatgaaccccagacgggatctaggcggcaacattgccaacctcaagatccagtccaaaatgcatataatttcaccccggatgcacccgtcccagctcaacagatttgtaaacacctacactaagggcctccccgttgcaattagtctgctcctaaaagatattgtgcaacaccatgcactccgaccttgctatgactgggtgatttataacactaccccggagcaagaggctcttcaatggagctatctccacccccgggacggactaatgcccatgtatctaaacattcaatcccacctttacagggtactggaaaagatccaccgagttctcaatgatcgagaccgatggtccagggcataccgcgcgcgaaaa

SEQ ID NO: 105 - DNA, 4157 bp, Human adenovirus
  misc_feature 1..4157: note = Ad16 E3; 27107 - 31263
  source 1..4157: mol_type = genomic DNA
tataaaacgcctggtgatcagaggccgaggtatccagctcaacgacgagtcggttagctcttcgcttggtctgcgaccagacggagtcttccagatcgccggctgtgggagatcttccttcactcctcgtcaggctgtgctgactttggagagttcgtcctcgcagccccgctcgggcggcatcggaactctccagtttgtggaggagtttactccctctgtctacttcaaccccttctccggctctcctggccagtacccggacgagttcataccgaacttcgacgcaatcagcgagtcagtggatggctatgattgatgtctaatggtggcgcggctgagctagctcgactgcgacacctagaccactgccgccgctttcgctgtttcgcccgggaactcaccgagttcatctacttcgaactctccgaggagcaccctcagggtccggcccacggagtgcggattaccatcgaagggggaatagactctcgcctgcatcgcatcttctcccagcggcccgtgctgattgagcgcgaccagggaaatacaaccatctccatctactgcatttgtaaccaccccggattgcatgaaagcctttgctgtcttgtttgtgctgagtttaataaaaactgagttaagaccctcctacggactaccgcttcttcaatcaggactttacaacaccaaccagatcttccagaagacccagacccttcctcctctgatccaggactctaactctaccttaccagcaccctccactactaaccttcccgaaactaacaagcttggatctcatctgcaacaccgcctttcacgaagccttctttctgccaatactaccactcccaaaaccggaggtgagctccgcggtcttcctactgacgacccctgggtggtagcgggttttgtaacgttaggagtagttgcgggtgggcttgtgctaatcctttgctacctatacacaccttgctgtgcatatttagtcatattgtgctgttggtttaagaaatgggggccatactagtcgtgcttgctttactttcgcttttgggtctgggctctgctaatctcaatcctcttgatcacgatccatgtctagacttcgacccagaaaactgcacacttacttttgcacccgacacaagccgtctctgtggagttcttattaagtgcggatgggactgcaggtccgttgaaattacacataataacaaaacatggaacaataccttatccaccacatgggagccaggagttcccgagtggtatactgtctctgtccgaggtcctgacggttccattcgcattagtaacaacactttcattttttctgaaatgtgcgatctggccatgtttatgagcaaacagtatgacctatggcctcctagcaaagagaacattgtggcattttccattgcttattgcttggtaacatgcatcatcactgctatcatttgtgtgtgcatacacttgcttatagttattcgccctagacaaagcaatgaggaaaaagagaaaatgccttaacctttttcctcataccttttctttacagcatggcttctgttacagctctaattattgccagcattgtcactgtcgctcacgggcaaacaattgtccatattaccttaggacataatcacactcttgtagggcccccaattacttcagaggttatttggaccaaacttggaagtgttgattattttgatataatttgcaacaaaactaaaccaatatttgtaatctgcaacagacaaaatctcacgttaattaatgtcagcaaaatttataacggttactattatggttatgatagatccagtagtcaatataaaaattacttagttcgcataactcaacccaaatcaacagtgccaactatgacaataattaaaatggctaataaagcattagaaaattttacattaccaacaacgcccaatgaaaaaaacattccaaattcaatgattgcaattattgcggcggtggcattgggaatggcactaataataatatgcatgttcctatatgcttgttgctataaaaagtttaaacataaacaggatccactactaaattttaacatttaattttttatacagatgatttccactacaatttttatcattactagccttgcagctgtaacttatggccgttcacacctaactgtacctgttggctcaacatgtacactacaaggaccccaagaaggccatgtcacttggtggagaatatatgataatggagggttcgctagaccatgtgatcagcctggtacaaaattttcatgcaacggaagagacttgaccattattaacataacattaaatgagcaaggcttctattatggaaccaactataaaaatagtttagattacaacattattgtagtgccagccaccacttctgctccccgcaaatccactttctctagcagcagtgccaaagcaagcacaattcctaaaacagcttctgctatgttaaagcttcgaaaaatcgctttaagtaattccacagccgctcccaatacaattcctaaatcaacaattggcatcattactgccgtggtagtgggattaataattatatttttgtgcataatgtactacgcctgctgctatagaaaacatgaacaaaaaggtgatgcattactaaattttgatatttaattttttatagaattatgatattgtttcaatcaaataccactaacactatcaatgtgcagactactttaaatcatgacatggaaaaccacactacctcctatgcatacacaaacattcagcctaaatacgctatgcaactaagaaatcaccatactaattgtaattggaattcttatactatctgttattctttattttatattctgccgtcaaatacccaatgttcatagaaattctaaaagacgacccatctattctcctatgattagtcgtccccatatggctctgaatgaaatctaagatctttttttttctcttacagtatggtgaacatcaatcatgattcctagaaatttcttcttcaccatactcatctgtgctttcaatgtctgtgctactttcacagcagtagccactgcaagcccagactgtataggaccatttgcttcctatgcactttttgccttcgttacttgcatctgcgtgtgtagcatagtctgcctggttattaattttttccaactggtagactggatctttgtgcgaattgcctacctacgtcaccatcccgaataccgcaatcaaaatgttgcggcactttttaggcttatttaaaaccatgcaggctatgctgccagtcattttaattctgctcctaccctgcattgccctagcttccaccgccactcgcgctacacctgaacaacttagaaaatgcaaatttcaacaaccatggtcatttcttgattgctaccatgaaaaatctgattttcccacatactggatagtgattgttggaataattaacatactttcatgtacctttttctcaatcacaatataccccacatttaattttgggtggaattctcccaatgcactgggttacccacaagaaccacatgaacatatcccactacaacacatacaacaaccactagcactggtagagtatgaaaatgagccacaaccttcactgcctcctgccattagttacttcaacctaaccggcggagatgactgaaatactcaccacctccaattccgccgaggatctgcttgatatggacggccgcgcctcagaacagcgactcgcccaactacgcatacgccagcagcaggaacgtgccgccaaggagctcagggatgctattgaaattcaccaatgcaaaaaaggcatattttgtttggtaaaacaagccaagatatcctacgagattaccaatactgaccatcgcctctcatacgagctcggaccgcagcgacaaaaattcacttgtatggtgggaatcaaccccataatcatcacccagcaagctggagataccaagggttgcatccactgttcctgcagttccgccgagtgcatctacaccctgctgaagaccctctgcggccttcgagacctcctacccatgaactaatcaacccagcccctcacttaccaattacataaagccaattaataaa

SEQ ID NO: 106 - DNA, 1062 bp, Human adenovirus
  misc_feature 1..1062: note = Ad16 fiber; 31448 - 32509
  source 1..1062: mol_type = genomic DNA
atggccaaacgagctcggctaagcagctccttcaatccggtctacccctatgaagatgaaagcagctcacaacacccctttataaaccctggtttcatttcctcaaatggttttgcacaaagcccagatggagttctaactcttaaatgtgttaatccactcactaccgccagcggacccctccaacttaaagttggaagcagtcttacagtagatactatcgatgggtctttggaggaaaatataactgccgcagcgccactcactaaaactaaccactccataggtttattaataggatctggcttgcaaacaaaggatgataaactttgtttatcgctgggagatgggttggtaacaaaggatgataaactatgtttatcgctgggagatgggttaataacaaaaaatgatgtactatgtgccaaactaggacatggccttgtgtttgactcttccaatgctatcaccatagaaaacaacaccttgtggacaggcgcaaaaccaagcgccaactgtgtaattaaagagggagaagattccccagactgtaagctcactttagttctagtgaagaatggaggactgataaatggatacataacattaatgggagcctcagaatatactaacaccttgtttaaaaacaatcaagttacaatcgatgtaaacctcgcatttgataatactggccaaattattacttacctatcatcccttaaaagtaacctgaactttaaagacaaccaaaacatggctactggaaccataaccagtgccaaaggcttcatgcccagcaccaccgcctatccatttataacatacgccactgagaccctaaatgaagattacatttatggagagtgttactacaaatctaccaatggaactctctttccactaaaagttactgtcacactaaacagacgtatgttagcttctggaatggcctatgctatgaatttttcatggtctctaaatgcagaggaagccccggaaactaccgaagtcactctcattacctcccccttctttttttcttatatcagagaagatgactga

SEQ ID NO: 107 - DNA, 126 bp, Human adenovirus
  misc_feature 1..126: note = Ad16 fiber tail; 31448 - 31573
  source 1..126: mol_type = genomic DNA
atggccaaacgagctcggctaagcagctccttcaatccggtctacccctatgaagatgaaagcagctcacaacacccctttataaaccctggtttcatttcctcaaatggttttgcacaaagccca

SEQ ID NO: 108 - DNA, 360 bp, Human adenovirus
  misc_feature 1..360: note = Ad16 fiber shaft; 31574 - 31933
  source 1..360: mol_type = genomic DNA
gatggagttctaactcttaaatgtgttaatccactcactaccgccagcggacccctccaacttaaagttggaagcagtcttacagtagatactatcgatgggtctttggaggaaaatataactgccgcagcgccactcactaaaactaaccactccataggtttattaataggatctggcttgcaaacaaaggatgataaactttgtttatcgctgggagatgggttggtaacaaaggatgataaactatgtttatcgctgggagatgggttaataacaaaaaatgatgtactatgtgccaaactaggacatggccttgtgtttgactcttccaatgctatcaccatagaaaacaacacc

SEQ ID NO: 109 - DNA, 573 bp, Human adenovirus
  misc_feature 1..573: note = Ad16 fiber knob; 31934 - 32506
  source 1..573: mol_type = genomic DNA
ttgtggacaggcgcaaaaccaagcgccaactgtgtaattaaagagggagaagattccccagactgtaagctcactttagttctagtgaagaatggaggactgataaatggatacataacattaatgggagcctcagaatatactaacaccttgtttaaaaacaatcaagttacaatcgatgtaaacctcgcatttgataatactggccaaattattacttacctatcatcccttaaaagtaacctgaactttaaagacaaccaaaacatggctactggaaccataaccagtgccaaaggcttcatgcccagcaccaccgcctatccatttataacatacgccactgagaccctaaatgaagattacatttatggagagtgttactacaaatctaccaatggaactctctttccactaaaagttactgtcacactaaacagacgtatgttagcttctggaatggcctatgctatgaatttttcatggtctctaaatgcagaggaagccccggaaactaccgaagtcactctcattacctcccccttctttttttcttatatcagagaagatgac

SEQ ID NO: 110 - DNA, 3633 bp, Human adenovirus
  misc_feature 1..3633: note = Ad16 penton; 13902 - 17534
  source 1..3633: mol_type = genomic DNA
atgaggagacgagccgtgctaggcggagcggtggtgtatccggagggtcctcctccttcttacgagagcgtgatgcagcaacaggcggcgatgatacagcccccactggaggctcccttcgtaccccctcggtacctggcgcctacggaagggagaaatagcattcgttactcggagctgtcaccccagtacgataccaccaagttgtatctggtggacaacaagtcggcggacatcgcctccctgaactatcagaacgaccacagcaacttcctgaccacagtggtgcagaacaatgactttacccccacggaggctagcacccagaccattaactttgacgagcggtcgcggtggggcggtcagctgaagaccattatgcacaccaacatgcccaacgtgaacgagtacatgttcagcaacaagtttaaggcgagggtgatggtatctaggaaggctcctgaaggtgttacagtaaatgatcataaagatgatattttgaaatatgagtggtttgagttcactttaccagaaggtaacttctcagctaccatgaccatcgacctgatgaacaatgccatcattgacaactacctgaaaattggcagacagaatggagtgctggaaagtgacattggtgttaagtttgacactagaaacttcaggctcgggtgggaccccgaaactaagttgattatgccaggggtctacacttatgaggcattccatcctgacattgttttgttgcctggttgcggggtagattttactgaaagccgacttagcaacttgcttggcatcaggaagagacatccattccaggagggtttcaaaatcatgtatgaagatcttgaagggggtaatattcctgcccttttggatgtcactgcctatgaggaaagcaaaaaggataccactactgaaacaggcgaaaaggcggtggttaaaacaaccacagtggctgttgcagaggaaaccagtgaagatgataatataactagaggagatacttatataactgaaaaacaaaaacgtgaagctgcagctgcagaactattacttatgtctgaagttaaaaaagagttaaagatccaacctttagaaaaagacagcaagaatagaagctacaatgtcttggaagacaaaatcaacacagcctaccgcagctggtacctgtcctacaattatggtaaccctgagaaaggaataaggtcctggacactgctcaccacttcggatgtcacctgtggagccgagcaggtctactggtcgctccccgacatgatgcaagaccccatcaccttccgctcctcgagacaagtcaacaactacccagtagtgggtgcagagcttatgccggtcttctcaaagagtttctacaatgagcaagccgtgtactctcagcagctccgacagtccacctcgctcacgcacgtcttcaaccgcttccctgagaaccagatcctcatccgcccgccggcgcccacaattaccaccatcagtgaaaacgttcctgctctcacagatcacgggaccctgccgttacgcagcagtatccggggagtccagcgcgtgaccgttactgacgccagacgtcgcacctgtccctacgtttacaaggccctgggcatagtcgcgccgcgcgttctttcaagccgcactttctaaaaaaaaaaaaaaatgtccattctcatctcgcccagtaataataccggttggggactgcatgcgcccaccaagatgtacggaggcgcccgcaaacgctctacccagcaccccgtgcgcgttcgcggtcatttccgcgctccctggggcgccctcaagggccgtacccgcactcggaccacggtcgatgatgtgatcgaccaggtggttgccgatgctcgtaattatactcctactgcgcctacatctactgtggatgcagttattgacagtgtagtggcagacgctcgcgcctatgctcgccggaagagccgaaggaggcgcatcgccaggcgccacagggctactcccgctatgcgagctgcaaaagctattctgcggagggccaaacgtgtgggacgaagagccatgcttagagcggccagacgcgcggcttctggtgctagcagcggcaggtcccgcaggcgcgcggccacggcggcagcagcggccattgccaacatggcccaaccgcgaagaggcaatgtgtattgggtgcgcgatgccactaccggccagcgcgtgcccgtgcgcacccgcccccctcgcacttagaagatactgagcagtctccgatgttgtgtcccagcggcaagtatgtccaagcgcaaatacaaggaagagatgctccaggtcatcgcgcctgaaatctacggtccgccgatgaaggatgaaaaaaagccccgcaaaatcaagcgggttaaaaaggacaaaaaagaagaagatggcgatgatggactggtggagtttgtgcgcgagttcgcgccaagacggcgcgtgcagtggcgcggtcgaaaagtacgccaagtgcttagacccgggaccactgtggtctttacacctggcgagcgttccagcactacttttaaacggtcctatgatgaggtgtatggggatgacgatattattgagcaggcggcagaccgccttggcgagtttgcttatggcaagcgcacaagatccagtcccaaagaggaggcggtatctattcccttggatcatggaaatcccacccctagcctcaaaccagtcaccctgcagcaagtgctgcccgtacctgcgagcagaggcgtaaagcgcgagggtgaggacctatatcccaccatgcagctaatggtgcccaagcggcagagattagaagacgtactggagaaaatgaaagtggatgccgatatccagcctgaggtgaaagtgagacccatcaaggaagtggcgccaggtttgggagtacaaacctttgacatcaagattcccactgagtccatggaagtgcagaccgaacctgcaaaacccacagtcacctcaattgaggttcagacggaaccctggatgcccgcgcccgttgccgcccccagcaccactagaagatcacgtcgaaagtatggcccagcaagtctgctaatgcccaactatgctctgcacccatccatcattcccactccgggttacagaggcactcgctactatcgaagtcggagcaacacctcacgccgccgcaaactacctgcaagtcgcactcgccgtcgccgccgccgcaccactgccagcaaattaactcccgccgccctggtgcggagagtgtaccgcgatggtcgcgctgaacctctgacgctgccgcgcgcgcgctatcatccaagcatcaccacttaatgactgttgacgctgcctccttgcagatatggctctcacttgccgccttcgcgtccccattactggctaccgaggaagaaactcgcgccgtagaaggatgttggggcgagggatgcgccgccacagacgaaggcgcgctatcagcaagcgattagggggtggctttctgccagctcttatacccatcatcgccgcggcgatcggggcgataccaggcatagcttccgtggcggttcaggcctcgcagcgccactaacaatggaaaaatttataaataaa

SEQ ID NO: 111 - DNA, 2823 bp, Human adenovirus
  misc_feature 1..2823: note = Ad16 hexon; 18450 - 21272
  source 1..2823: mol_type = genomic DNA
atggccaccccatcgatgatgccccaatgggcatacatgcacatcgccggacaggatgcttcggagtacctgagtccgggtctggtgcagttcgcccgtgcaacagacacctacttcagtatggggaacaagtttagaaaccccacagtggcgcccacccacgatgtgaccaccgaccgtagccagcgactaatgctgcgcttcgtgcccgttgaccgggaagacaatacctactcttacaaagttcgctacacgctggctgtaggggacaacagagtactggatatggccagcacgttctttgacatccgcggcgtgctggaccggggccctagcttcaaaccctactccgggaccgcctacaacagcctggctcccaagggagcgcccaacacctgccagtggaaggattctgacagcaaaatgcatacctttggggtagctgccatgcccggtgttactgggaaaaagatagaagctgatgggctgcctattggaatagattcaacttctggaactgacacagtaatttatgctgataaaactttccaaccagaaccacaagttggaaatgccagttgggttgacgccaatggtacagaggaaaaatatggaggcagagctctgaaggacactacaaagatgaaaccctgctatggttctttcgccaagcctaccaacaaagaaggtggtcaggctaacttaaaagattcagaaaccgccgccaccactcctaactatgatatagatctggctttctttgacaacaaaaatattgctgctaactacgatccagatattgtaatgtacacagaaaatgttgacttgcagactccagatactcatattgtatacaaacctggaacagaggacaccagctctgaatccaatttgggtcagcaagccatgcctaacagacccaactacattggcttcagagacaattttattgggctcatgtactacaacagcactggcaatatgggggtgctggccggtcaggcctctcagctgaatgctgtggttgacttgcaagacagaaacactgaactgtcctaccagctcttgcttgactctctgggtgacagaacccggtatttcagtatgtggaatcaggcggtggacagctatgatcctgatgtgcgtattattgaaaaccatggtgtggaggacgaattgccaaactattgctttccgttgaatggtgtgggatttacagacacttaccaaggtgttaaagttaaaacagatgcagttgctggaaccagtggaacacagtgggacaaagatgacaccacagttagtactgctaatgaaatccatggaggcaatccttttgccatggaaatcaacatccaagccaatctatggcgaagtttcctttattccaatgtggctttgtatctcccagactcgtataaatacaccccgtccaatgtcactctcccagaaaacaaaaacacctacgactacatgaacgggcgggtggtgccgccatctctagtagacacctatgtgaacattggtgccaggtggtctctggatgccatggacaatgtcaacccattcaaccaccaccgtaacgctggcttgcgttaccgatccatgcttctgggtaacggacgttatgtgcctttccacatacaagtgcctcaaaaattcttcgctgttaaaaacctgctgcttctcccaggctcctacacttatgagtggaactttaggaaggatgtaaacatggttctacagagttcccttggtaacgacctacgggtagatggcgccagcatcagtttcacgagcatcaatctttatgctacttttttccccatggctcacaacaccgcttccacccttgaagccatgctgcggaatgacaccaatgatcagtcattcaacgactacctatctgcagctaacatgctctaccccatacctgccaacgcaaccaatattcccatttccattccttctcgcaactgggcggctttcagaggctggtcatttaccagactgaaaaccaaagaaactccctctttggggtctggatttgacccatactttgtctattccggttctattccctacctggatggtaccttctatctaaatcacacttttaagaaggtttccatcatgtttgactcttcagtgagctggcctggaaatgacaggttactatctcctaacgaatttgaaataaagcgcactgtggatggcgaaggctacaacgtagcccaatgcaacatgaccaaagactggttcttggtacagatgctcgccaactacaacattggctaccagggcttttacatccctgagggatacaaggatcgcatgtactcctttttcagaaacttccagcctatgagcaggcaggtggttgatgaggttaattacactgactacaaagccgtcaccttaccatatcaacacaacaactctggctttgtaggataccttgcgcctactatgagacaaggggaaccttacccagccaattatccatacccgctcatcggaactactgccgttaagagtgttacccaaaaaaagttcctgtgcgacaggaccatgtggcgcataccgttctccagcaacttcatgtccatgggggcccttacagacctgggacaaaacctgctctatgccaactcggcccatgcactggacatgacttttgaggtggatcccatggatgagcccaccctgctttatcttcttttcgaagtcttcgacgtggtcagagtgcaccagccacaccgcggcgtcatcgaggccgtctacctgcgcacaccgttctcggccggcaacgccaccacataa

SEQ ID NO: 112 - protein, 353 aa, Human adenovirus
  REGION 1..353: note = misc_feature - Ad16 fiber
MAKRARLSSSFNPVYPYEDESSSQHPFINPGFISSNGFAQSPDGVLTLKCVNPLTTASGPLQLKVGSSLTVDTIDGSLEENITAAAPLTKTNHSIGLLIGSGLQTKDDKLCLSLGDGLVTKDDKLCLSLGDGLITKNDVLCAKLGHGLVFDSSNAITIENNTLWTGAKPSANCVIKEGEDSPDCKLTLVLVKNGGLINGYITLMGASEYTNTLFKNNQVTIDVNLAFDNTGQIITYLSSLKSNLNFKDNQNMATGTITSAKGFMPSTTAYPFITYATETLNEDYIYGECYYKSTNGTLFPLKVTVTLNRRMLASGMAYAMNFSWSLNAEEAPETTEVTLITSPFFFSYIREDD

SEQ ID NO: 113 - protein, 130 aa, Human adenovirus
  REGION 1..130: note = misc_feature - Ad16 fiber shaft
DGVLTLKCVNPLTTASGPLQLKVGSSLTVDTIDGSLEENITAAAPLTKTNHSIGLLIGSGLQTKDDKLCLSLGDGLVTKDDKLCLSLGDGLITKNDVLCAKLGHGLVFDSSNAITIENNTLWTGAKPSAN

SEQ ID NO: 114 - protein, 181 aa, Human adenovirus
  REGION 1..181: note = misc_feature - Ad16 fiber knob
CVIKEGEDSPDCKLTLVLVKNGGLINGYITLMGASEYTNTLFKNNQVTIDVNLAFDNTGQIITYLSSLKSNLNFKDNQNMATGTITSAKGFMPSTTAYPFITYATETLNEDYIYGECYYKSTNGTLFPLKVTVTLNRRMLASGMAYAMNFSWSLNAEEAPETTEVTLITSPFFFSYIREDD

SEQ ID NO: 115 - protein, 555 aa, Human adenovirus
  REGION 1..555: note = misc_feature - Ad16 penton
MRRRAVLGGAVVYPEGPPPSYESVMQQQAAMIQPPLEAPFVPPRYLAPTEGRNSIRYSELSPQYDTTKLYLVDNKSADIASLNYQNDHSNFLTTVVQNNDFTPTEASTQTINFDERSRWGGQLKTIMHTNMPNVNEYMFSNKFKARVMVSRKAPEGVTVNDHKDDILKYEWFEFTLPEGNFSATMTIDLMNNAIIDNYLKIGRQNGVLESDIGVKFDTRNFRLGWDPETKLIMPGVYTYEAFHPDIVLLPGCGVDFTESRLSNLLGIRKRHPFQEGFKIMYEDLEGGNIPALLDVTAYEESKKDTTTETGEKAVVKTTTVAVAEETSEDDNITRGDTYITEKQKREAAAAELLLMSEVKKELKIQPLEKDSKNRSYNVLEDKINTAYRSWYLSYNYGNPEKGIRSWTLLTTSDVTCGAEQVYWSLPDMMQDPITFRSSRQVNNYPVVGAELMPVFSKSFYNEQAVYSQQLRQSTSLTHVFNRFPENQILIRPPAPTITTISENVPALTDHGTLPLRSSIRGVQRVTVTDARRRTCPYVYKALGIVAPRVLSSRTF

SEQ ID NO: 116 - protein, 940 aa, Human adenovirus
  REGION 1..940: note = misc_feature - Ad16 hexon
MATPSMMPQWAYMHIAGQDASEYLSPGLVQFARATDTYFSMGNKFRNPTVAPTHDVTTDRSQRLMLRFVPVDREDNTYSYKVRYTLAVGDNRVLDMASTFFDIRGVLDRGPSFKPYSGTAYNSLAPKGAPNTCQWKDSDSKMHTFGVAAMPGVTGKKIEADGLPIGIDSTSGTDTVIYADKTFQPEPQVGNASWVDANGTEEKYGGRALKDTTKMKPCYGSFAKPTNKEGGQANLKDSETAATTPNYDIDLAFFDNKNIAANYDPDIVMYTENVDLQTPDTHIVYKPGTEDTSSESNLGQQAMPNRPNYIGFRDNFIGLMYYNSTGNMGVLAGQASQLNAVVDLQDRNTELSYQLLLDSLGDRTRYFSMWNQAVDSYDPDVRIIENHGVEDELPNYCFPLNGVGFTDTYQGVKVKTDAVAGTSGTQWDKDDTTVSTANEIHGGNPFAMEINIQANLWRSFLYSNVALYLPDSYKYTPSNVTLPENKNTYDYMNGRVVPPSLVDTYVNIGARWSLDAMDNVNPFNHHRNAGLRYRSMLLGNGRYVPFHIQVPQKFFAVKNLLLLPGSYTYEWNFRKDVNMVLQSSLGNDLRVDGASISFTSINLYATFFPMAHNTASTLEAMLRNDTNDQSFNDYLSAANMLYPIPANATNIPISIPSRNWAAFRGWSFTRLKTKETPSLGSGFDPYFVYSGSIPYLDGTFYLNHTFKKVSIMFDSSVSWPGNDRLLSPNEFEIKRTVDGEGYNVAQCNMTKDWFLVQMLANYNIGYQGFYIPEGYKDRMYSFFRNFQPMSRQVVDEVNYTDYKAVTLPYQHNNSGFVGYLAPTMRQGEPYPANYPYPLIGTTAVKSVTQKKFLCDRTMWRIPFSSNFMSMGALTDLGQNLLYANSAHALDMTFEVDPMDEPTLLYLLFEVFDVVRVHQPHRGVIEAVYLRTPFSAGNATT

SEQ ID NO: 117 - protein, 42 aa, Human adenovirus
  REGION 1..42: note = misc_feature - Ad16 fiber tail
MAKRARLSSSFNPVYPYEDESSSQHPFINPGFISSNGFAQSP

SEQ ID NO: 118 - DNA, 114 bp, Human adenovirus
  misc_feature 1..114: note = Ad21 5' (left) ITR; 1 - 114
  source 1..114: mol_type = genomic DNA
ctatctatataatataccttatagatggaatggtgccaatatgcaaatgaggtaatttaaaaaagtgcgcgctgtgtggtgattggctgcggggtgaacggctaaaaggggcgg

SEQ ID NO: 119 - DNA, 114 bp, Human adenovirus
  misc_feature 1..114: note = Ad21 3' (right) ITR; 35269 - 35382
  source 1..114: mol_type = genomic DNA
ccgccccttttagccgttcaccccgcagccaatcaccacacagcgcgcacttttttaaattacctcatttgcatattggcaccattccatctataaggtatattatatagatag

SEQ ID NO: 120 - DNA, 365 bp, Human adenovirus
  misc_feature 1..365: note = Ad21 Packaging Sequence; 115 - 479
  source 1..365: mol_type = genomic DNA
gcaatgctgggaggtgacgtaacttatgtaggaggagttatgttgcaagttatcgcggtaaaggtgacgtaaaacgaggtgtggtttggacacggaagtagacagttttcccacgcttactgacaggatatgaggtagttttgggcggatgcaagtgaaaattctccattttcgcgcgaaaactgaatgaggaagtgaatttctgagtcatttcgcggttatgacagggtggagtatttgccgagggccgagtagactttgaccgtttacgtggaggtttcgattaccgtgtttttcacctaaatttccgcgtacggtgtcaaagtcctgtgtttttacgtaggtgtcagctgatcactagggta

SEQ ID NO: 121 - DNA, 3432 bp, Human adenovirus
  misc_feature 1..3432: note = Ad21 E1; 480 - 3911
  source 1..3432: mol_type = genomic DNA
tttaaacctgtcgagttccgtcaagaggccactcttgagtgccagcgagaagagttttctcctccgcgctgcgagtcagttttgcgctttgaaaatgagacacctgcgattcctgccacaggagattatctccagcgagaccgggatcgaaatactggagtttgtggtaaataccctgatgggagatgacccggaaccgccagtgcagcctttcgatccacctacgctgcacgatctgtatgatttagaggtagacgggcctgatgatcccaatgaggaagctgtaaatgggttttttactgattctatgctgctagctgccgatgaaggattggacataaaccctcctcctgggacccttgataccccaggggtggttgtggaaagcggcagaggtgggaaaaaattgcctgatctgggagcagctgaaatggacttgcgttgttatgaagagggttttcctccgagtgatgatgaagatggggaaactgaacagtccatccataccgcagtgaatgagggagtaaaagctgccagcgatgtttttaagttggactgtccggagctgcctggacatggctgtaagtcttgtgaatttcacaggaataacactggaatgaaagaactattgtgctcgctttgctatatgagaatgcactgccactttatttacagtaagtgtatttaagtgaaatttaaaggaatagtgtagctgtttaataactgttgaatggtagatttatgtttttacttgcgattttttgtaggtcctgtgtctgatgatgaggcgccttctcctgattcaactacctcacctcctgaaattcaggcgcccgtacctgcaaacgtatgcaagcccattcctgtgaagcctaagtgtgggaaacgccctgctgtggataagcttgaggacttgttggagggtggggatggacctttggaccttagtacccggaaactgccaagacaatgagtgccctgcagctgtgtttatttaatgtgacgtcatgtaataaaattatgtcagctgctgagtgttttattgcttcttgggtggggacttggatatataagtaggagcagatctgtgtggttagctcatagcaacctgctgccatccatggaggtttgggctatcttggaagacctgagacagactaggctactgctagaaaacgcctcggacggagtctctggcttttggagattctggttcggtggtgatctagctaggctagtgtttaggataaaacaggactacagggaagaatttgaaaagttattggacgacagtccaggactttttgaagctcttaacttgggccaccaggctcattttaaggagaaggttttatcagttttagatttttctactcctggtagaactgctgctgctgtagcttttcttacttttatattggataaatggatccgccaaacccacttcagcaagggatacgttttggatttcatagcagcagctttgtggagaacatggaaggctcgcaggatgaggacaatcttagattactggccagtgcagcctctgggagtagcagggatactgagacacccaccggccatgccagcggttctggaggaggagcagcaggaggacaatccgagagccggcctggaccctccggtggaggagtagctgacctgtttcctgaactgcgacgggtgcttactaggtctacgtccagtggacaggacaggggcattaagagggagaggaatcctagtgggaataattcaagaaccgagttggctttaagtttaatgagccgtaggcgtcctgaaactgtttggtggcatgaggttcagagcgaaggcagggatgaagtttcaatattgcaggagaaatattcactagaacaacttaagacctgttggttggaacctgaggatgattgggaggtggccattaggaattatgctaagatatctctgaggcctgataaacagtatagaattactaagaagattaatattagaaatgcatgctacatatcagggaatggggcagaggttataatagatacccaagataaagcagcttttagatgttgtatgatgggtatgtggccaggggttgtcggcatggaagcagtaacatttatgaatattaggtttaaaggggatgggtataatggcattgtatttatggctaacactaagctgattctacatggttgtagcttttttgggtttaataatacttgtgtagaagcttgggggcaagttggtgtgaggggttgtagtttttatgcatgctggattgcaacatcaggtagggtcaagagtcagttgtctgtgaagaaatgcatgtttgagagatgtaatcttggcatactgaatgaaggtgaagcaagggtccgccactgcgcagctacagaaactggctgcttcattctaataaagggaaatgccagtgtgaagcataatatgatctgtggacattcgaatgagaggccttatcagatgctgacctgcgctggtggacattgcaatattcttgctaccgtgcatatcgtttcccatgcacgcaagaaatggcctgtatttgaacataatgtgattaccaagtgcaccatgcacataggtggtcgcaggggaatgtttatgccttaccagtgtaacatgaatcatgtgaaggtgatgttggaaccagatgccttttccagagtgagcttaacaggaatctttgatatgaatattcaactatggaagatcctgagatatgatgacactaaaccgagggtgcgcgcatgcgaatgcggaggcaagcatgctagattccagccggtgtgcgtggatgtgactgaagacctgagacccgatcatttggtgcttgcctgcactggagcggagttcggttctagtggtgaagaaactgactaaagtgagtagtggggcaatatgtggatggggactttcaggttggtaaggtggacagattgggtaaattttgttaatttctgtcttgcagctgccatgagtggaagcgcttcttttgaggggggagtatttagcccttatctgacgggcaggctcccatcatgggcaggagttcgtcagaatgtcatgggatccactgtggatgggagacccgtccagcccgccaattcctcaacgctgacctatgccactttgagttcgtcatcattggatgcagctgcagccgccgccgctactgctgccgccaacaccatccttggaatgggctattacggaagcatcgttgccaattccagttcctctaataacccttcaaccctggctgaggacaagctgcttgttctcttggctcagctcgaggccttaacccaacgcttaggcgaactgtctaagcaggtggcccagttgcgtgagcaaactgagtctgctgttgccacagcaaagtctaaataaagatctcaaatcaataaa

SEQ ID NO: 122 - DNA, 19688 bp, Human adenovirus
  misc_feature 1..19688: note = Ad21 E2; 23611 - 3924
  source 1..19688: mol_type = genomic DNA
atggccagccgcggaggaaatcagtcaagcgaccgccaacgggagcacacccccgaacgcggaatgggctctgccagccatccgcctccaaggccggaccgcagcccatctcagtcgcctccacctctgcccccgaagaggaacacctaccgtcgcgtggggtccgattcttctatcgagagccaggtggtactggtaagcgaaacttcgcggtcatccctgtctccggaacggagcaacagtcctcccccgatccctcccaagaagaagcccaggaagaccaagcatgtccctctgcaagacatcagccaggacagcgaagaagaaagagaacaggctcagttggtggccgtgggcttcagctaccccccggtgcgcatcattgagaaggatggcaagagaagtgttgagaagatcgacaagaatgaccctatagctaaaggagctacttctattgctgttaggaatcctttgagcttgcccctggtatctgcctgggagaagggcatggaagtgatggctgtgctaatggagaggtataggctggataatgacctgagaacctctttcaagctgatgccagagcagcacgagcagtacaagcgtatctgccaccagtatgtgaacgaggagcaccgtggcatcccgctgacatttagtagcatgaagaccctgacagcgatgatgggaagattcatgcagggattggtgcattcttattctgagatcgcccacaataattgggagtgcaccgggtgcgctctgtgggctcatggatgcaccgattacgaaggcaaggtgaaatgcctgcatggcactattatgatccagaaggaccacattatcgagatggatgtggcgagcgaaaacgggcagcgcgctatgaaggagaacccagacagagccaagatcacccagaaccgctggggcagaaatgtggtccagttggccaacaacgatgcccgctgctgtgtgaatgatgccaactgtgctactaaccaattttccagcaagtcctgtgggatgttttacaccgagggaagtaaggctcaggaagctttcaagcagtacgaagccttcatgaaggccgtgtacccagggataacccccgaccaagccaggatgatgctgatccccattcattgcgattgcaaccacaagccaggctgcgctcccgtgatgggcaggcagacctgtaagatgaccccctttggaatggccaatgctgaagacttggatgtgactaccatcagtgacccgaccgtgctggcaagcgtgagacacccagccttgatggtgttccagtgttgcaacccagtgtaccgcaactcccgtgtccagaatgccggccccaactgtgatttcaagatctctgctcctgacctgcttggcgccctgcaactgaccagaaagttgtggcaagacacctttcccgaaattccagttcccaagctggtgatccccgagttcaagtggcagaacaggttacagttccgcaacgtctccctgcccacgggtcactctgactcacgccagaacccatttgatttctgagtgaatgatgaaaacgaatgagcaaaaaaccagagccttagtgcatgtaaaaataaagtgctttttattgaacacggttttacatgacttattgcatatccatacggtcaaacgcggtggccctttcgatgcgtgcgcggtgagaacgaaagtaagatgagtgggtgtttaggaagcgatatagcgcctcctggttgcgacgcagggtgggctggacttggggtgattggagcatgctgtttgacaccccagtcagcaacttcatggtggggtttccgttcatggggcggtcgggccagtgcacaaaggcatgaaggaacatacagcaaaaaagtccacaggcggctgagcgcgggccctgcacgctctgggtggacttttccagggtgatgcagcggtctttggtagcaagggcactgcggcgcaggagcccctcgtactcaaactggtaaatctgtttgagtcgctcatccgagaacccaaaaggatcaaaaaggtagcaggtgttggagcgcgggttccaaccaaaagccagccagtgctctccccccgtctcgcgtccggcagtgttgactatggcgcaggcgagcttgtcgggggccatgaaccccgggaaacgcttgtcaaaggttcccaggaaatagggtccgcagcccaggtctcggacgatggctttgagctcttgctcgctggagccgtttccggacccgcatgacatggctgcagctgctgcttgcaagaagcaagaggcttcttatgtggtggcgttgccggccgagaacggtgtgcgcaggtagacggcctcgatgacgccgcggtgtggctggtgcactctgaccacgtcgaagacttcgaaaagaagataaagcagggtgggctcatccatgggatccacctcaaaagtcatgtccagcgcatgggccgagttggcatacagcaagttctgtcccaggtctgtaagggcacccatggacatgaagttgctagagaatgggatgcgccacatggtcctgtcgcacaggaattttttctgggtgacactggttactgcagtggttccaattagggggtatgggtagttagcagggtacgcttgaccctgacgcatggtaggagccatgtaacccacaaagccagagttattatgctggtagggtacggcgacagctttatagtctttgtagttaatctcatcaaccacctgtctactcatgggctggaagtttctgaagaaggagtacatgcgatccttgtaaccctcaggaacgtagaagccctggtatccaatgttgtagttggcaagcatctggaccaggaaccagtctttggtcatgttacattgggccacattgtagccttccccatcaactgtgcgcttgatttcgaactcatttggacttagcaatctgtcattaccaggccagctcactgaagagtcaaacatgatggagactttcttgaaagtgtggttaaggtagaaggtaccatccaggtagggtatagaaccagagtaaacaaagtagggatcgaaccctgatcccaaagagggagtctccttggttttgagtctggtgaaggaccagcctctgaaggcggcccagttgcgagagggaatggagatgggaacgttggtagcgttggccgggatggggtagagcatgttggcagcagaaaggtagtcattgaatgattgatcattggtgtcattgcgcagcatggcttcaagggtggaggcagtgttgtgggccatggggaagaaggtggcatagagattgatgctggtaaaacttatgctggcaccatcgacccggagatcattaccaagggaactctgcaggaccatgttcacatcctttctgaagttccactcgtaggtgtaagaaccgggtagaagcagcaggttcttcacagcaaagaatttctgaggcacttgaatgtggaaaggcacgtaacgaccattgcccaaaagcatggaccggtatcgcaggccagcgttgcggtgatggttaaaggggttgacattgtccatggcatccaaagaccatctggcgccaatgtttacgtaggtatccaccagggatgggggaaccacccgcccattcatgtagtcataagtgttggtgttagttggaagagtgacattggctggggtgtatttgtaggagtctgggagatacagagccacattggaataaagaaaacttctccagagattagcttggaggttaatttccatggcaaagagatttccttgtccaatttcacttgttccatttatgtcaggctctttccaatctgcaccctgtccgtttggttcaattattttgtaactacttattggtacccctactccatccaatggaaagcagtagttgggaagctcatcttccaccccatgattttcaataatgcgcacatcaggatcatagctatcgactgcttgattccacatgctgaagtatctggttctgtcacccagagagtcaagcagtagttgatatgatagttctgtgtttctgtcctgcaagtcaaccaccgcattcaattgggatgcttgacctgccagcactcccatgttgccagtactgttgtagtacataagtccaataaagttatctctaaagccaatgtagttgggtctgttgggcatagattgttgacccagattagcatgagaactttcttctgaagtaccaggtttgtacaccacatgagtgtctggggtttccaagtctacattttctgcatacatcacaatttttggactgaagtttgctttctgtgacgcttcatcaaaaaagttcatgtcaatatcatattcaacctgctggttttgcggttgttcagtagttttttgttttgcctgtccgcctttgacgttagtgggtttagcaaaagacccatagcagggtttcattttagtttctggctttagagctctaccaccatacttctcagttgttccatctgtgtcagtccaagtttcatctcccacctgaggttctggttggtatagtttatctgcataaattggtttggcttcgccgtctgtaatttctgaaccaattggaagacctttgtctttagtgatatcaccaccttctgctttcactggggcatttccaaaagtgtaagtggtgagatttttctcttcctcttcgtcagatcccccatcttctttttttacgccttcagcaatccactgagatgtattgggagcgcccttaggggccaacgagttgtaagcagtgccagagtatggcttgaagctagggcctctatccaacacaccccgaatgtcaaagaaagtgctggccatatccagcactctgttgtcgcccacagccaaggtgtatcgaactttgtatgcgtaggtattgtcttcccggtcaacgggcacaaagcgcagcatcagccgctgactgcggtcggtggtcacatcatgggtgggcgccacggtggggttcctaaacttgttccccagattgaagtaggtgtctgtggcgcgggcgaactgcaccagacccggactcaggtactccgaagcatcctgtccggcgatgtgcatgtatgcccactggggcagcatcgatggggtggccatcttgaaatcaactcagcctcggcgcgcgacctcttccttgctcctctgctgttgctgcggcggcggcgtgatgatgacacatacacacagacaggcaagttaagcgctactccatattaatttaaaagcagcgacggcgctttacactttgcacgcccagacccacgatgctgttcagagtactctgccagtttgcattcggacgtggagtgcccccaggacgcggtctggctacggcgacgggctgtacggtggtgggcttcggggtagcgacaggcttgcgagcaggcgctgcaacagcagggggaggcaagtccaaggtagcgggtcggtgtgactgagaaggtttcattaccccggtagccatgggggctacaggtctggtggtgggcattccaagcttcactgcctcctcgtaggagggcgggtcgtctgagcgtgtgactagtgtctcctccagatcggggcgcggacgcttgtcgccccgcttttcaaggggagggagatcttcctccacttccatttcacccggggctgacggcggcgggtcaatgcggctgtttatctgtttctgcacggcctggttggccagatccaccaccccattgataccagaggcgattccatcaaccaccttctgttggaagttttgctctttaagcttatttctcaatgcctgccctgtgctgctgttccaagctttgttcccataggtttttatggtagagccaaaatttttaagcccgctccagatactgctccaattgaaggcgcccccgttcagttggctggtgccgatgtcgctccaggtgcccatgtacggcctcgtgccgtgtcgcggagccagggatgaaaaattgatgtcttccatctctacaaaaacatagtcacaggaccaggagcatcagagtccattctgttttatttataagtttttccaatgtcagtggcgctgcgaggcctgaaccgccacggaagctatgcctggtatcgccccgatcgccgcggctatgatggggatcagagcaggcagaaagccaccccccagcctcttgctgatagcgcgccgccgcctgtggcgtcgcattccgcgccccaacatccctcttctacggcgcgagtttcttcctcggtagccagtaatggggacacgaaggcggcaagtgagggccatatctgcaaggaggcagcggcaacagttgttaagttgtgatgcttggatggtagcgtacgcgcggcaacgtcaggggatccgcgcggccatcgcgatacactctccgcaccagagcagcgggagtcagattgctggtggggcggcggcgacgacggtgactacgacttgcaggtgttttgcggcgacggcgggaagtgctgctcctgctgcggtagtagcgagtgcctcggtaacccggagttggaataatggatgggtgcagagcataatttggcatcagcaaacttgctggaccgtactttcgccgggatcttcgagtggtgttgacagcagctggagttgtaacgggtgcggtcatccagggatccgtttgcacctcaatggaggtggttgtgggctttgcaggttcggtttggacttccatggactcggtgggaatcttgatgtctacggtttgtactcccaaacctggcgccacctgcttgatgggtctcactttgacctcaggttgtatatcgggatccactttcattttctccagcacgtcctccagccgctggcgcttgggcaccatcaattgcatagtgggatacagatcctcaccctctcgcttgttgcctctgcgtggaggcacgggcagcacttgctgcagggtgactggcttgagactaggggtgggattcccattgtccaagggaatggacaccgcctcctccttggggctcgagcgggagcgcttgccataagcaaactcgcccaggcggtcggccgcctgctccagaatatcatcatccccatacacctcatcataggaccgcttaaaagcagtgctggagcgctcgccgggcgtaaagaccaccgtggttccaggtctcagcacaggccgcactttgcgtccacgccactgcacacgccgccttggggcgaactcgcgtacaaactccgccagaccatcattgccatcttcttcctttttgtcctttttgacccgcttgattttgcggggctttttttcatccttcaccggcggaccgtagatttcaggcgcgatgacctggagcatctcttccttgtatttgcgcttggacatcctcgctgggacacaacatcggagactgctcagtatcttctaagagcgaggggggcgggtgcgcacgggcacgcgctggccggtggtggcgtcgcgcacccagtacacattgcctcttcgcggttgggccatgttggcaatggccgctgctgccgccgtggctgcgcgcctgcgggacctgccggcactggcacctgaagccgcgcgtctggccgctctaagcatagctcttcgccccacgcgtttggccctccgtagcagagctcttgccgctcgcatagcgggagtagcccggtggcgcctggcgatgcgtctccgcctgctcttccggcgagcataggcgcgggcgtcagccactacgctgtcaataactgcatccacagtagatgtaggtgcagtaggagtataattacgagcatcggccaccacctggtcgatcacatcatcgacggtggttctagtgcgggcacgacccttgagggcgccccatggagcgcggaagtgcccgcgcacgcgcacagggtgctgtgtagagcgtttgcgagcacctccgtacatcttgcttggcgcgcgcaggccccaaccggtgttattactaggtgagataagaatggacatttttttttttagaaagtgcggcttgaaaggacgcgcggcgcgactatgcccagggccttgtagacgtaggggcaggtgcggcgtctggcgtcagtaacggtcacgcgctggactccccggatactgctgcgcaacggcagggtcccgtgatctgtgagagcaggaacgttttcactgacggtggtaatggtgggcgctggcgggcggatgaggatctggttctcagggaagcggttgaagacgtgcgtgagcgaggtggactggcgaagctgctgggagtacacggcttgctcgttgtagaaactctttgagaagaccggcatgagctctgcacctaccactggatagttgctgacttgtctcgtggaacggaatgtgacagggtcctgcatcatgtctgggagcgaccagtacacctgctctgctccacaggtgacatccgaggtggtgagcagtgtccaggaacggactcctttttcagggtcaccatagttgtaggacaggtaccagctgcggtaggctgtattcactttatcttccaagacattgtaacttctactcttgctgtctttttctacaggtttaatagtgagttttgtctctgtagtttcggccacagcagccaatagcgattcgtcagttgcaacagatgaagctgtatagttgtctcctctgacttcttctgcattagccacccttacagggtcgctgacaactatgttggctttagcaatagcagcagctttagcggcttctgttttggcttcttgttctttcttactgttctcataggcttctacatccaacagggccgggatattacccccttcaagatcctcatacaagatcttaaaaccctcctggaatgggtgtcttttcctgataccaagcaagttactaaggcgactttcagtaaagtcaactccgcaaccaggcaacaatacaatgtcaggatggaatgcctcataggtgtaaaccccaggcataatcaacttagtttccggatcccaacccagtctaaagttcctggtgtcaaatttaacaccaatgtcactctctaacactccattctgtctgcccacttcaaggtaattatcaatgatggcattgttcattaggtcaatggtcattgtggctgagaaattcccttccggtagagtaaactcaaaccactcatattccaaaatatcctgcttgtgatcataattgtcatctactgtgacaccttcaggagcctttctagacaccatcacccgagctttgaacttgttgctaaacatgtactcgttcacgttgggcatgttggtgtgcatgatagtcttcagctgaccgccccatcgcgaccgctcgtcaaagttgatggtctgggtgctggcctccgtgggggtaaagtcattgttttgcaccaccgtggtgaggaagttgctgtggtcgttctgatagttcagtgaggcgatgtccgcggacttgttgtccaccaaatacaaccgggtggtatcatacaatggtgccagctccgagtaacgaatgctgtttctcccctccgtaggtgccaggtaccgagggggtacaaagggagcctccagtggtggctgcatcgtcgccgccgccgcctgctgcatcacgctctcgtacgaaggaggaggaccctccggatacaccaccgctccgcctagcacggttcgcctcatcatactagatataacagagaagaaacgaacgcacgctggtcgccatggccttggtgagtatttattttcggtttcttacatcaggcgcccgacgcgggggcgcaggtgagcgaacgggttaccaccactcccacccaagtccaacacgctgctgtcgtcggcggaatcatcatcggcccacaccaggccccgctgcctgtcgtgccactggcgtttacgggtagcgctgccccggctatcccccagcgcccggggatcgtgcgcgtacgtcttccagcggttcattttgtcaaccaagctttctatcccgttgttggggaaattcttctccctctcgggtctcaacagggagtcgttcaaatactcctcctcgccgatcaagcgaggacgggttattcttcccagctcactgctgcgtacactgtttagcgaaaatggcaaactagggaaaggacttgcggcctcgggagccgctgcggcagcacccgttgccccggacagtgacacggaagagtgccttctatcgccaccttccttcttccaagtgttataaccaggaggcggggagaaaacactactgtccacatcgtcccataaaaacccgtcattgggtcgggcaatgtcatactcgcccgtatagaacccaggtgggggcagccaatgggggttcaggatagcattggtgaaataatcagagttcatagcagccgccctgtgtaagtagtctagcagtttattgataaaaggccggttactggcatacatgctgggctccatgtttcgggctgtcatatcgagcgcagcagtaggagtcgccccctcctgcattaggaacagtcccacgctctgctgcacgtatctcaggatccgttcctcctccgcggtaagcgcatactgaggagggatcttctgcgaccggttggtcagcaagaagtttaaggtggcttccaagctgccagtgtcctcccgacccagagcgcggctcacttgggtaatttcttgataggtttgctcatctacctgagtttgccctatggcctcgcgatacaggttcaacagatagcccaagtacgaattacggtcgatgctaccgctgtcagtgaatggggctaccaagagcagtagtaggcgggagttgggggtcagcaagctagacacggtcgcccgatctcccactggggcgcgcactccccacagaccattcaggttcttaaaagcctggctcaggttcactgtctgcaagccctgtctgctggtctggaaaaagtagtctggcccggactggtacacttcgctttgagggacttcggccaccatgagtctcaatgcacttagaaagtttgtgtagtcttgctgaccgcgaggcacgttggcaggctgagtgctgaggaaggcgttcaaagccaccagcgaccctaaattggcgtctcgctggaaccgctcgcgctgagacacggcctcgcgcacatcggtcaccatccggtccaggttggtctgcacgttgctgctgttgtagcgggctacgcgctccaatagggcattgtataccagcccagcctcatcgggacgtatggctttgttctccaccagcgcgttcacgatggccaggaccttctcgtgtgtggggttggagcgggagggcactacggcctccaggatagcagaaaggcggttggcctggggttgctgcctaaaggcttcggggttgcgggtcgtcagcgccatgatgcgttgcatggcctggctccaatcgtccgaggagttaatgccggacggctggctctgtagcgccgcccgttttgcggggtccggtgcctgctgttccatctagcaaaaatatggatggtcgcgccatcagtcttccaggtactcgccctcctcatcctggccttcatccacctcttctatgtaaggaagctcataccctgctgcgtccagggccctgcgactgggctgccattgcaagtccgctcccatgtcaaagtagttctccccctcggttccagccccagtcagagctctttgcaagctgtgcataagttctctgtcgctcagctcacgccttctgctggcgctcactgcgcggtgcatcctgtcgttgcggtacactcccagatcgtcactcaaggtcagcaccttgagagtcatgcgcatataaaacccatctatcttcacctccttgtctataggtacgtatggggttttgtagatcttgcgagcgtagtgcttgcccaggctcaagaccgagtagttaatagcagccaccttctcagctagacccaggctacgttcttgcactattatactttgcagaatattgataagatcatacaaccatctcccctcgggctcagtaatgttcaacagcgcctccctaaatgcctcattgtctctactatgttgcaccaccagaaacagctgagcggttagaggtttgctggtggggttctgggtaatggcttccatcaggtcccacaggtgcatcagtcccagtgtcacttcctcgcgggcaatcagggtgcgcacatggttgttgaaagatttttgaaagttgcgctcctccttcacggtctgctcgtaagctgatactaggttggccgcggccacatgtgccctagcaggacttattcctgtcacttcatcgacttcaaaatcatcatcacgcagcacccgtcttcggtccagaccgtgacgcagttcgcgacccgcgttaaagcgggaagctcgcatttcctcaggctcctcgccgctcctgtccctgaacaggttctgctggggcacgtacgcctcgcgagagtcctttttcagttgcacccgcgggtgccgctcgggcgatggtgcgcccaggcgcgccagtccctcgccctcttccaagtccagatcataggcgggctgccccgcgccgctgacggctgcagccgcagtagttacaggagcaggaagagccttttgtggctgttgttgtagctgctgctgagaagggggctgttgctgggggcgcatctgtcgcagcacgggatgcatctgggcaacaaaaaaacaaaaaaagagggctcgctcccgtaaactggagaagtcggctggcggggtcttagaaatgacggggctgccaaaccctcgcttgtcgcggaaaccggccgatccggcgcgctaagactcgaaccggggcacaccgcaacgcaaccctggcgattgattctccagactacgggcgcgagccactcccagccccgagaactgagtgttctaaagcttgacgcagcactggctcccatccaggaaaaagcaaaaaaaaaaaaaaacgacccgcctccgtatcctggaggttttgtgcaggcctgggtcgagacgggagtgccagtaccacgttagctgcggctccagcctgatccgagattcgaaccggggtacacgcgcagcccaacccgttcgcttagcctccaggccacggagacgagccgctgaccgctttcgtttttgcccgtatgtctagagcatcaacgactgtgcacgtctcacgggccaaaccgtgcctaccatgaactacttcatgccgctgcgcaacatctggaaccgcgtacgcgagttcccgcgggcatccaccaccgcctccggtatcacctggatgtccaggtacatctacggttatcaccgcctcatgctggaagacctcgcccctggcgccccggctacagagcgatggcccctataccgccagccgccgccgcactttcttatcggctaccagtacctggtgcgcacctgtaacgattacatctttgacacccgcgcctactcgcgcctcaagtacaccgagattgtgcgtccggggcaccagacagtcaactggtcagtcatggccaactgctcctacacaatcaacaccggggcttaccaccgcttcgtggactttgacgacttccaagccaccctcacccaggtgcagcaagccatcctcgcagaaagggttgtagcggacctggcacttgtccagcccatgcgcgggttcgggatcactcgcatgcatggcagagcgggcgaagaagaagtgcccgtggaacgactcatgcaagactactataaagatctggccagatgtcaggataatgcttggggaatggcccatcgcctgcgcatccaacaagccggacccaaagacctggtgctcctcgccaccatccgccgtctcaaaactgcctattttaatttcatcaccagcagcatcgtctcaccctccaaagaggaggaaggagaagaaagagagaaccccgaccgagcgtctagccgcccccgcccgcaagaaacagtgctcagcctaccttgcgattgcgactggttagacgctttcgtcgaaaggttttcagatcccgtggatcttgagacgatcaggtccttgcgcggagtacctacggggcaattgataaaatgcataatcagcgcggtgtccctgcccaacggagagcctcccagtcaccacttcagggagatgcgcggaggcgtcttcactctgagacccagggagaacggtcgtgccgtcaccgagaccatgcgccgccgccgcggagaggtcattgaaagattcatcgaccgtctgcccgtgcgccgccggcgtcgccgcgttccccctcctcctgcagccccacctgaagaggaagagatgttagtggaagaagaagagattgaggaagaaatcccaggggctttcgagcgcgaggtgcgcaccaccgtcgccgaactcatccgtcttctggaagaggagttgaccgtgtccgcgcgtaactcccagtttttcaactttgccgtggacttctacgaggccatggagcgcttggaagcgctgggcgatgtcagcgagatgccgctgagacgatggatcatgtatttcttcgtcaccgagcacatcgccaccacactcaactaccttttccagcgtctatgcaactatgcggtcttcacccgccacgtggagctcaacctcgcccaggtggtcatgcgcgcgagagatcccgtgggggctgtggtctacagccgcgtctggaacgaggcgggcatgaatgcattctctcaactcattgggcgcatctccaacgacctggcggccaccgtcgagagagcgggccgcggagatcttcaagaggaagagatcgagcagttcatggccgagatcgcctaccaggacaactctggcgacgtgcaagaaatccttaggcaagccgccgtcaacgataccgagattgattctgttgaactctctttcaggttcaagctcacggggccggtagctttcacccagaggcgtcagatccaggatgtcaaccgccgcgtcgtcgcgcatgcgagtcttctcagagcacagtaccagaacctacccgcgcgcggcgccgacgtaccactgccagccatgccgccgggtcccgaaccgcccctgccgcccggtgcgcgccctcgacaccgcttctaaacatgcaagaagcaacagagccaccgccgcccaaaaggaaaaacaagggcacggtggtagcacccaaggggcacggaaccctgcaagccatcgacatctccaccaacggacccgtggagatcaagtaccatctgaacctccctcacgccctcgaaaagatcatgcaagtcaatctcctgacactgcctactaacctgactccgcagcgtctcaggaccctggacagctccggcctgcgcgctctcgtcctcgagctccgcccctgccgcgccgaggtctggacttgcctcccgcgagggctcgtcagcatgaccaccatcgagacagaagatggtcatgccgatgcagacaacatagtagagcgcgaggtacaaacgccaggcctcaattttccactgaaatttctcgtcaaaggaagtcaggtacaactcattcatgaggtgcatcccgtgaatcgctgcgagtactgcggccgtctgtacaagcacaagcatgaatgctcggcgcgtcgcagggagttctacttccatcacatcaacagccattcctccaactggtggcaggagatccagttcttcccgattggctctcatcctcgcacagaaaggctcttcctcacctacgatgtggaaacctacacctggatggggtcctttggcaagcagctaatccccttcatgctggtcatgaaactctctggagaccagcggctcgtcaacatcgcctatgacctcgccatgaaactcaagtgggatcgctggcggcaggacccccaaaccttctattgcgtcaccccagaaaagatggcagtcgggcagcattttcgtcagtaccgggaccagttacaaacagcactggcagtggacctctggtcctccttcctcaaagcgaaccctcacgtgcacgaatgggccctcgaacactatgctctcactgaccctacagatctcacttttgaagaactcaagaagctgcctcatgtcaggggcacccctcgattcttagaactgtacatagtggggcacaacatcaatggctttgatgagatcgtcttggccgctcaggttatcaataaccgagcagaggtccctcagcctttcaaaatcacccgaaatttcatgcccagggccggcaagatcctcttcaatgatgttactttcgctttgcccaaccccgcctacaagaagcgggtggacttccaactctgggaacagggggcctgtgatgacattgacttcaagtatcaattcctcaaagtcatggtcagggacacttttgccctcactcatacctcgctgcgcaatgcagcccaagcatactctcttccagtggagaagggatgctgtccctacaaggcagtcaatcagttctacatgttgggctcttaccgtgcagaaaaagacgggtttcccctcgaagagtactggaaggatcgcgaagaataccttctcaaccgcgagctgtgggaaaagaaaagccaaccgcgttatgacatcatccaggaaactctcgactactgtgccctggatgtactcgtcaccgccgagctggtagccaagctgcaagagtcatatgcccacttcataagggactctgtaggcctacctcatgcccattttaacatattccagagacctactatctcttccaattcccatgccatctttcgccagatcgtttacagggcggaaaaacccaaccgcaccaatctgggcccgggtcttctcgccccctcacatgaactctatgactatgtgcgagcaagcatcagaggggggcgctgttatcccacttacatcggcatcctcgaagagcccctctatgtctacgatatctgtggcatgtatgcctccgcgctcacccaccccatgccctggggcacccctcttaacccctatgagcgcgcgctggcagttcgagaatggcagatgaccttggatgatcccgccaccatcagctattttgacaaagatttgctaccgggaatatttaccatagatgcggacccccctgatgagttcatgctagaccccctcccacctttctgttcaagaaaaggaggtcgactctgctggaccaatgagcccctccgaggcgaggtggccaccagtgtggatctgataaccctgcacaataggggatggcgagtcagaatagttccggatgaactgacaaccatcttccctgaatggaaatgtgtggcgcgcgagtacgtccagcttaacatcgccgccaaggagcgcgcggacaaggaaaagaaccaaaccatgcgctccatcgccaagcttctgtccaatgccctttatggatcatttgccaccaagctggacaacaagaagattgtgttttctgaccagatggacgagagtcttatgaaaggcgtctctgctggtactgtcaatatcaaatcctcctcgttcctagaaactgacaacctgagtgcagaggtcatgcccgccttcgagagggaatacctaccccaacagctggcgctcctggacagcgatcctgaagacagtgaggacgaacagaggcccgcccccttttatacccccccggcggggacccctggtcacgtggcctacacttacaagccaatcacattcttggatgtggaggagggggacatgtgtttacataccgtagagaaggtggacccactggttgacaacgaccgctacccctcccacgtggcctcctttgtgctggcctggacacgcgcttttgtatcagagtgggctgggttcctctacgaagaggaccgaggcactccgctcgaggacaggcccataaagtcggtctacggggacacggacagcctctttgtcacccagcggggacacgaactcatggaaaccaaaggtaagaaacgcatcaaaaaacatggcggaaaacttgtttttgaccccgatgagccggatctgacctggctcgtggagtgcgaaaccgtctgcgcctcctgcggtgcggatgcatactcccccgaatccattttcctcgcgcccaagctgtatgccctcaaatgtatctactgccccgcctgccataaaacttccaaaggtaagctccgtgccaaaggccacgcggccgaggcgctcaactacgaactcatggtaaactgctacctggccgacctgcagggcgccgatcggcagcggttctcgaccagcaggatgagtctgaagcgcaccctcgcaagcgcccaaccaggcgcgcaccccttcaccgtgacggaaacaaccctgactcggacgctgcgaccatggaaggatcggaccctagcagcgctggacgcccatcgtctgattccctactccaggagccgtcccaacccgcgaaacgaggaggtctgttggatcgagatgccatagagcacatcaccgagctctgggaccggctcgagctcttgcaacagactctttccaaaatgcccatggctgacgggctgaagccgctgaaaaacttctcctcgctccaggagcttctatcccttgggggagagcgcctcctaacggacttggtgcgggaaaatatccatgtaagggaaatgatgaacgaagtggcccccctgctccgggaggacggcagctgtcgctccctaaactaccatctgcaacccgtaattggggtcatttacggtcccactgggtgcggcaagtctcagctgcttaggaatttgctctcatcccagttaatcaccccggctccagaaacggtattttttatagccccgcaggtggacatgatccccccctcggaactgaaagcctgggaaatgcaaatatgtgagggaaactatgctcccgggccagagggaactttcatcccccaatctggcaccctccgcccaaagtttattaaaatggcttatgatgacctgactcaggagcataactatgatgtttcagacccccggaacgtgttcgcccgtgccgctgcccacggccccatcgctatcattatggatgagtgcatggagaatctggggggtcacaaaggcgtctccaaattttttcatgcttttccctctaagctgcatgataaatttcccaagtgcaccggatacactgtcttggtggttctgcacaatatgaatccgagacgggatctaggcggcaacattgccaacctcaagatccagtccaaaatgcatataatttcacccaggatgcacccgtcccagctcaacagatttgtaaacacctacactaagggcctccccgttgcaattagtctgctcctaaaagatattgtgcaacaccatgcactccgaccttgctatgactgggtgatttataacactaccccggagcaagaggctcttcaatggagctatctccacccccgagacggactaatgcccatgtatctaaacattcaatcccacctttacagggtactggaaaagatccaccgagttctcaatgatcgagaccgatggtccagggcataccgcgcgcgaaaaatcaaataaacattcatttgtttttataaca

SEQ ID NO: 123 - DNA, 3768 bp, Human adenovirus
  misc_feature 1..3768: note = Ad21 E3; 27441 - 31208
  source 1..3768: mol_type = genomic DNA
atgtctaatggtggcgcggctgagctagctcgactgcgacacctagaccactgccgccgctttcgctgtttcgcccgggaactcaccgagttcatttacttcgaactctccgaggagcaccctcagggtccggcccacggagtgcggattaccatcgaagggggaatagactctcgcctgcatcgcatcttctcccagcggcccgtgctgattgagcgcgaccagggaaatacaaccatctccatctactgcatctgtaaccaccccggattgcatgaaagcctttgctgtcttgtttgtgctgagtttaataaaaactgagttaagaccctcctacggactaccgcttcttcaatcaggactttacaacaccaaccagatcttccagaagacccagacccttcctcctctgatccaggactctaactctaccttaccagcaccctccactactaaccttcccgaaactaacaagcttggatctcatctgcaacaccgcctttcacgaagccttctttctgccaatactaccactcccaaaaccggaggtgagctccgcggtcttcctactgacgacccctgggtggtagcgggttttgtaacgttaggattagttgcgggtgggcttgtgctaatcctttgctacctatacacaccttgctgtgcatatttagtcatattgtgctgttggtttaagaaatgggggccatactagtcgtgcttgctttactttcgcttttgggtctgggctctgctaatctcaatcctcttgatcacgatccatgtctagacttcgacccagaaaattgcacacttacttttgcacccgacacaagccgtctctgtggagttcttattaagtgcggatgggactgcaggtccgttgaaattacacataataacaaaacatggaacaatacattatccaccacatgggaaccaggagttcccgagtggtatactgtctctgtccgaggtcctgacggttccattcgcattagtaacaacactttcattttttctgaaatgtgcgatctggccatgtttatgagcaaacagtatgacctatggcctcctagcaaagagaacattgtggcattttccattgcttattgcttggtaacatgcatcatcactgctatcatttgtgtgtgcatacacttgcttatagttattcgccctagacaaagcaatgaggaaaaagagaaaatgccttaacctttttcctcataccttttctttacagcatggcttctgttacagctctaattattgccagcattgtcactgtcgctcacgggcaaacaattgtccatattaccttaggacataatcacactcttgtagggcccccaattacttcagaggttatttggaccaaacttggaagtgttgattattttgatataatttgcaacaaaactgaaccaatatttgtaatctgtaacagacaaaatctcacgttaattaatgttagcaaaatttataacggttactattatggttatgatagatccagtagtcaatataaaaattacttagttcgcataactcagcccaaatcaacagtgccaactatgacaataattaaaatggctaataaagcattagaaaattttacattaccaacaacgcccaatgaaaaaaacattccaaattcaatgattgcaattattgcggcggtggcattgggaatggcactaataataatatgcatgttcctatatgcttgttgctataaaaagtttcaacataaacaggatccactactaaattttaacatttaattttttatacagatgatttccactacaatttttatcattactagccttgcagctgtaacttatggccgttcacacctaactgtacctgttggctcaacatgtacactacaaggaccccaagaaggctatgtcacttggtggagaatatatgataatggagggttcgctagaccatgtgatcagcctggtacaaaattttcatgcaacggaagagacttgaccattattaacataacattaaatgagcaaggcttctattatggaaccaactataaaaatagtttagattacaacattattgtagtgccagccaccacttctgctccccgcaaatccactttctctagcagcagtgccaaagcaagcacaattcctaaaacagcttctgctatgttaaagcttcgaaaaatcgctttaagtaattccacagcagctcccaatacaattcctaaatcaacaattggcatcattactgccgtggtagtgggattaatgattatatttttgtgcataatgtactacgcctgctgctatagaaaacatgaacaaaaaggtgatgcattactaaattttgatattgtttcaatcaaatgccactaacactctcaatgtgcagactactttaaaacatgacatggaaaaccacactacctcctatgcatacacaaatattcagcctaaatacgctatgcaacttagaaatcaccatactaattgtaattggaattcttacactatctgttattctttattttatattctgccgtcaaatacccaatgttcatagaaattctaaaagacgtcccatctattctcctatgattagtcgtccccatatggctctgaatgaaatctaagatctttttttttcttttacagtatggtgaacatcaatcatgattcctagaaatttcttcttcaccatactcatctgtgctttcaatgtctgtgctactttcacagcagtagccactgcaagcccagactgtataggaccatttgcttcctatgcactttttgcctttgttacttgcatctgcgtgtgtagcatagtctgcctggttattaattttttccaactggtagactggatctttgtgcgaattgcctacctacgtcaccatcccgaataccgcaatcaaaatgttgcggcacttcttaggcttatttaaaaccatgcaggctatgctaccagttattttaattctgctactaccctgcattgccctaccttccaccgccactcgcgctacacctgaacaacttagaaaatgcaaatttcaacaaccatggtcatttcttgattgctaccatgaaaaatctgattttcccacatactggatagtgattgttggaataattaacatactttcatgtaccgttttctcaatcacaatataccccacatttaattttgggtggaattctcccaatgcactgggttacccacaagaactagatgaacatatcccactacaacacatacaacaaccactagcattggtagagtatgaaaatgagccacaaccttcactgcctcctgctattagttacttcaacctaaccggcggagatgactgaaatactcaccacctccaattccgccgaggatctgcttgatatggacggccgcgcctcagaacagcgactcgcccaactacgcatccgccagcagcaggaacgcgtgaccaaagagctcagagatgtcatccaaattcaccaatgcaaaaaaggcatattttgtttggtaaaacaagccaagatatcctacgagatcaccgctactgaccatcgcctttcttacgaacttggcccccaacgacaaaaatttacatgcatggtgggaatcaaccctatagttatcacccagcaaagtggagatactaagggttgcattcactgctcttgcgattccaccgagtgcacctacaccctgctgaagaccctatgcggcctaagagacctgctacccatgaattaa

SEQ ID NO: 124 - DNA, 972 bp, Human adenovirus
  misc_feature 1..972: note = Ad21 fiber; 31406 - 32377
  source 1..972: mol_type = genomic DNA
atgaccaagagagtccggctcagtgattccttcaaccctgtctacccctatgaagatgaaagcacctcccaacacccctttataaacccagggtttatttccccaaatggctttacacaaagcccagacggagttcttactttaaattgtttaaccccactaacaaccacaggcgggcctttacagttaaaagtgggagggggacttatagtggatgacactgatgggaccttacaagaaaacatacgtgctacagcacccattactaaaaataatcattctgtagaactatccattggaaatggattagaaacacaaaacaataaactatgtgccaaattgggaaatgggttaaaatttaacaacggtgacatttgtataaaggatagtattaacaccttatggactggaataaagcctccacctaactgtcaaattgtggaaaacactgatacaaacgatggcaaacttactttagtattagtaaaaaacggagggcttgttaatggctacgtatctctagttggtgtatcagacactgtgaaccaaatgttcacacaaaagtcagcaaccatacaattaagattatatttcgactcttctggaaatctattaactgatgaatcaaacttaaaaattccacttaaaaataaatcttctacagcaaccagtgaagctgcaaccagcagcaaagcctttatgccaagtactacagcttatccctttaacaccactactagggatagtgaaaactatattcatggaatatgttactatatgactagttatgatagaagtctagttcccttaaacatttctataatgctaaacagccgtacgatttcttccaatgttgcctatgccatacaatttgaatggaatctaaatgcaaaagaatctccagaaagcaacatagctacgctgaccacatccccctttttcttttcttatattagagaagacgacaactaa

SEQ ID NO: 125 - DNA, 126 bp, Human adenovirus; identical to SEQ ID NO: 53
  misc_feature 1..126: note = Ad21 fiber tail; 31406 - 31531
  source 1..126: mol_type = genomic DNA

SEQ ID NO: 126 - DNA, 273 bp, Human adenovirus
  misc_feature 1..273: note = Ad21 fiber shaft; 31532 - 31804
  source 1..273: mol_type = genomic DNA
gacggagttcttactttaaattgtttaaccccactaacaaccacaggcgggcctttacagttaaaagtgggagggggacttatagtggatgacactgatgggaccttacaagaaaacatacgtgctacagcacccattactaaaaataatcattctgtagaactatccattggaaatggattagaaacacaaaacaataaactatgtgccaaattgggaaatgggttaaaatttaacaacggtgacatttgtataaaggatagtattaacacc

SEQ ID NO: 127 - DNA, 570 bp, Human adenovirus
  misc_feature 1..570: note = Ad21 fiber knob; 31805 - 32374
  source 1..570: mol_type = genomic DNA
ttatggactggaataaagcctccacctaactgtcaaattgtggaaaacactgatacaaacgatggcaaacttactttagtattagtaaaaaacggagggcttgttaatggctacgtatctctagttggtgtatcagacactgtgaaccaaatgttcacacaaaagtcagcaaccatacaattaagattatatttcgactcttctggaaatctattaactgatgaatcaaacttaaaaattccacttaaaaataaatcttctacagcaaccagtgaagctgcaaccagcagcaaagcctttatgccaagtactacagcttatccctttaacaccactactagggatagtgaaaactatattcatggaatatgttactatatgactagttatgatagaagtctagttcccttaaacatttctataatgctaaacagccgtacgatttcttccaatgttgcctatgccatacaatttgaatggaatctaaatgcaaaagaatctccagaaagcaacatagctacgctgaccacatccccctttttcttttcttatattagagaagacgacaac

SEQ ID NO: 128 - DNA, 1686 bp, Human adenovirus
  misc_feature 1..1686: note = Ad21 penton; 13878 - 15563
  source 1..1686: mol_type = genomic DNA
atgatgaggcgaaccgtgctaggcggagcggtggtgtatccggagggtcctcctccttcgtacgagagcgtgatgcagcaggcggcggcggcgacgatgcagccaccactggaggctccctttgtaccccctcggtacctggcacctacggaggggagaaacagcattcgttactcggagctggcaccattgtatgataccacccggttgtatttggtggacaacaagtccgcggacatcgcctcactgaactatcagaacgaccacagcaacttcctcaccacggtggtgcaaaacaatgactttacccccacggaggccagcacccagaccatcaactttgacgagcggtcgcgatggggcggtcagctgaagactatcatgcacaccaacatgcccaacgtgaacgagtacatgtttagcaacaagttcaaagctcgggtgatggtgtctagaaaggctcctgaaggtgtcacagtagatgacaattatgatcacaagcaggatattttggaatatgagtggtttgagtttactctaccggaagggaatttctcagccacaatgaccattgacctaatgaacaatgccatcattgataattaccttgaagtgggcagacagaatggagtgttagagagtgacattggtgttaaatttgacaccaggaactttagactgggttgggatccggaaactaagttgattatgcctggggtttacacctatgaggcattccatcctgacattgtattgttgcctggttgcggagttgactttactgaaagtcgccttagtaacttgcttggtatcaggaaaagacacccattccaggagggttttaagatcttgtatgaggatcttgaagggggtaatatcccggccctgttggatgtagaagcctatgagaacagtaagaaagaacaagaagccaaaacagaagccgctaaagctgctgctattgctaaagccaacatagttgtcagcgaccctgtaagggtggctaatgcagaagaagtcagaggagacaactatacagcttcatctgttgcaactgacgaatcgctattggctgctgtggccgaaactacagagacaaaactcactattaaacctgtagaaaaagacagcaagagtagaagttacaatgtcttggaagataaagtgaatacagcctaccgcagctggtacctgtcctacaactatggtgaccctgaaaaaggagtccgttcctggacactgctcaccacctcggatgtcacctgtggagcagagcaggtgtactggtcgctcccagacatgatgcaggaccctgtcacattccgttccacgagacaagtcagcaactatccagtggtaggtgcagagctcatgccggtcttctcaaagagtttctacaacgagcaagccgtgtactcccagcagcttcgccagtccacctcgctcacgcacgtcttcaaccgcttccctgagaaccagatcctcatccgcccgccagcgcccaccattaccaccgtcagtgaaaacgttcctgctctcacagatcacgggaccctgccgttgcgcagcagtatccggggagtccagcgcgtgaccgttactgacgccagacgccgcacctgcccctacgtctacaaggccctgggcatagtcgcgccgcgcgtcctttcaagccgcactttctaa

SEQ ID NO: 129 - DNA, 2850 bp, Human adenovirus
  misc_feature 1..2850: note = Ad21 hexon; 18454 - 21303
  source 1..2850: mol_type = genomic DNA
atggccaccccatcgatgctgccccagtgggcatacatgcacatcgccggacaggatgcttcggagtacctgagtccgggtctggtgcagttcgcccgcgccacagacacctacttcaatctggggaacaagtttaggaaccccaccgtggcgcccacccatgatgtgaccaccgaccgcagtcagcggctgatgctgcgctttgtgcccgttgaccgggaagacaatacctacgcatacaaagttcgatacaccttggctgtgggcgacaacagagtgctggatatggccagcactttctttgacattcggggtgtgttggatagaggccctagcttcaagccatactctggcactgcttacaactcgttggcccctaagggcgctcccaatacatctcagtggattgctgaaggcgtaaaaaaagaagatgggggatctgacgaagaggaagagaaaaatctcaccacttacacttttggaaatgccccagtgaaagcagaaggtggtgatatcactaaagacaaaggtcttccaattggttcagaaattacagacggcgaagccaaaccaatttatgcagataaactataccaaccagaacctcaggtgggagatgaaacttggactgacacagatggaacaactgagaagtatggtggtagagctctaaagccagaaactaaaatgaaaccctgctatgggtcttttgctaaacccactaacgtcaaaggcggacaggcaaaacaaaaaactactgaacaaccgcaaaaccagcaggttgaatatgatattgacatgaacttttttgatgaagcgtcacagaaagcaaacttcagtccaaaaattgtgatgtatgcagaaaatgtagacttggaaaccccagacactcatgtggtgtacaaacctggtacttcagaagaaagttctcatgctaatctgggtcaacaatctatgcccaacagacccaactacattggctttagagataactttattggacttatgtactacaacagtactggcaacatgggagtgctggcaggtcaagcatcccaattgaatgcggtggttgacttgcaggacagaaacacagaactatcatatcaactactgcttgactctctgggtgacagaaccagatacttcagcatgtggaatcaagcagtcgatagctatgatcctgatgtgcgcattattgaaaatcatggggtggaagatgagcttcccaactactgctttccattggatggagtaggggtaccaataagtagttacaaaataattgaaccaaacggacagggtgcagattggaaagagcctgacataaatggaacaagtgaaattggacaaggaaatctctttgccatggaaattaacctccaagctaatctctggagaagttttctttattccaatgtggctctgtatctcccagactcctacaaatacaccccagccaatgtcactcttccaactaacaccaacacttatgactacatgaatgggcgggtggttcccccatccctggtggatacctacgtaaacattggcgccagatggtctttggatgccatggacaatgtcaacccctttaaccatcaccgcaacgctggcctgcgataccggtccatgcttttgggcaatggtcgttacgtgcctttccacattcaagtgcctcagaaattctttgctgtgaagaacctgctgcttctacccggttcttacacctacgagtggaacttcagaaaggatgtgaacatggtcctgcagagttcccttggtaatgatctccgggtcgatggtgccagcataagttttaccagcatcaatctctatgccaccttcttccccatggcccacaacactgcctccacccttgaagccatgctgcgcaatgacaccaatgatcaatcattcaatgactacctttctgctgccaacatgctctaccccatcccggccaacgctaccaacgttcccatctccattccctctcgcaactgggccgccttcagaggctggtccttcaccagactcaaaaccaaggagactccctctttgggatcagggttcgatccctactttgtttactctggttctataccctacctggatggtaccttctaccttaaccacactttcaagaaagtctccatcatgtttgactcttcagtgagctggcctggtaatgacagattgctaagtccaaatgagttcgaaatcaagcgcacagttgatggggaaggctacaatgtggcccaatgtaacatgaccaaagactggttcctggtccagatgcttgccaactacaacattggataccagggcttctacgttcctgagggttacaaggatcgcatgtactccttcttcagaaacttccagcccatgagtagacaggtggttgatgagattaactacaaagactataaagctgtcgccgtaccctaccagcataataactctggctttgtgggttacatggctcctaccatgcgtcagggtcaagcgtaccctgctaactacccataccccctaattggaaccactgcagtaaccagtgtcacccagaaaaaattcctgtgcgacaggaccatgtggcgcatcccattctctagcaacttcatgtccatgggtgcccttacagacctgggacagaacttgctgtatgccaactcggcccatgcgctggacatgacttttgaggtggatcccatggatgagcccaccctgctttatcttcttttcgaagtcttcgacgtggtcagagtgcaccagccacaccgcggcgtcatcgaggccgtctacctgcgcacaccgttctcggccggcaacgccaccacataa

SEQ ID NO: 130 - protein, 323 aa, Human adenovirus
  REGION 1..323: note = misc_feature - Ad21 fiber; 1 - 323 (GenBank accession no. AAW33370); Human adenovirus 21
MTKRVRLSDSFNPVYPYEDESTSQHPFINPGFISPNGFTQSPDGVLTLNCLTPLTTTGGPLQLKVGGGLIVDDTDGTLQENIRATAPITKNNHSVELSIGNGLETQNNKLCAKLGNGLKFNNGDICIKDSINTLWTGIKPPPNCQIVENTDTNDGKLTLVLVKNGGLVNGYVSLVGVSDTVNQMFTQKSATIQLRLYFDSSGNLLTDESNLKIPLKNKSSTATSEAATSSKAFMPSTTAYPFNTTTRDSENYIHGICYYMTSYDRSLVPLNISIMLNSRTISSNVAYAIQFEWNLNAKESPESNIATLTTSPFFFSYIREDDN

SEQ ID NO: 131 - protein, 91 aa, Human adenovirus
  REGION 1..91: note = misc_feature - Ad21 fiber shaft; 43 - 133 (GenBank accession no. AAW33370); Human adenovirus 21
DGVLTLNCLTPLTTTGGPLQLKVGGGLIVDDTDGTLQENIRATAPITKNNHSVELSIGNGLETQNNKLCAKLGNGLKFNNGDICIKDSINT

SEQ ID NO: 132 - protein, 190 aa, Human adenovirus
  REGION 1..190: note = misc_feature - Ad21 fiber knob; 134 - 323 (GenBank accession no. AAW33370); Human adenovirus 21
LWTGIKPPPNCQIVENTDTNDGKLTLVLVKNGGLVNGYVSLVGVSDTVNQMFTQKSATIQLRLYFDSSGNLLTDESNLKIPLKNKSSTATSEAATSSKAFMPSTTAYPFNTTTRDSENYIHGICYYMTSYDRSLVPLNISIMLNSRTISSNVAYAIQFEWNLNAKESPESNIATLTTSPFFFSYIREDDN

SEQ ID NO: 133 - protein, 561 aa, Human adenovirus
  REGION 1..561: note = misc_feature - Ad21 penton; 1 - 561 (GenBank accession no. AAW33349); Human adenovirus 21
MMRRTVLGGAVVYPEGPPPSYESVMQQAAAATMQPPLEAPFVPPRYLAPTEGRNSIRYSELAPLYDTTRLYLVDNKSADIASLNYQNDHSNFLTTVVQNNDFTPTEASTQTINFDERSRWGGQLKTIMHTNMPNVNEYMFSNKFKARVMVSRKAPEGVTVDDNYDHKQDILEYEWFEFTLPEGNFSATMTIDLMNNAIIDNYLEVGRQNGVLESDIGVKFDTRNFRLGWDPETKLIMPGVYTYEAFHPDIVLLPGCGVDFTESRLSNLLGIRKRHPFQEGFKILYEDLEGGNIPALLDVEAYENSKKEQEAKTEAAKAAAIAKANIVVSDPVRVANAEEVRGDNYTASSVATDESLLAAVAETTETKLTIKPVEKDSKSRSYNVLEDKVNTAYRSWYLSYNYGDPEKGVRSWTLLTTSDVTCGAEQVYWSLPDMMQDPVTFRSTRQVSNYPVVGAELMPVFSKSFYNEQAVYSQQLRQSTSLTHVFNRFPENQILIRPPAPTITTVSENVPALTDHGTLPLRSSIRGVQRVTVTDARRRTCPYVYKALGIVAPRVLSSRTF

SEQ ID NO: 134 - protein, 949 aa, Human adenovirus
  REGION 1..949: note = misc_feature - Ad21 hexon; 1 - 949 (GenBank accession no. AAW33354); Human adenovirus 21
MATPSMLPQWAYMHIAGQDASEYLSPGLVQFARATDTYFNLGNKFRNPTVAPTHDVTTDRSQRLMLRFVPVDREDNTYAYKVRYTLAVGDNRVLDMASTFFDIRGVLDRGPSFKPYSGTAYNSLAPKGAPNTSQWIAEGVKKEDGGSDEEEEKNLTTYTFGNAPVKAEGGDITKDKGLPIGSEITDGEAKPIYADKLYQPEPQVGDETWTDTDGTTEKYGGRALKPETKMKPCYGSFAKPTNVKGGQAKQKTTEQPQNQQVEYDIDMNFFDEASQKANFSPKIVMYAENVDLETPDTHVVYKPGTSEESSHANLGQQSMPNRPNYIGFRDNFIGLMYYNSTGNMGVLAGQASQLNAVVDLQDRNTELSYQLLLDSLGDRTRYFSMWNQAVDSYDPDVRIIENHGVEDELPNYCFPLDGVGVPISSYKIIEPNGQGADWKEPDINGTSEIGQGNLFAMEINLQANLWRSFLYSNVALYLPDSYKYTPANVTLPTNTNTYDYMNGRVVPPSLVDTYVNIGARWSLDAMDNVNPFNHHRNAGLRYRSMLLGNGRYVPFHIQVPQKFFAVKNLLLLPGSYTYEWNFRKDVNMVLQSSLGNDLRVDGASISFTSINLYATFFPMAHNTASTLEAMLRNDTNDQSFNDYLSAANMLYPIPANATNVPISIPSRNWAAFRGWSFTRLKTKETPSLGSGFDPYFVYSGSIPYLDGTFYLNHTFKKVSIMFDSSVSWPGNDRLLSPNEFEIKRTVDGEGYNVAQCNMTKDWFLVQMLANYNIGYQGFYVPEGYKDRMYSFFRNFQPMSRQVVDEINYKDYKAVAVPYQHNNSGFVGYMAPTMRQGQAYPANYPYPLIGTTAVTSVTQKKFLCDRTMWRIPFSSNFMSMGALTDLGQNLLYANSAHALDMTFEVDPMDEPTLLYLLFEVFDVVRVHQPHRGVIEAVYLRTPFSAGNATT

SEQ ID NO: 135 - protein, 42 aa, Human adenovirus; identical to SEQ ID NO: 63
  REGION 1..42: note = misc_feature - Ad21 fiber tail; 1 - 42 (GenBank accession no. AAW33370); Human adenovirus 21

SEQ ID NO: 136 - DNA, 137 bp, Human adenovirus
  misc_feature 1..137: note = Ad34 5' (left) ITR; 1 -137
  source 1..137: mol_type = genomic DNA
catcatcaataatataccttatagatggaatggtgccaatatgtaaatgaggtgattttaaaaattgtggggtgtgtggtgattggctgtggggttaacggctaaacggggcggcgcggccgtgggaaaatgacgtt

SEQ ID NO: 137 - DNA, 137 bp, Human adenovirus
  misc_feature 1..137: note = Ad34 3' (right) ITR; 34639 - 34775
  source 1..137: mol_type = genomic DNA
aacgtcattttcccacggccgcgccgccccgtttagccgttaaccccacagccaatcaccacacaccccacaatttttaaaatcacctcatttacatattggcaccattccatctataaggtatattattgatgatg

SEQ ID NO: 138 - DNA, 342 bp, Human adenovirus
  misc_feature 1..342: note = Ad34 Packaging Sequence; 138 - 479
  source 1..342: mol_type = genomic DNA
ttgtgggggtggagtttttttgcaagttgtcgcgggaaatgtgacgcataaaaaggctttttttctcacggaactactgacttttcccacggtatttaacaggaaatgaggtagttttgaccggatgcaagtgaaaattgctgatttgcgcgcgaaaactgaatgaggaagtgtttttctgaataatgtggtatttatggcagggtggagtatttgttcagggccaggtagactttgacccattacgtggaggtttcgattaccgtgttttttacctgaatttccgcgtaccgtgtcaaagtcttctgtttttacgtaggtgtcagctgatcgctacggtat

SEQ ID NO: 139 - DNA, 3450 bp, Human adenovirus
  misc_feature 1..3450: note = Ad34 E1; 480 - 3929
  source 1..3450: mol_type = genomic DNA
ttatacctcagggtttgtgtcaagaggccactcttgagtgccagcgagaagagttttctcctctgcgccggcagtttaataataaaaaaatgagagatttgcgatttctgcctcaggaaataatttctgctgagactggaaatgaaatactggagcttgtggtgcacgccctgatgggagacgatccggagccacctgtgcagctttttgagcctcctacgcttcaggaactgtatgatttagaggtagagggatcggaggattctaatgaggaagctgtgaatggcttttttaccgattctatgcttttagctgctaatgaaggattagaattagatccgcctttggacactttcgatactccaggggtgattgtggaaagcggtacaggtgtaagaaaattacctgatttgggttccgtggactgtgatttgcactgctatgaagacgggtttcctccgagtgatgaggaggaccatgaaaaggagcagtctatgcagactgcagcgggtgagggagtgaaggctgccagtgttggttttcagttggattgcccggagcttcctggacatggctgtaagtcttgtgaatttcacaggaaaaatactggagtaaaggaactgttatgttcgctttgttatatgagagcgcactgccactttatttacagtaagtgtgtttaagttaaaatttaaaggaatatgctgtttttcacatgtatattgagtgggagttttgtgcttcttattataggtcctgtgtctgatgctgatgagtcaccatctcctgattctactacctcacctcctgagattcaagcacctgttcctgtggacgtgcgcaagcccattcctgtgaagcttaagcctgggaaacgtccagcagtggaaaaacttgaggacttgttacagggtggggacggacctttggacttgagtacacggaaacggccaagacaataagtgttccatatccgtgtttacttaaggtgacgtcaatatttgtgtgagagtgcaatgtaataaaaatatgttaactgttcactggtttttattgctttttgggcggggactcaggtatataagtagaagcagacctgtatggttagctcataggagctggctttcatccatggaggtttgggccattttggaagaccttagaaagactaggcaactgttagaggacgcttcggacggagtctccggtttttggagattctggttcgctagtgaattagctagggtagtttttaggataaaacaggactataaagaagaatttgaaaagttgttggtagattgcccaggactttttgaagctcttaatttgggccatcaagttcactttaaagaaaaagttttatcagttttagacttttcaaccccaggtagaactgccgctgctgtggcttttcttacttttatattagataaatggatcccgcagactcatttcagcaggggatacgttttggatttcgtagccacagcattgtggagaacatggaaggttcgcaagatgaggacaatcttaggttactggccagtgcagcctttgggtgtagcgggaatcctgaggcatccaccggtcatgccagcggttctggaggaggaacagcaagaggacaacccgagagccggcctggaccctccagtggaggaggcggagtagctgacttgtctcctgaactgcaacgggtgcttactggatctacgtccactggacgggataggggcgttaagagggagagggcatctagtggtactgatgctagatctgagttggctttaagtttaatgagtcgcagacgtcctgaaaccatttggtggcatgaggtccagaaagagggaagggatgaagtttctgtattgcaggagaaatattcactggaacaggtgaaaacatgttggttggagcctgaggatgattgggaggtggccattaaaaattatgccaagatagctttgaggcctgataaacagtataagattactagacggattaatatccggaatgcttgttacatatctggaaatggggctgaggtggtaatagatactcaagacaaggcagttattagatgctgcatgatggatatgtggcctggagtagtcggtatggaagcagtaacttttgtaaatgttaagtttaggggagatggttataatggaatagtgtttatggccaataccaaacttatattgcatggttgtagcttttttggtttcaacaatacctgtgtagatgcctggggacaggttagtgtacggggatgtagtttctatgcgtgttggattgccacagctggcagaaccaagagtcaattgtctctgaagaaatgcatattccaaagatgtaacctgggcattctgaatgaaggcgaagcaagggtccgccactgcgcttctacagatactggatgttttattttaattaagggcaatgccagcgtaaagcataacatgatttgcggtgcttccgatgagaggccttatcaaatgctcacttgtgccggtgggcattgtaatatgctggctactgtgcatattgtttcccatcaacgcaaaaaatggcctgtttttgatcacaatgtgttgaccaagtgtaccatgcatgcaggtgggcgtagaggaatgtttatgccttaccagtgtaacatgaatcatgtgaaagtgttgttggaaccagatgccttttccagaatgagcctaacaggaatctttgacatgaacatgcaaatctggaagatcctgaggtatgatgatacgagatcgagggtgcgcgcatgcgaatgcggaggcaagcatgccaggttccagccggtgtgtgtagatgtgactgaagatctgagaccggatcatttggttattgcccgcactggagcagagttcggatccagtggagaagaaactgactaaggtgagtattgggaaaacttggggtggggttttcagatggacagattgagtaaaaatttgttttttctgtctttcagctgtcatgagtggaaacgcttcttttaaggggggagtcttcagcccttatctgacagggcgtctcccatcctgggcaggagttcgtcagaatgttatgggatctactgtggatggaagacccgtccaacccgccaattcttcaacgctgacctatgctactttaagttcttcacctttggacgcagctgcagccgccgccgccgcctctgttgccgctaacactgtgcttggaatgggttactatggaagtatcgtggctaattccacttcctctaataacccttctaccctgactcaggacaagttacttgtccttttggcccagctggaggctttgacccaacgtctgggtgaactttatcagcaggtggccgagttgcgagtacaaactgagtctgctgtcggcacggcaaagtctaaataaaaaaaaattccacaatcaatgaataaa

SEQ ID NO: 140 - DNA, 19455 bp, Human adenovirus
  misc_feature 1..19455: note = Ad34 E2; 23399 - 3945
  source 1..19455: mol_type = genomic DNA
atggccagccgcgaaggaaatcagttaagcgaccgccacagggagcacacccccgaacgcggaaggggttctgccagtcatccgccttccaggtcggaccgcagcccttcgcaatcgcctccacctctgcccccgaagagaaacacctgtcgccgtgtggggtcaggttcttctaccgacagtcagttggtaatggtgagcgaaacgtcacaatcctccctgtctccggaacggagcgacagtcctcctcctccgatacccccgaaaaagaagccaaggaagaccaaacatgtccccatgcaagacatcagtcaagacagcgaagaagaaagagaagaggcgcaacttgtagcagtgggtttcagctacccgcccgtgcgcatcgttgagaaggatggcaaaagaagcattgagaagatcgccaaagatgaccctctggctaaaggagctgctgcctgcactgttaagaatccgattagcttgcccctggtgtctgcttgggagaaaggcatggaagtgatgtgtctgctgatggagaagtacaggctggataacgaacttagaacctcttttaaactaatgcctgagcagcacgaacaatacaagcgcatctgtcaccagtacgtgaacgaggagcaccgaggcatccagttaactttcactagtcacaagacactgagcacgatgatgggaagatttctgcagggaatgatacattctttttctcagatcgcccaccataattgggaatgtacaggctgtgcgttgtggcctcatggctgcaatgattatgagggcaagctgaagtgcttgcatggcaatattatgattcagaaggagcagattatcgagatggatgtggccagcgagaacggacaacgagccttgaaggagaatcccgagcgaaccaaaatcacccaaaaccgctggggcagaagtgtggtgcaaatagccaacaatgacgcccgctgctgtgtgaatgatgccggctgcgcagctaaccagttttcgagcaggtcctgcgggatgttttataccgagggtagtaaagcccagcaggctttcaagcaatatgatgctttcatgagagccgtgtatccaggaatcagacaggatcaggccaagatgatactgatccccctgcactgcgattgtaaccacaagcctaattgggtgcccgccatgggtaggcagacctgcaagatgaccccgttcagcattgccaatgctgaagatctggatgtgggcatgattgcagatcccaccgtgctggcaagcgtaagacatccgtcgctgatggtgtttcagtgctgcaatccggtgtaccgcaactctcgcgctcagagcactggtcctaattgtgatttcaagatttcggctcctgacctgctgggagctttgcagctgaccagaaagctgtggagtgacatcctgcccgatataccggttcccaagttggtgattcccgaattcaagtggcaacccaagtatcagttccgcaacgtatcactgcctgcgggtcattctgattctcgtcagaacccattcgacttgtaaataaataagtaatccagagcctcgatacatgtaaaaaataaagtgctgtttattgaacacgttgtttacatgaatcattattgcacatccatacggtcgaacgcagtggccctttcgatgtgtgtacgatgagagcgaaaataaggcgaatgggtattgagaaaatggtagagtgctttttgattgtcacacagggtgggctggactttaggagaatgaagcatgttgtttggcactccagttagcaatttcatggtggggtttccgtccatgggacggtcaggccagtgcacaaaggcatgaaggaacatgcagcagaaaagtccgcaggcggcagaacgggggccctgcacggtctgggtagatttttccagcgtaatacaccggtccttggtagcaagagcgctgcggcgcaggagaccctcatattcaaactggtaaatctgtttgagacgatcatccgagaatccaaaaggatcaaaaaggtagcaggtgttagaacgtgggttccaaccgaaagccaaccagtgctctccccccgtctcacgtccggccgtatttacaatggcacaggcgagcttatcgggggccatgaaccccgggaagcgcttatcaaaggttcccaaaaaatatggtccgcaacccaggtcttggacaatggctctgagctcttgctcgctggagccgttttgggatccgcaggccatggttgcagctgctgtttgcaagaagcaagaagcttcttacgtggtagcgttaccggccgagaacggtgtacgcaggtagactgcctcgatgatgccgcggtgtggctgatgcactctgaccacgtcgaaaacttcgaagagaagataaagcagggtgggctcatccatgggatccacctcaaaggtcatgtccagagcatgagctgagttggcatagagcatgttctgtcccaagtctgtaagggctcccatagacatgaagttgcttgagaacggtatgcgccacatggttctgtcacacaagaactttttctgcgtaacactatttacggcagttgttccaatgagtggatagggatagttagcgggatagggttgaccttgacgcatggtcggagccatgtaacccacaaagccagagttgttgtgttggtagggtatggcgacggccttgaagtctttgtaattgacctcatcaaccacctgcctgctcatgggctggaagtttctgaaaaatgaatacatgcgatctttgtatccttctggaatgtagaagccctgatagccgatgttgtagttggcgagcatctgtaccaagaaccagtctttggtcatgttgcattgggctacgttgtagccttcgccatccacagtgcgctttatttcaaattcgttaggagatagtaacctgtcatttccaggccagctcactgaagagtcaaacatgatggaaaccttcttaaaagtgtggttcaggtagaaggtaccatccaggtagggaatagaaccagaatagacgaagtaggggtcaaatccagaccccaaagagggagtttctttggttttcagtctggtaaatgaccagcctctgaaagccgcccagttgcgagaaggaatggaaatgggaatattggttgcattggcaggaatggggtagagcatgttagctgcagataggtagtcgttgaatgactgatcattggtgtcattccgcagcatggcttcaagggtggaagcggtgttgtgagccatggggaaaaaagtagcatagaggttgatgctcgtaaaactgatgctggcgccatctacccgtaggtcgttaccgagggaactctgtagaaccatgtttacatccttcctaaagttccactcataagtgtaggagcctgggagaagcagcaggtttttaacagcgaagaatttttgaggcacttgtatgtggaaaggcacataacgtccgttacccagaagcatggatcggtaacgcaagccagcgttacggtggtggttgaatgggttgacattgtccatggcatccagagaccacctggcaccaatgttcacataggtgtctactagagatggcggcaccacccgcccgttcatgtagtcgtaggtgtttttgttttctggaagagtgacattggacggggtgtatttgtacgagtctgggagatatagagccacattggaataaaggaaacttcgccatagattggcttgaaggttaatttccatggcaaatggatttcccttagcaagttcactgctgccagttgggtctacatttgtccaagtagattggtctccatttggcttaatctccttgtaactatctgttcgcggaccgacaccatccaacggaaaacaatagttgggaagttcatcttccacaccatgattttcaataacacgtacatcaggatcataactgtccacagcctgattccacatgctaaagtatctggttctgtcgcccagagagtcaagcaagagttggtaagacagttctgtgtttctgtcctgcaagtcaaccactgcattcaactgagacgcttggccagccagtacccccatgttgccagtactgttatagtacataagtccgatgaagttatctctgaagccaatgtagttgggtctgttgggcatagactgttgtccaagattggtctcagaactagcatctgaaactccaggtttgtacacaacatgagtatctggacattccaggtccacattttctgcatacattacaattttaggtttgagttctgatctttgtgatcttaagtcaaagaagttcatgtcaatgtcatactcgatgttgttagtgccatcgtcttcttttggttttacctttgcctgacctcctttaatattagtaggtttagcaaaagatccgtagcagggtttcattttagtttcaggtttaagaaccctccctccatactcttcggtttttccgtctaggtcagtccaagtttcgtctcccacttgaggttctggctgataaagcttatcagcatagattggtttaggaccttcagttgaaacttccaagcccaccggcaatccgtcttttgtgatttcagcctcggcttttactggagcattaccaaaagtgtatgttgcttttttggcttcttccccatcatcagtattgccgtcgtccactaggccagtgcttgtaactcccttatccaaccactgagatgcatttggagcgcctttaggagccagggagttgtaagccgtaccagaatagggtttaaaactgggacctctgtccaacacgcccctaatgtcaaagaacgtgctggccatatccagcactctgttgtcgcccacggccagggtgtaccgcactttgtaagagtatgtattgtcctcccggtcaacgggcacgaagcgcaacatgagccgctggctacgatcggtggtcacatcgtgggtcggcgctacggtaggatttctaaacttatttcccagattgaagtaggtgtctgtggcgcgggcgaactgcaccagacccggactcaggtactccgaagcatcctgtccggcgatgtgcatgtatgcccattggggcagcatcgatggggtggccatcttgaaagtaactcagcgtcgacgcacgacctcttccttttttcctctgatgctgtgacggcgtgtaatgacacatatacacagataggcaagttaagcgctactccatatttaattaaaagcagcgacggcgttttacactttgcacgcctagacccacgatgctgttcagagtattttgccagtgtgcatttggacgaggagcgcccccgggacgtgacctggctacggcgactggtttcggggcagcgacaggcttagaagcgggtacagcagtagcagcaggaggagggggcaaatccaaggtgacgggtcgatgcaactgagaaggtttcatcaccccggtggccataggggctatcggtctagtggtgggcattccaagcttcgttgcttcctcataagaaggcggttcatctacgcgcgtcaccagcgtctcttccaaatcgggacgcggacgcttgtcgcctcgtttttctggcggaggaatttcttcctccacttgcatttcacctggggttgctggcggcgggtccaaacgactgtttatctttttctgcacagcctggttagccaaatctaccactccattgataccggaagctatcccatcgactactttttgttggaagttctggtctttaagtttatttctaagcgcctgtcctgtactgctgttccaagctttgttcccgtatgtttttatggttgagccaaaatttttaagcccgctccagatactgctccaattgaaggcgcccccgttcagttggctcgtgccgatgtcgctccaggtgcccatgtacggcttcgtgccgtgtcgcggagccaaggatgaaaaattgatgtcttccatctctaagaaaacatagtcacagtaccaggagtgtcagagtccattgtattttttatttatacgttttttttttttccaatgtcaatgtcgttgcgaggcctgaaccgccacggaagctatgcctggtattgcgccaatcgcagcagcgataattggaattaaggctggcaaaaaaccaccccgcaattgcttgcggatagcacgccgtcgcctgtagcgtcgcattccgcgccccaacatccctcttctacggcgcgagtttcttcctcggtaaccagtgatgggaacgcgaaggcgacaagtgagggccatatctgcaaggaggcagcggcaacattgattaagtgatgatactaggatggtaacgcgcacgcggcagtgtcaaaggttccgcactaccattgcggtacacttgccgcaccagggcgccgggaatcggtttgcttgtgcgtctacggcgacgactgcgatttgcaggtgtcttgcggcgacggcgggaagtactgtttcggctgcgatagtagcgagtgcctcggtaaccaggagtaggaataatagatgggtgtacgacatagttgggcatcaacagacttgctggaccgtactttcgtcgggatcttcgagtgggaccgacggcgtcagttgtaataggcatgggcatccatgggtccgtttgcacttcagtggaggtggcagtaggctttgcgggttcagtttgcacttccatactttcagtgggaattttaatgtctacagtttgtactcccagaccaggcgctacctgcttaatgggtctcactttaacctcaggttgaatatctggatccacttttactttctccaaaacgtcctccaacttctggcgtttgggcaccatcagttgcatagtgggatacaaatcttcaccttcgcgtttaacacctgttcgcggagttacgggtaacacttgctgcaaagtgaccggtttaagactaggggtgggatttccatgatccaagggtatggacactgtttcatccttgggatttattctactacgcttgccataagcaaactcgcctaatcggtcagctgcctgctcaagaatatcatcatccccgtacacctcatcataggaacgcttaaaagtagcgcttgaacgctcgccgggtgtaaagaccaccgaagttccaggtctcaacacatgtcgaactttgcgcccacgccattgcacgcgtcgccgtggggcaaactcgcgcacaaactccgccagcccatcatcgccatcttcctcttcttttttgtccttttttacccgcttgattttgcggggttttttttcatccttcaacggttggccgtagacttcaggtgcgataacctgcagcatttcttccttgtatttgcgcttggacatcctcgccgctgggacacaacatcggagactgctcagtatcttctaagtgcgagggggacgggtgcgcacgggtacacgttgaccggtggcagcgtcacgcacccagtatacattgcctcttcgcgattgggccatgtcggcaatagtcgccgctgcgacagcggctgcttgcctgcgggacctgccggcgctggcgcccgaagctgcacgtctggccgccctaagcatggctcttcgccccacgcgtctagctcttcgtagcagagctcttgctgctcgcatggcagtggtagctcggtgacgtctggcaatgcgccttcgccggctcttacgtcgagcatagttgcgagcgtcagccactacactgtcaataactgcgtccacagtagatgtaggcgcagtaggagtataattacgggcgtcggcaaccacctgatcgattacatcatcgacggtggttcgaacgcgagtgcggcccttgagggcaccccatggagcgcgaaaatgcccgcgaacacgcacgggatgttgggtagaacgtttgcgtgcgcctccgtacatcttgctgggagcgcgcagaccccaaccggtgttattactgggcgagataagaacggacattttttttttttttttagaaagtgcggcttgaaaggacgcgcggtgcgactatgcccagtgccttgtacacgtagggacaggtgcggcgtctggcgtcagtaacggtcacacgttggactccccggatactgctgcgcaacggcagggtcccgtgatctgtgagagcaggaacgttttcactgacggtggtaattgtgggcgccggcggacggattaaaatctggttctcaggaaagcggttgaagacgtgcgtaagcgaggtggactggcggagctgctgggagtacacagcttgttcgttgtagaagctctttgaaaagacgggcataagctctgcacccaccacagggtagttactgacttgtctagtggagcggaaagtgacaggatcctgcatcatgtctggaagcgaccagtagacctgctccgctccgcaggtgacatctgaggtggtgagcaatgtccaggaacgcactcctttttcggggtcgccataattgtacgaaaggtaccaactgcgataggccgtgttgattttatcttccaacacattgtaacttctgtttttgccatctttttccacaggcttaatagtgagttttaactctatgttttgagacacatcatccaataatgattctttagtcggaacggatgttgcggcaaaactgtctcccctgatttcactagcgttagccacccttaccggatcgttggcaactatgtttgctttagcttctgcagcagcttctattttggctttttgatctttcttgctgttctcataagcatctacatccaaaagggctggaatatttcctccttctaaatcctcatacaagatcttaaaaccctcttggaatgggtgtttctttctaatgccaagaaggttgctcagacggctttcggtaaagtccactccgcagccaggcagcaatacgatgtcaggatggaaggcctcataggtgtaaaccccaggcatgatcaacttagtttctggatcccatcccaacttgaagttcctagtgtcgaacttaacaccaatgtcactttccaacactccattctgtctgcccactttcaagtaattgtctatgatggcattgttcatcaagtcgatagtcatagtgaccgaaaagttgccttctggcaaagtaaactcgaaccactcgtattttagaatatcttgcttatgatcataattatcgtctactctaacaccctcaggaggttttctggacaccatcacacgcgctttgaacttgttactaaacatatactcgttcacgttgggcatgttagtatgcatgatggtttttagctgaccgccccaccgcgatcgttcatcaaagttaatggtctgggtgctggcttccgtaggggtaaagtcattgttttgcaccaccgtggtcaagaagttgctgtggtcattctgatagttcagagaagcaatgtccgccgacttgttgtccaccagatacaacctggtggtatcgtactgaggtgccagttccgagtaacgaatgctgtttctgccctccgtaggtgccaggtatcgcggaggcacaaagggagcctccagtggggattgcatcaccgccgtcgcctgctgctgctgcatcacgctctcgtacgaaggaggaggaccctccggatacaccaccgctccgcctagcacgactcgcctcattatactagacacagataataaagaagaacgaacgtacgctcgtcgccatggccttggtgagttttttcttttttatttttttttacaacataccacccaagcgagggcgcaaatgagcaaacgggttgccccttcctctcccacccaagtccaatacgctgctatcatcggccgaatcctcatcgtcccacacaagacccctctgtctgtcatggcgctggcgtctacggctcgctctacttgtagtccccatgatcccaggctcgtctctgtgatcctgagcataagtcttccatctactcattttatccaccaaactttctattccattgtttgggaaatttttttctcttgccggtctgagcaaggaatcgtttaggtactcctcttcgcccattaaactcgggcgacttattctacccacttcgctgctacgtacactgtgtagagaaaagggtagactaggaaaaggacttgcagactcgggctcagccgcggtagcaccaatgaccccggacagcgatgcagaagaatgcattctatcgccgccttcctttttccacgtgcgatgatcagaaagaggtgaaaaaacatcgctgtccacgtcgtcccacagaaatccgtcattagggtcgggcatgtcatattcgcccgtgtagaaaccaggtgggggcagccagtgcgggtttaagatggcattggtgaaataatcagagttcatagcggcagctctgtgcaagtagtccagcagtttgttaatgaaaggtcggttactggcatacatgctgggctccatatttcgcgctgtcatgtccagtgctgcagtcggagttgccccctcttgcatcagaaacaatcccacgctctgctgcacatatctaaggatcctctcctcctccgcagtaagagcatattgaggagggatcttttgagaccgattggtaagcaagaagttcagagtggcttccaaactgccagtgtcttcctgtcccaaagcgcgactgacttgggtaatttcttgataggtctgctcgtccacctgactttgccctatggcttcgcgatacaggtttagtaggtaacccaaataggaattacggtcgatgctaccgctgtcggtgaaaggagctaccaacagtaataataggcgggagttcggagttaacaagctagacacggttgctctttctcctaccggggcatgcactccccacaaacctttaaggtttttaaaagcttggctcagatttaccgtctgcaagccctgtctgctagtctgaaagaagtaatcaggaccggactgatatacttcgctctgaggtacttctgataccatcagtctcaaagcacttaaaaagttagtataatcctgttgaccacgcggcacattagcaggctgagtactcaagaaagcatttaacgccaccagcgaacccaggttggcatcgcgctggaacctttcgcgctgagacacggcttcgcgtacatctgttatcatacggtccaaattggtttgcacattgctactgttgtagcgagccacgcgttctaagagagcgttgtataccagtccggcctcatctggacgaatagctttgttctccaccaacgcgttcacgatggccaggaccttctcatgagtgggattagagcgggaaggcactacagcttccatgatggccgatagacggttggcctggggttgctgtctaaaggcttcggggttgcgagtcgtcaacgccatgatacgttgcatggcctgggtccaatcgtccgaggagttaatgccggacggctggctctgcagcgccgcccgcattgcgggatccggtgcttgctgttccatctagcaaaaaacacgggttgtgccatcagtcttccaagtactcgccctcttcctcctcgccttcatccgcctcttctatgtaaggaagctcacatcctgccgtcgcggcgttcagagccctgcgactaggctgccactgcaagtcagctcccatatcaaagtaattctcaccctcggttccagctccagttagagctctttgcaaactgtgcatcagttccctgtcgcttaactcgcgcctcctgctggcgctcaccgcgcgatgcattctgtcattgcggtacaccccaagatcatcgctcagggtcaacaccttcagcgtcatgcgcatgtagaacccatctatcttcacctccttgtctatgggaacgtatggagtcttgtagatcttgcgagcgtaatactttcccaagctcaaaaccgagtaattgatggcagccaccttctcggccaggcccaggctccgctcctgcactatgatactctgtagaatgttgataagatcatacaaccatctcccctcgggttcggtgatgttgagcagcgcctctctgaaagcctcattgtctctgctgtgttgcaccaccagaaacagctgtgcggtcagaggtttgctagtagggttctgaatgatagcttccatcaaatcccacaaatgcatcaaaccaagggtgacttcttcgcgggcaatgagggttcgcacatgattattaaaagacttttggaaattacgctcttcctttactgtctgttcgtaagccgatacaaggttggctgcagccacgtgtgccctggcaggactgatccctgtcacttcatcaacttcgaaatcctcgtcccgcaacactcgtcttctgtccaaaccgtgacgcagctcacgacccgcgttaaagcgggaagctcgcatctcctccggctcctcgccgcttctgtctctaaataggttctgttggggcacatacgcctcgcgagaatcttttttcagttgaactcgcggatgccgctcgggcgaaggcgcacctagacgtgccagtccttcgccctcttccaagtccagatcataggcgggctgtcccgcaccgctcacagcggcagttgcagtagttgcagggacagccttttgtggttgctgctgctgcgaggggggctgttgttggggacgcatctgtcgcagcacgggatgcatctgagcggcaaaaaaaaaaaataggactcacttccctgccattcggcaaccagcaaaacgactcgattccgtatcctggatttttgtaggctgggtcgagacgggagtgccaataccacgttagccgcggctccggccggctcgagtacaagtctcgaaccggggtacaccgcgacccaacccgttcacgttcctccaggctacggagtcgagtcgctgaacgctttcattttctccgtgtctatagagcatcaatgactgcgcgcgcctcactggtcaaaccgtgcctacaatgaactacttcatgccgctacgcaacatttggaaccgcgtacgcgagtttcctcgggcttctactaccgccgcaggaatcacctggatgtccaggtacatctacggctatcaccgccttatgttggaagacctcgcccccggcgctccagctacagaacgatggcctctctaccgccaaccaccgccgcattttcttataggttaccagtatctggtgcgcacctgcaacgattacatctttgacacccgcgcctattcgcgccttaaatacaccgagctcgtgcgccctggtcaccagacagttaactggtcagtcatggccaactgtgcttacaccattaataccggggcttaccaccgctttgtggattttgatgactttcaagccaccctcacccaagtacagcaagccatcctcgccgaaagagtcgtagctgacttggcactggtacaaccaatgcgcgggtttggactcacacgtatgcatggcagaacgggtgaggaagaagtgcccgtagaacggctcatgcaagactactacaaagatcttgctagatgtcaggataatgcttggggaatggccaatcgcctgcgtatccagcaagccggacccaaagacctggtgctcctcgccaccatccgccgtcttagaactgcctactttaatttcatcaccagcagcatcgtctcaccttcccgagatgaagaagaaacagaagacccagaccgaacacataaccacccccgcccacaagaagccgtactcagcctaccttgtgactgtgactggttagacgctttcgtcgaaaggttttcagatcccgtggatcttgacacgatcagatctctgcgcgcagtccctacgggccaattaataaaatgtataatcagcgccctctccctcccaaacggagaacctcccagtcaccactttaaggagatgcgcggcggtgtttttactctgcgaccgcgcgagaacggccgcgccgtcactgaaaccatgcgccgccgccgcggagaggtcattgaacgattcatcgaccgtttgcccgtgcgccgtcgacgtcgccgtgtgccccctccgcccccgcctgaagacgaagaagagatgttagtggaagaagagatagaagaggaagaagagatcccgggagccttcgaacgcgaagtacgggccaccatagccgaactcatccgtcttctcgaggaggaattgaccgtgtccgcgcgaaactcccagttttttaattttgccgtggacttctacgaggccatggagcgcttggaagctctgggcgatgtcagcgaaatgccgctgagacgatggatcatgtatttcttcgtcgccgaacacattgccaccacactcaactacctttttcagcgcctatgcaactatgcggtcttcaccagacacgtggagcttaacctcgctcaggtggtgatgcgcgcaagagactccgagggggccgtggtttacagccgcgtctggaacgaggcgggcatgactgcattctcccaactcatgggccgtatctccaatgacctcgcggccaccgtcgagagagcgggtcgcggagatcttcaggaggaagaaatcgagcagttcatggcggagatcgcctaccaggacaactctggtgacgtacaagaaatactgagacaagctgccgttaacgataccgaaattgattctgttgaactctctttcaggttcaagctcacggggccggtagctttcacccagagacgtcagatacaagacgtcaatcgacgcgtggtggcgcacgcaagtcttctcagagcgcagtaccagaacctgcccgtgcgcggcgccgacgtgccactaccagccatgcctccgggtccggaacaaccgcttccgcccggcgcgcgtccccgtcatcgcttctgagcatgcaagaagcaagagagccaccaccgatcaaaagaaaaaacaaaggtacggtagtggcgcccaaaggacacggaaccctgcaagccattgacatctctacaaacgaacctgtggaaatcaagtaccatctgaacctcccgcacgccctggaaaagatcatgcaagttaatcttctgtccctacctactaacctgagtccgcagcgtctcaggactctggacagctccagcctgcgcgctctggtccttcagctccgcccctcccgcgccgaggtctggacttgcctcccgcgggggctcgtcagcatgaccaccaccgaaacagaagatgaacaggccgatacagcgaatatagaagagcacgagatacaatcgccaggcctcggcttcccactgaaatttctcgtcaagggaagccaggtacagctcattcacgagatacaacccgtgcaacgctgcgactactgcggccgtctgtacaagcacaaacacgaatgctcggcgcgccgcagaaacttctacttccatcacatcaacagccaatcctccaactggtggcaggaaatccagttcttcccgatcggctctcatcctcgcacagaaagactcttcctgacctacgatgtggaaacttacacctggatggggtcctttggcaaacaactagttcctttcatgctggtcatgaaactctcaggagaagagcgtctcgtcaacatggcccacgatctagccattaaactaaagtgggatcgatggcaacaagaccccagaaccttctactgtgtcactccagaaaaaatggcaattggccagcattttcgtcagtatcgggaccagttacaaacagcactggcggtggatctttggtcatcattcctacatgcaaatcctcacctgcacgaatgggctctcgaacactacgccttatctgaccctacagacctaacctttgatgagctcaataagctacctcacgtcaaaggcacgccgcgtttcatagaattatacatcgtaggacacaacatcaacggtttcgacgagatcgtcctagctgcccaggtgatcaacaatcgagcggaagtaccacagcctttccgcatcactcgcaattttatgcccagagccggtaagattctcttcaacgatgttactttcgctttgcccaaccccgcctacaagaaacgggtagacttccaactctgggaacagggagcctgtgacgacatggacttcaaataccaatttctcaaagtcatggtcagagacaccttcgcccttactcacgcttcgctgcgaaaagctgctcaagcatactctctacccgtagagaagggctgctgcccttacaaggcagttaatcagttctacatgctaggatcttaccgtgcagacaaagacgggtttccgctagaagagtactggaaggatcgcgaagaataccttctcaaccgcgaactgtgggaaaagaaaaaccaaccaggttatgacatcattcaagaaacacttgactactgcgccctagacgtacttgtcaccgccgaactggtaaccaagcttcaagaatcttatgcccactttgtcagagactctgtaggtctacctcatgcccatttcaacatttttcaaagacccaccatctcttccaattctcacgccatctttcgccagattgtctacagaacagaaaaacccaatcgcaccaacttgggtccggggttgctagcgccatcacatgaactatatgactatgtgcgagcaagtatcagaggggggcgatgctatccaacctatataggcatctttgaggatcccatctacgtctatgacatctgtggcatgtatgcctctgcactcacccatcccatgccctggggcagtccccttaacccatatgagcgtgcactggcagctcgagaatggcaaatggccttagatgaccccactcccatcagctattttgataaggatttacttccgggaatctttaccatggatgcagaccctcccgatgaacttatgctagacccacttccccctttctgttctaggaaaggaggtaggctctgttggaccaacgaaccccttcgaggcgaggtggccaccagtgtggatttaattaccttgcataatcgagggtggcaagtgagaatcgtgccagatgaattgacaactatcttccccgaatggaagtgcctagcacgcgagtatgtccaactcaacatcgctgccaaagagcgcgcggacaaggaaaagaaccaaaccatgcgatccattgccaaacttttatccaacgccctgtatggatcatttgccaccaaacttgacaataaaaaaattgtgttttctgaccaaatggacgaaaacctcatgaaaggcatctcaaccggcactgtcaatatcaaatcctcctcgttcttagaaactgacaacctgagtgcagaggtcatgcccgccttcgagagggaatacctaccccaacagctgacgttcctggacagcgatccggaagacagtgaggaagagcaaagaaccgcccccttttatacccccccagcggggaccccaggtcacgtgaaatacacctacaagccaatcacattcctggatgttgaagagggtgacatgtgtttgcatactttggaaaaggtggaccccctggttgacaacgatcgctacccctcccacatagcctcctttgtgctggcctggacgcgcgcctttgtatcagagtggtcagagttcctgtacgaagaagaccgaggcactccactggagaagaggcctgtaaaatcagtctacggggatacggacagcctgtttgtcactcaacgaggacacgaactcatggagaccaaaggtaagaaacgcatcaaaaaatatggcggaaaacttgtttttgaccccaatgaaccggatttaacctggctggtggaatgtgaaactgtttgcgcctcctgcggcgcagatgcatactccccagaatccattttccttgcgcccaagctgtatgcgctgaaatgcctatactgcccggtatgcaagaaaacttccaaaggtaagctccgcgccaaaggccacgcagccgaggcgctcaactacgaactcatggtaaactgctacttggccgacatacagggcgccaagcgacagaagttctccaccagcagaatgagtctgaagcgcaccctggcaagcgcccaagcaggcgcacaccccttcactgtgacggaaacaaccctgactcgaacactgagaccctggaaggaccgaaccctggcagcgctggacgcccatcgtctcataccctactccaggagccgtccaaacccgcgaaacgaggaggtctgctggatcgagatgccatagaacacatcactgaactgtggaacagactagaacttttgcagcaaactctctccaaaatgcccatggctgacggtctaaaaccgctgaaaaacttttcctcactacaagaacttctatcactaggaggagagcgcctcctaatggatttggtgcgggaaaatatgcatgtaagggaaatgatgaacgaggtggcccccttgcttcgagaagacggcagttgccgttccctaaactaccacctgcaacctgtaatcggaatcatttatggccccaccggatgtggcaaatctcaattgctcagaaacttgctatcatcccaactaatcacccccgccccagaaacggtgttcttcatagccccccaggtggacatgattccaccatcggaactgaaagcttgggaaatgcaaatctgtgaggggaactatgctccggggcccgaaggaacattcataccccaatcgggtactctccgccccaaattcattaaaatggcttatgatgatttaactcaggaacataactatgatgtgtcagacccacggaacgtgtttgcccgcgctgctgcccacggccccattgctattatcatggatgagtgcatggaaaatctcggaggacacaagggtgtctccaaatttttccacgcttttccatccaagctacacgataaatttcctaaatgtaccggatacaccgtcttggtggtccttcataacatgaacccaagacgagatcttggcggcaatattgccaacttaaaaatccaatccaaaatgcacataatttcaccccgaatgcacccctcccagctcaaccggtttgtaaacacctacaccaagggcttatctgtggcaatcagcctacttctaaaagatattgtgcaacaccatgcactgcgaccttgttatgactgggtgatttacaacactaccccggagcatgaatcccttcaatggagctatctccaccccaaagatggcctaatgcccatgtatctaaacattcaatcccacctctataggattctggaaaaaatccaccgtgttctcaatgatcgagatcggtggtctagggcataccgtgcgcgaaaaatgaaataaaaacacttgattttaaatcaa

SEQ ID NO: 141 - DNA, 3441 bp, Human adenovirus
  misc_feature 1..3441: note = Ad34 E3; 27185 - 30625
  source 1..3441: mol_type = genomic DNA
atgtctggtgacgcggctgagctatctcggctgcgacatctagaccactgccgccgctttcgctgctttgcccgggaactcattgagttcatctacttcgaactccccaaggatcaccctcaaggtccggcccacggagtgcggattactatcgaaggcaaaatacactctcgcctgcaacgaattttctcccagcggcccgtgctgatcgagcgagaccagggaaacaccacggtttccatctactgcatttgtaatcaccccggattgcatgaaagcctttgctgtcttatgtgtactgagtttaataaaaactgaattaagactctcctacggactgccgcttcttcaacccggattttacaaccagaagaacgaaacttttcctgtcgtccaggactctgttaacttcacctttcctactcacaaactagaagctcaacgactacaccgcttttccagaagcattttccctactaatactactttcaaaaccggaggtgagctccaaggtcttcctacagaaaacccttgggtggaagcgggccttgtagtgctaggaattcttgcgggtgggcttgtgattattctttgctacctatacacaccttgcttcactttcctagtggtgttgtggtattggtttaaaaaatggggcccatactagtcttgcttgttttactttcgcttttggaaccgggttctgccaattacgatccatgtctagacttcgacccagaaaactgcacacttacttttgcacccgacacaagccgcatctgtggagttcttattaagtgcggatgggaatgcaggtccgttgaaattacacacaataacaaaacctggaacaataccttatccaccacatgggagccaggagttcccgagtggtacactgtctctgtccgaggtcctgacggttccatccgcattagtaacaacactttcattttttctgaaatgtgcgatctggccatgttcatgagcaaacagtattctctatggcctcctagcaaggacaacatcgtaacgttctccattgcttattgcttgtgcgcttgccttcttactgctttactgtgcgtatgcatacacctgcttgtaaccactcgcatcaaaaacgccaataacaaagaaaaaatgccttaacctctttctgtttacagacatggcttctcttacatctctcatatttgtcagcattgtcactgccgctcacggacaaacagtcgtctctatccctctaggacataattacactctcataggacccccaatcacttcagaggtcatctggaccaaactgggaagcgttgattactttgatataatctgcaacaaaacaaaaccaataatagtaacttgcaacatacaaaatcttacattgattaatgttagcaaagtttacagcggttactattatggttatgacagatacagtagtcaatatagaaattacttggttcgtgttacccagttaaaaaccacgaaaatgccaaatatggcaaagattcgatccgatgacaattctctagaaacttttacatctcccaccacacccgacgaaaaaaacatcccagattcaatgattgcaattgttgcagcggtggcagtggtgatggcactaataataatatgcatgcttttatatgcttgtcgctacaaaaagtttcatcctaaaaaacaagatctcctactaaggcttaacatttaatttctttttatacagccatggtttccactaccacattccttatgcttactagtcttgcaactctgacttctgctcgctcacacctcactgtaactataggctcaaactgcacactaaaaggacctcaaggtggtcatgtcttttggtggagaatatatgacaatggatggtttacaaaaccatgtgaccaacctggtagatttttctgcaacggcagagacctaaccattatcaacgtgacagcaaatgacaaaggcttctattatggaaccgactataaaagtagtttagattataacattattgtactgccatctaccactccagcaccccgcacaactactttctctagcagcagtgtcgctaacaatacaatttccaatccaacctttgccgcgcttttaaaacgcactgtgaataattctacaacttcacatacaacaatttccacttcaacaatcagcattatcgctgcagtgacaattggaatatctattcttgtttttaccataacctactacgcctgctgctatagaaaagacaaacataaaggtgatccattacttagatttgatatttaatttgttctttttttttttatttacagtatggtgaacaccaatcatggtacctagaaatttcttcttcaccatactcatttgtgcatttaatgtttgcgctactttcacagcagtagccacagcaaccccagactgtataggagcatttgcttcctatgcactttttgcttttgttacttgcatctgcgtatgtagcatagtctgcctggttattaattttttccaacttctagactggatccttgtgcgaattgcctacctgcgccaccatcccgaataccgcaaccaaaatatcgcggcacttcttagactcatctaaaaccatgcaggctatactaccaatatttttgcttctattgcttccctacgctgtctcaaccccagctgcctatagtactccaccagaacaccttagaaaatgcaaattccaacaaccgtggtcatttcttgcttgctatcgagaaaaatcagaaattcccccaaatttaataatgattgctggaataattaatataatctgttgcaccataatttcatttttgatataccccctatttgattttggctggaatgctcccaatgcacatgatcatccacaagacccagaggaacacattcccctacaaaacatgcaacatccaatagcgctaatagattacgaaagtgaaccacaacccccactactccctgctattagttacttcaacctaaccggcggagatgactgaaacactcaccacctccaattccgccgaggatctgctcgatatggacggccgcgtctcagaacagcgacttgcccaactacgcatccgccagcagcaggaacgcgcggccaaagagctcagagatgtcatccaaattcaccaatgcaaaaaaggcatattctgtttggtaaaacaagccaagatatcctacgagatcaccgctactgaccatcgcctctcttacgaacttggcccccaacgacaaaaatttacctgcatggtgggaatcaaccccatagttatcacccagcaaagtggagatactaagggttgcattcactgctcctgcgattccatcgagtgcacctacaccctgctgaagaccctatgcggcctaagagacctgctaccaatgaattaaaaaatgattaataaa

SEQ ID NO: 142 - DNA, 972 bp, Human adenovirus
  misc_feature 1..972: note = Ad34 fiber; 30812 - 31783
  source 1..972: mol_type = genomic DNA
atgaccaagagagtccggctcagtgactccttcaaccctgtctacccctatgaagatgaaagcacctcccaacacccctttataaacccagggtttatttccccaaatggcttcacacaaagcccagacggagttcttactttaaaatgtttaaccccactaacaaccacaggcggatctctacagctaaaagtgggagggggacttacagtggatgacactgatggtaccttacaagaaaacatacgtgctacagcacccattactaaaaataatcactctgtagaactatccattggaaatggattagaaactcaaaacaataaactatgtgccaaattgggaaatgggttaaaatttaacaacggtgacatttgtataaaggatagtattaacaccttatggactggaataaaccctccacctaactgtcaaattgtggaaaacactaatacaaatgatggcaaacttactttagtattagtaaaaaacggagggcttgttaatggctacgtgtctctagttggtgtatcagacactgtgaaccaaatgttcacacaaaagacagcaaacatccaattaagattatattttgactcttctggaaatctattaactgatgaatcagacttaaaaattccacttaaaaataaatcttctacagcgaccagtgaaactgtagccagcagcaaagcctttatgccaagtactacagcttatcccttcaacaccactactagggatagtgaaaactacattcatggaatatgttactacatgactagttatgatagaagtctatttcccttgaacatttctataatgctaaacagccgtatgatttcttccaatgttgcctatgccatacaatttgaatggaatctaaatgcaagtgaatctccagaaagcaacatagctacgctgaccacatccccctttttcttttcttacattacagaagacgacaactaa

SEQ ID NO: 143 - DNA, 126 bp, Human adenovirus; identical to SEQ ID NO: 71
  misc_feature 1..126: note = Ad34 fiber tail; 30812 - 30937
  source 1..126: mol_type = genomic DNA

SEQ ID NO: 144 - DNA, 273 bp, Human adenovirus
  misc_feature 1..273: note = Ad34 fiber shaft; 30938 - 31210
  source 1..273: mol_type = genomic DNA
gacggagttcttactttaaaatgtttaaccccactaacaaccacaggcggatctctacagctaaaagtgggagggggacttacagtggatgacactgatggtaccttacaagaaaacatacgtgctacagcacccattactaaaaataatcactctgtagaactatccattggaaatggattagaaactcaaaacaataaactatgtgccaaattgggaaatgggttaaaatttaacaacggtgacatttgtataaaggatagtattaacacc

SEQ ID NO: 145 - DNA, 570 bp, Human adenovirus
  misc_feature 1..570: note = Ad34 fiber knob; 31211 - 31780
  source 1..570: mol_type = genomic DNA
ttatggactggaataaaccctccacctaactgtcaaattgtggaaaacactaatacaaatgatggcaaacttactttagtattagtaaaaaacggagggcttgttaatggctacgtgtctctagttggtgtatcagacactgtgaaccaaatgttcacacaaaagacagcaaacatccaattaagattatattttgactcttctggaaatctattaactgatgaatcagacttaaaaattccacttaaaaataaatcttctacagcgaccagtgaaactgtagccagcagcaaagcctttatgccaagtactacagcttatcccttcaacaccactactagggatagtgaaaactacattcatggaatatgttactacatgactagttatgatagaagtctatttcccttgaacatttctataatgctaaacagccgtatgatttcttccaatgttgcctatgccatacaatttgaatggaatctaaatgcaagtgaatctccagaaagcaacatagctacgctgaccacatccccctttttcttttcttacattacagaagacgacaac

SEQ ID NO: 146 - DNA, 1677 bp, Human adenovirus
  misc_feature 1..1677: note = Ad34 penton; 13681 - 15357
  source 1..1677: mol_type = genomic DNA
atgaggcgagtcgtgctaggcggagcggtggtgtatccggagggtcctcctccttcgtacgagagcgtgatgcagcagcagcaggcgacggcggtgatgcaatccccactggaggctccctttgtgcctccgcgatacctggcacctacggagggcagaaacagcattcgttactcggaactggcacctcagtacgataccaccaggttgtatctggtggacaacaagtcggcggacattgcttctctgaactatcagaatgaccacagcaacttcttgaccacggtggtgcaaaacaatgactttacccctacggaagccagcacccagaccattaactttgatgaacgatcgcggtggggcggtcagctaaaaaccatcatgcatactaacatgcccaacgtgaacgagtatatgtttagtaacaagttcaaagcgcgtgtgatggtgtccagaaaacctcctgagggtgttagagtagacgataattatgatcataagcaagatattctaaaatacgagtggttcgagtttactttgccagaaggcaacttttcggtcactatgactatcgacttgatgaacaatgccatcatagacaattacttgaaagtgggcagacagaatggagtgttggaaagtgacattggtgttaagttcgacactaggaacttcaagttgggatgggatccagaaactaagttgatcatgcctggggtttacacctatgaggccttccatcctgacatcgtattgctgcctggctgcggagtggactttaccgaaagccgtctgagcaaccttcttggcattagaaagaaacacccattccaagagggttttaagatcttgtatgaggatttagaaggaggaaatattccagcccttttggatgtagatgcttatgagaacagcaagaaagatcaaaaagccaaaatagaagctgctgcagaagctaaagcaaacatagttgccaacgatccggtaagggtggctaacgctagtgaaatcaggggagacagttttgccgcaacatccgttccgactaaagaatcattattggatgatgtgtctcaaaacatagagttaaaactcactattaagcctgtggaaaaagatggcaaaaacagaagttacaatgtgttggaagataaaatcaacacggcctatcgcagttggtacctttcgtacaattatggcgaccccgaaaaaggagtgcgttcctggacattgctcaccacctcagatgtcacctgcggagcggagcaggtctactggtcgcttccagacatgatgcaggatcctgtcactttccgctccactagacaagtcagtaactaccctgtggtgggtgcagagcttatgcccgtcttttcaaagagcttctacaacgaacaagctgtgtactcccagcagctccgccagtccacctcgcttacgcacgtcttcaaccgctttcctgagaaccagattttaatccgtccgccggcgcccacaattaccaccgtcagtgaaaacgttcctgctctcacagatcacgggaccctgccgttgcgcagcagtatccggggagtccaacgtgtgaccgttactgacgccagacgccgcacctgtccctacgtgtacaaggcactgggcatagtcgcaccgcgcgtcctttcaagccgcactttctaa

SEQ ID NO: 147 - DNA, 2856 bp, Human adenovirus
  misc_feature 1..2856: note = Ad34 hexon; 18244 21099
  source 1..2856: mol_type = genomic DNA
atggccaccccatcgatgctgccccaatgggcatacatgcacatcgccggacaggatgcttcggagtacctgagtccgggtctggtgcagttcgcccgcgccacagacacctacttcaatctgggaaataagtttagaaatcctaccgtagcgccgacccacgatgtgaccaccgatcgtagccagcggctcatgttgcgcttcgtgcccgttgaccgggaggacaatacatactcttacaaagtgcggtacaccctggccgtgggcgacaacagagtgctggatatggccagcacgttctttgacattaggggcgtgttggacagaggtcccagttttaaaccctattctggtacggcttacaactccctggctcctaaaggcgctccaaatgcatctcagtggttggataagggagttacaagcactggcctagtggacgacggcaatactgatgatggggaagaagccaaaaaagcaacatacacttttggtaatgctccagtaaaagccgaggctgaaatcacaaaagacggattgccggtgggcttggaagtttcaactgaaggtcctaaaccaatctatgctgataagctttatcagccagaacctcaagtgggagacgaaacttggactgacctagacggaaaaaccgaagagtatggagggagggttcttaaacctgaaactaaaatgaaaccctgctacggatcttttgctaaacctactaatattaaaggaggtcaggcaaaggtaaaaccaaaagaagacgatggcactaacaacatcgagtatgacattgacatgaacttctttgacttaagatcacaaagatcagaactcaaacctaaaattgtaatgtatgcagaaaatgtggacctggaatgtccagatactcatgttgtgtacaaacctggagtttcagatgctagttctgagaccaatcttggacaacagtctatgcccaacagacccaactacattggcttcagagataacttcatcggacttatgtactataacagtactggcaacatgggggtactggctggccaagcgtctcagttgaatgcagtggttgacttgcaggacagaaacacagaactgtcttaccaactcttgcttgactctctgggcgacagaaccagatactttagcatgtggaatcaggctgtggacagttatgatcctgatgtacgtgttattgaaaatcatggtgtggaagatgaacttcccaactattgttttccgttggatggtgtcggtccgcgaacagatagttacaaggagattaagccaaatggagaccaatctacttggacaaatgtagacccaactggcagcagtgaacttgctaagggaaatccatttgccatggaaattaaccttcaagccaatctatggcgaagtttcctttattccaatgtggctctatatctcccagactcgtacaaatacaccccgtccaatgtcactcttccagaaaacaaaaacacctacgactacatgaacgggcgggtggtgccgccatctctagtagacacctatgtgaacattggtgccaggtggtctctggatgccatggacaatgtcaacccattcaaccaccaccgtaacgctggcttgcgttaccgatccatgcttctgggtaacggacgttatgtgcctttccacatacaagtgcctcaaaaattcttcgctgttaaaaacctgctgcttctcccaggctcctacacttatgagtggaactttaggaaggatgtaaacatggttctacagagttccctcggtaacgacctacgggtagatggcgccagcatcagttttacgagcatcaacctctatgctacttttttccccatggctcacaacaccgcttccacccttgaagccatgctgcggaatgacaccaatgatcagtcattcaacgactacctatctgcagctaacatgctctaccccattcctgccaatgcaaccaatattcccatttccattccttctcgcaactgggcggctttcagaggctggtcatttaccagactgaaaaccaaagaaactccctctttggggtctggatttgacccctacttcgtctattctggttctattccctacctggatggtaccttctacctgaaccacacttttaagaaggtttccatcatgtttgactcttcagtgagctggcctggaaatgacaggttactatctcctaacgaatttgaaataaagcgcactgtggatggcgaaggctacaacgtagcccaatgcaacatgaccaaagactggttcttggtacagatgctcgccaactacaacatcggctatcagggcttctacattccagaaggatacaaagatcgcatgtattcatttttcagaaacttccagcccatgagcaggcaggtggttgatgaggtcaattacaaagacttcaaggccgtcgccataccctaccaacacaacaactctggctttgtgggttacatggctccgaccatgcgtcaaggtcaaccctatcccgctaactatccctatccactcattggaacaactgccgtaaatagtgttacgcagaaaaagttcttgtgtgacagaaccatgtggcgcataccgttctcaagcaacttcatgtctatgggagcccttacagacttgggacagaacatgctctatgccaactcagctcatgctctggacatgacctttgaggtggatcccatggatgagcccaccctgctttatcttctcttcgaagttttcgacgtggtcagagtgcatcagccacaccgcggcatcatcgaggcagtctacctgcgtacaccgttctcggccggtaacgctaccacgtaa

SEQ ID NO: 148 - protein, 323 aa, Human adenovirus
  REGION 1..323: note = misc_feature - Ad34 fiber; 1 - 323 (GenBank accession no. AAW33501); Human adenovirus 34
MTKRVRLSDSFNPVYPYEDESTSQHPFINPGFISPNGFTQSPDGVLTLKCLTPLTTTGGSLQLKVGGGLTVDDTDGTLQENIRATAPITKNNHSVELSIGNGLETQNNKLCAKLGNGLKFNNGDICIKDSINTLWTGINPPPNCQIVENTNTNDGKLTLVLVKNGGLVNGYVSLVGVSDTVNQMFTQKTANIQLRLYFDSSGNLLTDESDLKIPLKNKSSTATSETVASSKAFMPSTTAYPFNTTTRDSENYIHGICYYMTSYDRSLFPLNISIMLNSRMISSNVAYAIQFEWNLNASESPESNIATLTTSPFFFSYITEDDN

SEQ ID NO: 149 - protein, 91 aa, Human adenovirus
  REGION 1..91: note = misc_feature - Ad34 fiber shaft; 43 - 133 (GenBank accession no. AAW33501); Human adenovirus 34
DGVLTLKCLTPLTTTGGSLQLKVGGGLTVDDTDGTLQENIRATAPITKNNHSVELSIGNGLETQNNKLCAKLGNGLKFNNGDICIKDSINT

SEQ ID NO: 150 - protein, 190 aa, Human adenovirus
  REGION 1..190: note = misc_feature - Ad34 fiber knob; 134 - 323 (GenBank accession no. AAW33501); Human adenovirus 34
LWTGINPPPNCQIVENTNTNDGKLTLVLVKNGGLVNGYVSLVGVSDTVNQMFTQKTANIQLRLYFDSSGNLLTDESDLKIPLKNKSSTATSETVASSKAFMPSTTAYPFNTTTRDSENYIHGICYYMTSYDRSLFPLNISIMLNSRMISSNVAYAIQFEWNLNASESPESNIATLTTSPFFFSYITEDDN

SEQ ID NO: 151 - protein, 558 aa, Human adenovirus
  REGION 1..558: note = misc_feature - Ad34 penton; 1 - 558 (GenBank accession no. ABC49791); Human adenovirus 34
MRRVVLGGAVVYPEGPPPSYESVMQQQQATAVMQSPLEAPFVPPRYLAPTEGRNSIRYSELAPQYDTTRLYLVDNKSADIASLNYQNDHSNFLTTVVQNNDFTPTEASTQTINFDERSRWGGQLKTIMHTNMPNVNEYMFSNKFKARVMVSRKPPEGVRVDDNYDHKQDILKYEWFEFTLPEGNFSVTMTIDLMNNAIIDNYLKVGRQNGVLESDIGVKFDTRNFKLGWDPETKLIMPGVYTYEAFHPDIVLLPGCGVDFTESRLSNLLGIRKKHPFQEGFKILYEDLEGGNIPALLDVDAYENSKKDQKAKIEAAAEAKANIVANDPVRVANASEIRGDSFAATSVPTKESLLDDVSQNIELKLTIKPVEKDGKNRSYNVLEDKINTAYRSWYLSYNYGDPEKGVRSWTLLTTSDVTCGAEQVYWSLPDMMQDPVTFRSTRQVSNYPVVGAELMPVFSKSFYNEQAVYSQQLRQSTSLTHVFNRFPENQILIRPPAPTITTVSENVPALTDHGTLPLRSSIRGVQRVTVTDARRRTCPYVYKALGIVAPRVLSSRTF

SEQ ID NO: 152 - protein, 951 aa, Human adenovirus
  REGION 1..951: note = misc_feature - Ad34 hexon; 1 - 951 (GenBank accession no. AAW33485); Human adenovirus 34
MATPSMLPQWAYMHIAGQDASEYLSPGLVQFARATDTYFNLGNKFRNPTVAPTHDVTTDRSQRLMLRFVPVDREDNTYSYKVRYTLAVGDNRVLDMASTFFDIRGVLDRGPSFKPYSGTAYNSLAPKGAPNASQWLDKGVTSTGLVDDGNTDDGEEAKKATYTFGNAPVKAEAEITKDGLPVGLEVSTEGPKPIYADKLYQPEPQVGDETWTDLDGKTEEYGGRVLKPETKMKPCYGSFAKPTNIKGGQAKVKPKEDDGTNNIEYDIDMNFFDLRSQRSELKPKIVMYAENVDLECPDTHVVYKPGVSDASSETNLGQQSMPNRPNYIGFRDNFIGLMYYNSTGNMGVLAGQASQLNAVVDLQDRNTELSYQLLLDSLGDRTRYFSMWNQAVDSYDPDVRVIENHGVEDELPNYCFPLDGVGPRTDSYKEIKPNGDQSTWTNVDPTGSSELAKGNPFAMEINLQANLWRSFLYSNVALYLPDSYKYTPSNVTLPENKNTYDYMNGRVVPPSLVDTYVNIGARWSLDAMDNVNPFNHHRNAGLRYRSMLLGNGRYVPFHIQVPQKFFAVKNLLLLPGSYTYEWNFRKDVNMVLQSSLGNDLRVDGASISFTSINLYATFFPMAHNTASTLEAMLRNDTNDQSFNDYLSAANMLYPIPANATNIPISIPSRNWAAFRGWSFTRLKTKETPSLGSGFDPYFVYSGSIPYLDGTFYLNHTFKKVSIMFDSSVSWPGNDRLLSPNEFEIKRTVDGEGYNVAQCNMTKDWFLVQMLANYNIGYQGFYIPEGYKDRMYSFFRNFQPMSRQVVDEVNYKDFKAVAIPYQHNNSGFVGYMAPTMRQGQPYPANYPYPLIGTTAVNSVTQKKFLCDRTMWRIPFSSNFMSMGALTDLGQNMLYANSAHALDMTFEVDPMDEPTLLYLLFEVFDVVRVHQPHRGIIEAVYLRTPFSAGNATT

SEQ ID NO: 153 - protein, 42 aa, Human adenovirus; identical to SEQ ID NO: 63
  REGION 1..42: note = misc_feature - Ad34 fiber tail; 1 - 42 (GenBank accession no. AAW33501); Human adenovirus 34

SEQ ID NO: 154 - DNA, 137 bp, Human adenovirus
  misc_feature 1..137: note = Ad35 5 (left) ITR; 1 - 137
  source 1..137: mol_type = genomic DNA
catcatcaataatataccttatagatggaatggtgccaatatgtaaatgaggtgattttaaaaagtgtgggccgtgtggtgattggctgtggggttaacggttaaaaggggcggcgcggccgtgggaaaatgacgtt

SEQ ID NO: 155 - DNA, 137 bp, Human adenovirus
  misc_feature 1..137: note = Ad35 3 (right) ITR; 34658 - 34794
  source 1..137: mol_type = genomic DNA
aacgtcattttcccacggccgcgccgccccttttaaccgttaaccccacagccaatcaccacacggcccacactttttaaaatcacctcatttacatattggcaccattccatctataaggtatattattgatgatg

SEQ ID NO: 156 - DNA, 342 bp, Human adenovirus
  misc_feature 1..342: note = Ad35 Packaging Sequence; 138 - 479
  source 1..342: mol_type = genomic DNA
ttatgggggtggagtttttttgcaagttgtcgcgggaaatgttacgcataaaaaggcttcttttctcacggaactacttagttttcccacggtatttaacaggaaatgaggtagttttgaccggatgcaagtgaaaattgctgattttcgcgcgaaaactgaatgaggaagtgtttttctgaataatgtggtatttatggcagggtggagtatttgttcagggccaggtagactttgacccattacgtggaggtttcgattaccgtgttttttacctgaatttccgcgtaccgtgtcaaagtcttctgtttttacgtaggtgtcagctgatcgctagggtat

SEQ ID NO: 157 - DNA, 2921 bp, Human adenovirus
  misc_feature 1..2921: note = Ad35 E1; 480 - 3400
  source 1..2921: mol_type = genomic DNA
ttatacctcagggtttgtgtcaagaggccactcttgagtgccagcgagaagagttttctcctctgcgccggcagtttaataataaaaaaatgagagatttgcgatttctgcctcaggaaataatctctgctgagactggaaatgaaatattggagcttgtggtgcacgccctgatgggagacgatccggagccacctgtgcagctttttgagcctcctacgcttcaggaactgtatgatttagaggtagagggatcggaggattctaatgaggaagctgtgaatggcttttttaccgattctatgcttttagctgctaatgaaggattagaattagatccgcctttggacactttcaatactccaggggtgattgtggaaagcggtacaggtgtaagaaaattacctgatttgagttccgtggactgtgatttgcactgctatgaagacgggtttcctccgagtgatgaggaggaccatgaaaaggagcagtccatgcagactgcagcgggtgagggagtgaaggctgccaatgttggttttcagttggattgcccggagcttcctggacatggctgtaagtcttgtgaatttcacaggaaaaatactggagtaaaggaactgttatgttcgctttgttatatgagaacgcactgccactttatttacagtaagtgtgtttaagttaaaatttaaaggaatatgctgtttttcacatgtatattgagtgtgagttttgtgcttcttattataggtcctgtgtctgatgctgatgaatcaccatctcctgattctactacctcacctcctgatattcaagcacctgttcctgtggacgtgcgcaagcccattcctgtgaagcttaagcctgggaaacgtccagcagtggagaaacttgaggacttgttacagggtggggacggacctttggacttgagtacacggaaacgtccaagacaataagtgttccatatccgtgtttacttaaggtgacgtcaatatttgtgtgagagtgcaatgtaataaaaatatgttaactgttcactggtttttattgctttttgggcggggactcaggtatataagtagaagcagacctgtgtggttagctcataggagctggctttcatccatggaggtttgggccattttggaagaccttaggaagactaggcaactgttagagagcgcttcggacggagtctccggtttttggagattctggttcgctagtgaattagctagggtagtttttaggataaaacaggactataaacaagaatttgaaaagttgttggtagattgcccaggactttttgaagctcttaatttgggccatcaggttcactttaaagaaaaagttttatcagttttagacttttcaaccccaggtagaactgctgctgctgtggcttttcttacttttatattagataaatggatcccgcagactcatttcagcaggggatacgttttggatttcatagccacagcattgtggagaacatggaaggttcgcaagatgaggacaatcttaggttactggccagtgcagcctttgggtgtagcgggaatcctgaggcatccaccggtcatgccagcggttctggaggaggaacagcaagaggacaacccgagagccggcctggaccctccagtggaggaggcggagtagctgacttgtctcctgaactgcaacgggtgcttactggatctacgtccactggacgggataggggcgttaagagggagagggcatccagtggtactgatgctagatctgagttggctttaagtttaatgagtcgcagacgtcctgaaaccatttggtggcatgaggttcagaaagagggaagggatgaagtttctgtattgcaggagaaatattcactggaacaggtgaaaacatgttggttggagccagaggatgattgggaggtggccattaaaaattatgccaagatagctttgaggcctgataaacagtataagatcagtagacggattaatatccggaatgcttgttacatatctggaaatggggctgaggtggtaatagatactcaagacaagacagttattagatgctgcatgatggatatgtggcctggagtagtcggtatggaagcagtcacttttgtaaatgttaagtttaggggagatggttataatggaatagtgtttatggccaataccaaacttatattgcatggttgtagcttttttggtttcaacaatacctgtgtagatgcctggggacaggttagtgtacgggggtgtagtttctatgcgtgttggattgccacagctggcagaaccaagagtcaattgtctctgaagaaatgcatattccaaagatgtaacctgggcattctgaatgaaggcgaagcaagggtccgtcactgcgcttctacagatactggatgttttattttaattaagggaaatgccagcgtaaagcataacatgatttgtggtgcttccgatgagaggccttatcaaatgctcacttgtgctggtgggcattgtaatatgctggctactgtgcatattgtttcccatcaacgcaaaaaatggcctgtttttgatcacaatgtgttgaccaagtgcaccatgcatgcaggtgggcgtagaggaatgtttatgccttaccagtgtaacatgaatcatgtgaaagtgttgttggaaccagatgccttttccagaatgagcctaacaggaatctttgacatgaacacgcaaatctggaagatcctgaggtatgatgatacgagatcgagggtgcgcgcatgcgaatgcggaggcaagcatgccaggttccagccggtgtgtgtagatgtgaccgaagatctcagaccggatcatttggttattgcccgcactggagcagagttcggatccagtggagaagaaactgactaa

SEQ ID NO: 158 - DNA, 19450 bp, Human adenovirus
  misc_feature 1..19450: note = Ad35 E2; 3966 - 23415
  source 1..19450: mol_type = genomic DNA
ttatttcatttttcgcgcacggtatgccctggaccaccgatctcgatcattgagaactcggtggattttttccagaatcctatagaggtgggattgaatgtttagatacatgggcattaggccgtctttggggtggagatagctccattgaagggattcatgctccggggtagtgttgtaaatcacccagtcataacaaggtcgcagtgcatggtgttgcacaatatcttttagaagtaggctgattgccacagataagcccttggtgtaggtgtttacaaaccggttgagctgggaggggtgcattcgaggtgaaattatgtgcattttggattggatttttaagttggcaatattgccgccaagatcccgtcttgggttcatgttatgaaggactaccaagacggtgtatccggtacatttaggaaatttatcgtgcagcttggatggaaaagcgtggaaaaatttggagacacccttgtgtcctccgagattttccatgcactcatccatgataatagcaatggggccgtgggcagcggcgcgggcaaacacgttccgtgggtctgacacatcatagttatgttcctgagttaaatcatcataagccattttaatgaatttggggcggagcgtaccagattggggtatgaatgttccttcgggccccggagcatagttcccctcacagatttgcatttcccaagctttcagttctgagggtggaatcatgtccacctggggggctatgaagaacaccgtttcgggggcgggggtgattagttgggatgatagcaagtttctgagcaattgagatttgccacatccggtggggccataaataattccgattacaggttgcaggtggtagtttagggaacggcaactgccgtcttctcgaagcaagggggccacctcgttcatcatttcccttacatgcatattttcccgcaccaaatccattaggaggcgctctcctcctagtgatagaagttcttgtagtgaggaaaagtttttcagcggttttagaccgtcagccatgggcattttggaaagagtttgctgcaaaagttctagtctgttccacagttcagtgatgtgttctatggcatctcgatccagcagacctcctcgtttcgcgggtttggacggctcctggagtagggtatgagacgatgggcgtccagcgctgccagggttcggtccttccagggtctcagtgttcgagtcagggttgtttccgtcacagtgaaggggtgtgcgcctgcttgggcgcttgccagggtgcgcttcagactcattctgctggtggagaacttctgtcgcttggcgccctgtatgtcggccaagtagcagtttaccatgagttcgtagttgagcgcctcggctgcgtggcctttggcgcggagcttacctttggaagttttcttgcataccgggcagtataggcatttcagcgcatacagcttgggcgcaaggaaaatggattctggggagtatgcatccgcgccgcaggaggcgcaaacagtttcacattccaccagccaggttaaatccggttcattggggtcaaaaacaagttttccgccatattttttgatgcgtttcttacctttggtctccataagttcgtgtcctcgttgagtgacaaacaggctgtccgtatctccgtagactgattttacaggcctcttctccagtggagtgcctcggtcttcttcgtacaggaactctgaccactctgatacaaaggcgcgcgtccaggccagcacaaaggaggctatgtgggaggggtagcgatcgttgtcaaccagggggtccaccttttccaaagtatgcaaacacatgtcaccctcttcaacatccaggaatgtgattggcttgtaggtgtatttcacgtgacctggggtccccgctgggggggtataaaagggggcggttctttgctcttcctcactgtcttccggatcgctgtccaggaacgtcagctgttggggtaggtattccctctcgaaggcgggcatgacctctgcactcaggttgtcagtttctaagaacgaggaggatttgatattgacagtgccggttgagatgcctttcatgaggttttcgtccatttggtcagaaaacacaatttttttattgtcaagtttggtggcaaatgatccatacagggcgttggataaaagtttggcaatggatcgcatggtttggttcttttccttgtccgcgcgctctttggcggcgatgttgagttggacatactcgcgtgccaggcacttccattcggggaagatagttgttaattcatctggcacgattctcacttgccaccctcgattatgcaaggtaattaaatccacactggtggccacctcgcctcgaaggggttcattggtccaacagagcctacctcctttcctagaacagaaagggggaagtgggtctagcataagttcatcgggagggtctgcatccatggtaaagattcccggaagtaaatccttatcaaaatagctgatgggagtggggtcatctaaggccatttgccattctcgagctgccagtgcgcgctcatatgggttaaggggactgccccagggcatgggatgggtgagagcagaggcatacatgccacagatgtcatagacgtagatgggatcctcaaagatgcctatgtaggttggatagcatcgcccccctctgatacttgctcgcacatagtcatatagttcatgtgatggcgctagcagccccggacccaagttggtgcgattgggtttttctgttctgtagacgatctggcgaaagatggcgtgagaattggaagagatggtgggtctttgaaaaatgttgaaatgggcatgaggtagacctacagagtctctgacaaagtgggcataagattcttgaagcttggttaccagttcggcggtgacaagtacgtctagggcgcagtagtcaagtgtttcttgaatgatgtcataacctggttggtttttcttttcccacagttcgcggttgagaaggtattcttcgcgatccttccagtactcttctagcggaaacccgtctttgtctgcacggtaagatcctagcatgtagaactgattaactgccttgtaagggcagcagcccttctctacgggtagagagtatgcttgagcagcttttcgtagcgaagcgtgagtaagggcaaaggtgtctctgaccatgactttgagaaattggtatttgaagtccatgtcgtcacaggctccctgttcccagagttggaagtctacccgtttcttgtaggcggggttgggcaaagcgaaagtaacatcattgaagagaatcttaccggctctgggcataaaattgcgagtgatgcggaaaggctgtggtacttccgctcgattgttgatcacctgggcagctaggacgatttcgtcgaaaccgttgatgttgtgtcctacgatgtataattctatgaaacgcggcgtgcctctgacgtgaggtagcttactgagctcatcaaaggttaggtctgtggggtcagataaggcgtagtgttcgagagcccattcgtgcaggtgaggatttgcatgtaggaatgatgaccaaagatctaccgccagtgctgtttgtaactggtcccgatactgacgaaaatgccggccaattgccattttttctggagtgacacagtagaaggttctggggtcttgttgccatcgatcccacttgagtttaatggctagatcgtgggccatgttgacgagacgctcttctcctgagagtttcatgaccagcatgaaaggaactagttgtttgccaaaggatcccatccaggtgtaagtttccacatcgtaggtcaggaagagtctttctgtgcgaggatgagagccgatcgggaagaactggatttcctgccaccagttggaggattggctgttgatgtgatggaagtagaagtttctgcggcgcgccgagcattcgtgtttgtgcttgtacagacggccgcagtagtcgcagcgttgcacgggttgtatctcgtgaatgagctgtacctggcttcccttgacgagaaatttcagtgggaagccgaggcctggcgattgtatctcgtgctcttctatattcgctgtatcggcctgttcatcttctgtttcgatggtggtcatgctgacgagcccccgcgggaggcaagtccagacctcggcgcgggaggggcggagctgaaggacgagagcgcgcaggctggagctgtccagagtcctgagacgctgcggactcaggttagtaggtagggacagaagattaacttgcatgatcttttccagggcgtgcgggaggttcagatggtacttgatttccacaggttcgtttgtagagacgtcaatggcttgcagggttccgtgtcctttgggcgccactaccgtacctttgttttttcttttgatcggtggtggctctcttgcttcttgcatgctcagaagcggtgacggggacgcgcgccgggcggcagcggttgttccggacccgggggcatggctggtagtggcacgtcggcgccgcgcacgggcaggttctggtattgcgctctgagaagacttgcgtgcgccaccacgcgtcgattgacgtcttgtatctgacgtctctgggtgaaagctaccggccccgtgagcttgaacctgaaagagagttcaacagaatcaatttcggtatcgttaacggcagcttgtctcagtatttcttgtacgtcaccagagttgtcctggtaggcgatctccgccatgaactgctcgatttcttcctcctgaagatctccgcgacccgctctttcgacggtggccgcgaggtcattggagatacggcccatgagttgggagaatgcattcatgcccgcctcgttccagacgcggctgtaaaccacggccccctcggagtctcttgcgcgcatcaccacctgagcgaggttaagctccacgtgtctggttaagaccgcatagttgcataggcgctgaaaaaggtagttgagtgtggtggcaatgtgttcggcgacgaagaaatacatgatccatcgtctcagcggcatttcgctaacatcgcccagagcttccaagcgctccatggcctcgtagaagtccacggcaaaattaaaaaactgggagtttcgcgcggacacggtcaattcctcctcgagaagacggatgagttcggctatggtggcccgtacttcgcgttcgaaggctcccgggatctcttcttcctcttctatctcttcttccactaacatctcttcttcgtcttcaggcgggggcggagggggcacgcggcgacgtcgacggcgcacgggcaaacggtcgatgaatcgttcaatgacctctccgcggcggcggcgcatggtttcagtgacggcgcggccgttctcgcgcggtcgcagagtaaaaacaccgccgcgcatctccttaaagtggtgactgggaggttctccgtttgggagggagagggcgctgattatacattttattaattggcccgtagggactgcgcgcagagatctgatcgtgtcaagatccacgggatctgaaaacctttcgacgaaagcgtctaaccagtcacagtcacaaggtaggctgagtacggcttcttgtgggcgggggtggttatgtgttcggtctgggtcttctgtttcttcttcatctcgggaaggtgagacgatgctgctggtgatgaaattaaagtaggcagttctaagacggcggatggtggcgaggagcaccaggtctttgggtccggcttgctggatacgcaggcgattggccattccccaagcattatcctgacatctagcaagatctttgtagtagtcttgcatgagccgttctacgggcacttcttcctcacccgttctgccatgcatacgtgtgagtccaaatccgcgcattggttgtaccagtgccaagtcagctacgactctttcggcgaggatggcttgctgtacttgggtaagggtggcttgaaagtcatcaaaatccacaaagcggtggtaagcccctgtattaatggtgtaagcacagttggccatgactgaccagttaactgtctggtgaccagggcgcacgagctcggtgtatttaaggcgcgaataggcgcgggtgtcaaagatgtaatcgttgcaggtgcgcaccagatactggtaccctataagaaaatgcggcggtggttggcggtagagaggccatcgttctgtagctggagcgccaggggcgaggtcttccaacataaggcggtgatagccgtagatgtacctggacatccaggtgattcctgcggcggtagtagaagcccgaggaaactcgcgtacgcggttccaaatgttgcgtagcggcatgaagtagttcattgtaggcacggtttgaccagtgaggcgcgcgcagtcattgatgctctatagacacggagaaaatgaaagcgttcagcgactcgactccgtagcctggaggaacgtgaacgggttgggtcgcggtgtaccccggttcgagacttgtactcgagccggccggagccgcggctaacgtggtattggcactcccgtctcgacccagcctacaaaaatccaggatacggaatcgagtcgttttgctggtttccgaatggcagggaagtgagtcctatttttttttttttttgccgctcagaatgcatcccgtgctgcgacagatgcgcccccaacaacagcccccctcgcagcagcagcagcagcaaccacaaaaggctgtccctgcaactactgcaactgccgccgtgagcggtgcgggacagcccgcctatgatctggacttggaagagggcgaaggactggcacgtctaggtgcgccttcgcccgagcggcatccgcgagttcaactgaaaaaagattctcgcgaggcgtatgtgccccaacagaacctatttagagacagaagcggcgaggagccggaggagatgcgagcttcccgctttaacgcgggtcgtgagctgcgtcacggtttggaccgaagacgagtgttgcgagacgaggatttcgaagttgatgaagtgacagggatcagtcctgccagggcacacgtggctgcagccaaccttgtatcggcttacgagcagacagtaaaggaagagcgtaacttccaaaagtcttttaataatcatgtgcgaaccctgattgcccgcgaagaagttacccttggtttgatgcatttgtgggatttgatggaagctatcattcagaaccctactagcaaacctctgaccgcccagctgtttctggtggtgcaacacagcagagacaatgaggctttcagagaggcgctgctgaacatcaccgaacccgaggggagatggttgtatgatcttatcaacattctacagagtatcatagtgcaggagcggagcctgggcctggccgagaaggtagctgccatcaattactcggttttgagcttgggaaaatattacgctcgcaaaatctacaagactccatacgttcccatagacaaggaggtgaagatagatgggttctacatgcgcatgacgctcaaggtcttgaccctgagcgatgatcttggggtgtatcgcaatgacagaatgcatcgcgcggttagcgccagcaggaggcgcgagttaagcgacagggaactgatgcacagtttgcaaagagctctgactggagctggaaccgagggtgagaattacttcgacatgggagctgacttgcagtggcagcctaatcgcagggctctgagcgccgcgacggcaggatgtgagcttccttacatagaagaggcggatgaaggcgaggaggaagagggcgagtacttggaagactgatggcacaacccgtgttttttgctagatggaacagcaagcaccggatcccgcaatgcgggcggcgctgcagagccagccgtccggcattaactcctcggacgattggacccaggccatgcaacgtatcatggcgttgacgactcgcaaccccgaagcctttagacagcaaccccaggccaaccgtctatcggccatcatggaagctgtagtgccttcccgatctaatcccactcatgagaaggtcctggccatcgtgaacgcgttggtggagaacaaagctattcgtccagatgaggccggactggtatacaacgctctcttagaacgcgtggctcgctacaacagtagcaatgtgcaaaccaatttggaccgtatgataacagatgtacgcgaagccgtgtctcagcgcgaaaggttccagcgtgatgccaacctgggttcgctggtggcgttaaatgctttcttgagtactcagcctgctaatgtgccgcgtggtcaacaggattatactaactttttaagtgctttgagactgatggtatcagaagtacctcagagcgaagtgtatcagtccggtcctgattacttctttcagactagcagacagggcttgcagacggtaaatctgagccaagcttttaaaaaccttaaaggtttgtggggagtgcatgccccggtaggagaaagagcaaccgtgtctagcttgttaactccgaactcccgcctgttattactgttggtagctcctttcaccgacagcggtagcatcgaccgtaattcctatttgggttacctactaaacctgtatcgcgaagccatagggcaaagtcaggtggacgagcagacctatcaagaaattacccaagtcagtcgcgctttgggacaggaagacactggcagtttggaagccactctgaacttcttgcttaccaatcggtctcaaaagatccctcctcaatatgctcttactgcggaggaggagaggatccttagatatgtgcagcagagcgtgggattgtttctgatgcaagagggggcaactccgactgcagcactggacatgacagcgcgaaatatggagcccagcatgtatgccagtaaccgacctttcattaacaaactgctggactacttgcacagagctgccgctatgaactctgattatttcaccaatgccatcttaaacccgcactggctgcccccacctggtttctacacgggcgaatatgacatgcccgaccctaatgacggatttctgtgggacgacgtggacagcgatgttttttcacctctttctgatcatcgcacgtggaaaaaggaaggcggtgatagaatgcattcttctgcatcgctgtccggggtcatgggtgctaccgcggctgagcccgagtctgcaagtccttttcctagtctacccttttctctacacagtgtacgtagcagcgaagtgggtagaataagtcgcccgagtttaatgggcgaagaggagtacctaaacgattccttgctcagaccggcaagagaaaaaaatttcccaaacaatggaatagaaagtttggtggataaaatgagtagatggaagacttatgctcaggatcacagagacgagcctgggatcatggggactacaagtagagcgagccgtagacgccagcgccatgacagacagaggggtcttgtgtgggacgatgaggattcggccgatgatagcagcgtgttggacttgggtgggagaggaaggggcaacccgtttgctcatttgcgccctcgcttgggtggtatgttgtgaaaaaaaataaaaaagaaaaactcaccaaggccatggcgacgagcgtacgttcgttcttctttattatctgtgtctagtataatgaggcgagtcgtgctaggcggagcggtggtgtatccggagggtcctcctccttcgtacgagagcgtgatgcagcagcagcaggcgacggcggtgatgcaatccccactggaggctccctttgtgcctccgcgatacctggcacctacggagggcagaaacagcattcgttactcggaactggcacctcagtacgataccaccaggttgtatctggtggacaacaagtcggcggacattgcttctctgaactatcagaatgaccacagcaacttcttgaccacggtggtgcagaacaatgactttacccctacggaagccagcacccagaccattaactttgatgaacgatcgcggtggggcggtcagctaaagaccatcatgcatactaacatgccaaacgtgaacgagtatatgtttagtaacaagttcaaagcgcgtgtgatggtgtccagaaaacctcccgacggtgctgcagttggggatacttatgatcacaagcaggatattttggaatatgagtggttcgagtttactttgccagaaggcaacttttcagttactatgactattgatttgatgaacaatgccatcatagataattacttgaaagtgggtagacagaatggagtgcttgaaagtgacattggtgttaagttcgacaccaggaacttcaagctgggatgggatcccgaaaccaagttgatcatgcctggagtgtatacgtatgaagccttccatcctgacattgtcttactgcctggctgcggagtggattttaccgagagtcgtttgagcaaccttcttggtatcagaaaaaaacagccatttcaagagggttttaagattttgtatgaagatttagaaggtggtaatattccggccctcttggatgtagatgcctatgagaacagtaagaaagaacaaaaagccaaaatagaagctgctacagctgctgcagaagctaaggcaaacatagttgccagcgactctacaagggttgctaacgctggagaggtcagaggagacaattttgcgccaacacctgttccgactgcagaatcattattggccgatgtgtctgaaggaacggacgtgaaactcactattcaacctgtagaaaaagatagtaagaatagaagctataatgtgttggaagacaaaatcaacacagcctatcgcagttggtatctttcgtacaattatggcgatcccgaaaaaggagtgcgttcctggacattgctcaccacctcagatgtcacctgcggagcagagcaggtttactggtcgcttccagacatgatgaaggatcctgtcactttccgctccactagacaagtcagtaactaccctgtggtgggtgcagagcttatgcccgtcttctcaaagagcttctacaacgaacaagctgtgtactcccagcagctccgccagtccacctcgcttacgcacgtcttcaaccgctttcctgagaaccagattttaatccgtccgccggcgcccaccattaccaccgtcagtgaaaacgttcctgctctcacagatcacgggaccctgccgttgcgcagcagtatccggggagtccaacgtgtgaccgttactgacgccagacgccgcacctgtccctacgtgtacaaggcactgggcatagtcgcaccgcgcgtcctttcaagccgcactttctaaaaaaaaaatgtccattcttatctcgcccagtaataacaccggttggggtctgcgcgctccaagcaagatgtacggaggcgcacgcaaacgttctacccaacatcccgtgcgtgttcgcggacattttcgcgctccatggggtgccctcaagggccgcactcgcgttcgaaccaccgtcgatgatgtaatcgatcaggtggttgccgacgcccgtaattatactcctactgcgcctacatctactgtggatgcagttattgacagtgtagtggctgacgctcgcaactatgctcgacgtaagagccggcgaaggcgcattgccagacgccaccgagctaccactgccatgcgagccgcaagagctctgctacgaagagctagacgcgtggggcgaagagccatgcttagggcggccagacgtgcagcttcgggcgccagcgccggcaggtcccgcaggcaagcagccgctgtcgcagcggcgactattgccgacatggcccaatcgcgaagaggcaatgtatactgggtgcgtgacgctgccaccggtcaacgtgtacccgtgcgcacccgtccccctcgcacttagaagatactgagcagtctccgatgttgtgtcccagcggcgaggatgtccaagcgcaaatacaaggaagaaatgctgcaggttatcgcacctgaagtctacggccaaccgttgaaggatgaaaaaaaaccccgcaaaatcaagcgggttaaaaaggacaaaaaagaagaggaagatggcgatgatgggctggcggagtttgtgcgcgagtttgccccacggcgacgcgtgcaatggcgtgggcgcaaagttcgacatgtgttgagacctggaacttcggtggtctttacacccggcgagcgttcaagcgctacttttaagcgttcctatgatgaggtgtacggggatgatgatattcttgagcaggcggctgaccgattaggcgagtttgcttatggcaagcgtagtagaataacttccaaggatgagacagtgtcaatacccttggatcatggaaatcccacccctagtcttaaaccggtcactttgcagcaagtgttacccgtaactccgcgaacaggtgttaaacgcgaaggtgaagatttgtatcccactatgcaactgatggtacccaaacgccagaagttggaggacgttttggagaaagtaaaagtggatccagatattcaacctgaggttaaagtgagacccattaagcaggtagcgcctggtctgggggtacaaactgtagacattaagattcccactgaaagtatggaagtgcaaactgaacccgcaaagcctactgccacctccactgaagtgcaaacggatccatggatgcccatgcctattacaactgacgccgccggtcccactcgaagatcccgacgaaagtacggtccagcaagtctgttgatgcccaattatgttgtacacccatctattattcctactcctggttaccgaggcactcgctactatcgcagccgaaacagtacctcccgccgtcgccgcaagacacctgcaaatcgcagtcgtcgccgtagacgcacaagcaaaccgactcccggcgccctggtgcggcaagtgtaccgcaatggtagtgcggaacctttgacactgccgcgtgcgcgttaccatccgagtatcatcacttaatcaatgttgccgctgcctccttgcagatatggccctcacttgtcgccttcgcgttcccatcactggttaccgaggaagaaactcgcgccgtagaagagggatgttgggacgcggaatgcgacgctacaggcgacggcgtgctatccgcaagcaattgcggggtggttttttaccagccttaattccaattatcgctgctgcaattggcgcgataccaggcatagcttccgtggcggttcaggcctcgcaacgacattgacattggaaaaaaaacgtataaataaaaaaaaatacaatggactctgacactcctggtcctgtgactatgttttcttagagatggaagacatcaatttttcatccttggctccgcgacacggcacgaagccgtacatgggcacctggagcgacatcggcacgagccaactgaacgggggcgccttcaattggagcagtatctggagcgggcttaaaaattttggctcaaccataaaaacatacgggaacaaagcttggaacagcagtacaggacaggcgcttagaaataaacttaaagaccagaacttccaacaaaaagtagtcgatgggatagcttccggcatcaatggagtggtagatttggctaaccaggctgtgcagaaaaagataaacagtcgtttggacccgccgccagcaaccccaggtgaaatgcaagtggaggaagaaattcctccgccagaaaaacgaggcgacaagcgtccgcgtcccgatttggaagagacgctggtgacgcgcgtagatgaaccgccttcttatgaggaagcaacgaagcttggaatgcccaccactagaccgatagccccaatggccaccggggtgatgaaaccttctcagttgcatcgacccgtcaccttggatttgccccctccccctgctgctactgctgtacccgcttctaagcctgtcgctgccccgaaaccagtcgccgtagccaggtcacgtcccgggggcgctcctcgtccaaatgcgcactggcaaaatactctgaacagcatcgtgggtctaggcgtgcaaagtgtaaaacgccgtcgctgcttttaattaaatatggagtagcgcttaacttgcctatctgtgtatatgtgtcattacacgccgtcacagcagcagaggaaaaaaggaagaggtcgtgcgtcgacgctgagttactttcaagatggccaccccatcgatgctgccccaatgggcatacatgcacatcgccggacaggatgcttcggagtacctgagtccgggtctggtgcagttcgcccgcgccacagacacctacttcaatctgggaaataagtttagaaatcccaccgtagcgccgacccacgatgtgaccaccgaccgtagccagcggctcatgttgcgcttcgtgcccgttgaccgggaggacaatacatactcttacaaagtgcggtacaccctggccgtgggcgacaacagagtgctggatatggccagcacgttctttgacattaggggcgtgttggacagaggtcccagtttcaaaccctattctggtacggcttacaactctctggctcctaaaggcgctccaaatgcatctcaatggattgcaaaaggcgtaccaactgcagcagccgcaggcaatggtgaagaagaacatgaaacagaggagaaaactgctacttacacttttgccaatgctcctgtaaaagccgaggctcaaattacaaaagagggcttaccaataggtttggagatttcagctgaaaacgaatctaaacccatctatgcagataaactttatcagccagaacctcaagtgggagatgaaacttggactgacctagacggaaaaaccgaagagtatggaggcagggctctaaagcctactactaacatgaaaccctgttacgggtcctatgcgaagcctactaatttaaaaggtggtcaggcaaaaccgaaaaactcggaaccgtcgagtgaaaaaattgaatatgatattgacatggaattttttgataactcatcgcaaagaacaaacttcagtcctaaaattgtcatgtatgcagaaaatgtaggtttggaaacgccagacactcatgtagtgtacaaacctggaacagaagacacaagttccgaagctaatttgggacaacagtctatgcccaacagacccaactacattggcttcagagataactttattggactcatgtactataacagtactggtaacatgggggtgctggctggtcaagcgtctcagttaaatgcagtggttgacttgcaggacagaaacacagaactttcttaccaactcttgcttgactctctgggcgacagaaccagatactttagcatgtggaatcaggctgtggacagttatgatcctgatgtacgtgttattgaaaatcatggtgtggaagatgaacttcccaactattgttttccactggacggcataggtgttccaacaaccagttacaaatcaatagttccaaatggagaagataataataattggaaagaacctgaagtaaatggaacaagtgagatcggacagggtaatttgtttgccatggaaattaaccttcaagccaatctatggcgaagtttcctttattccaatgtggctctgtatctcccagactcgtacaaatacaccccgtccaatgtcactcttccagaaaacaaaaacacctacgactacatgaacgggcgggtggtgccgccatctctagtagacacctatgtgaacattggtgccaggtggtctctggatgccatggacaatgtcaacccattcaaccaccaccgtaacgctggcttgcgttaccgatctatgcttctgggtaacggacgttatgtgcctttccacatacaagtgcctcaaaaattcttcgctgttaaaaacctgctgcttctcccaggctcctacacttatgagtggaactttaggaaggatgtgaacatggttctacagagttccctcggtaacgacctgcgggtagatggcgccagcatcagtttcacgagcatcaacctctatgctacttttttccccatggctcacaacaccgcttccacccttgaagccatgctgcggaatgacaccaatgatcagtcattcaacgactacctatctgcagctaacatgctctaccccattcctgccaatgcaaccaatattcccatttccattccttctcgcaactgggcggctttcagaggctggtcatttaccagactgaaaaccaaagaaactccctctttggggtctggatttgacccctactttgtctattctggttctattccctacctggatggtaccttctacctgaaccacacttttaagaaggtttccatcatgtttgactcttcagtgagctggcctggaaatgacaggttactatctcctaacgaatttgaaataaagcgcactgtggatggcgaaggctacaacgtagcccaatgcaacatgaccaaagactggttcttggtacagatgctcgccaactacaacatcggctatcagggcttctacattccagaaggatacaaagatcgcatgtattcatttttcagaaacttccagcccatgagcaggcaggtggttgatgaggtcaattacaaagacttcaaggccgtcgccataccctaccaacacaacaactctggctttgtgggttacatggctccgaccatgcgccaaggtcaaccctatcccgctaactatccctatccactcattggaacaactgccgtaaatagtgttacgcagaaaaagttcttgtgtgacagaaccatgtggcgcataccgttctcgagcaacttcatgtctatgggggcccttacagacttgggacagaatatgctctatgccaactcagctcatgctctggacatgacctttgaggtggatcccatggatgagcccaccctgctttatcttctcttcgaagttttcgacgtggtcagagtgcatcagccacaccgcggcatcatcgaggcagtctacctgcgtacaccgttctcggccggtaacgctaccacgtaagaagcttcttgcttcttgcaaatagcagctgcaaccatggcctgcggatcccaaaacggctccagcgagcaagagctcagagccattgtccaagacctgggttgcggaccctattttttgggaacctacgataagcgcttcccggggttcatggcccccgataagctcgcctgtgccattgtaaatacggccggacgtgagacggggggagagcactggttggctttcggttggaacccacgttctaacacctgctacctttttgatccttttggattctcggatgatcgtctcaaacagatttaccagtttgaatatgagggtctcctgcgccgcagcgctcttgctaccaaggaccgctgtattacgctggaaaaatctacccagaccgtgcagggcccccgttctgccgcctgcggacttttctgctgcatgttccttcacgcctttgtgcactggcctgaccgtcccatggacggaaaccccaccatgaaattgctaactggagtgccaaacaacatgcttcattctcctaaagtccagcccaccctgtgtgacaatcaaaaagcactctaccattttcttaatacccattcgccttattttcgctctcatcgtacacacatcgaaagggccactgcgttcgaccgtatggatgttcaataatgactcatgtaaacaacgtgttcaataaacatcactttatttttttacatgtatcaaggctctggattacttatttatttacaagtcgaatgggttctgacgagaatcagaatgacccgcaggcagtgatacgttgcggaactgatacttgggttgccacttgaattcgggaatcaccaacttgggaaccggtatatcgggcaggatgtcactccacagctttctggtcagctgcaaagctccaagcaggtcaggagccgaaatcttgaaatcacaattaggaccagtgctctgagcgcgagagttgcggtacaccggattgcagcactgaaacaccatcagcgacggatgtctcacgcttgccagcacggtgggatctgcaatcatgcccacatccagatcttcagcattggcaatgctgaacggggtcatcttgcaggtctgcctacccatggcgggcacccaattaggcttgtggttgcaatcgcagtgcagggggatcagtatcatcttggcctgatcctgtctgattcctggatacacggctctcatgaaagcatcatattgcttgaaagcctgctgggctttactaccctcgggataaaacatcccgcaggacctgctcgaaaactggttagcctgcacagccggcatcattcacacagcagcgggcgtcattgttggctatttgcaccacacttctgccccagcggttttgggtgattttggttcgctcgggattctcctttaaggctcgttgtccgttctcgctggccacatccatctcgataatctgctccttctgaatcataatattgccatgcaggcacttcagcttgccctcataatcattgcagccatgaggccacaacgcacagcctgtacattcccaattatggtgggcgatctgagaaaaagaatgtatcattccctgcagaaatcttcccatcatcgtgctcagtgtcttgtgactagtgaaagttaactggatgcctcggtgctcttcgtttacgtactggtgacagatgcgcttgtattgttcgtgttgctcaggcattagtttaaaacaggttctaagttcgttatccagcctgtacttctccatcagcagacacatcacttccatgcctttctcccaagcagacaccaggggcaagctaatcggattcttaacagtgcaggcagcagctcctttagccagagggtcatctttagcgatcttctcaatgcttcttttgccatccttctcaacgatgcgcacgggcgggtagctgaaacccactgctacaagttgcgcctcttctctttcttcttcgctgtcttgactgatgtcttgcatggggatatgtttggtcttccttggcttctttttggggggtatcggaggaggaggactgtcgctccgttccggagacagggaggattgtgacgtttcgctcaccattaccaactgactgtcggtagaagaacctgaccccacacggcgacaggtgtttttcttcgggggcagaggtggaggcgattgcgaagggctgcggtccgacctggaaggcggatgactggcagaaccccttccgcgttcgggggtgtgctccctgtggcggtcgcttaactgatttccttcgcggctggccat

SEQ ID NO: 159 - DNA, 3425 bp, Human adenovirus
  misc_feature 1..3425: note = Ad35 E3; 27198 - 30622
  source 1..3425: mol_type = genomic DNA
atgtctggtgacgcggctgagctatctcggctgcgacatctagaccactgccgccgctttcgctgctttgcccgggaacttattgagttcatctacttcgaactccccaaggatcaccctcaaggtccggcccacggagtgcggattactatcgaaggcaaaatagactctcgcctgcaacgaattttctcccagcggcccgtgctgatcgagcgagaccagggaaacaccacggtttccatctactgcatttgtaatcaccccggattgcatgaaagcctttgctgtcttatgtgtactgagtttaataaaaactgaattaagactctcctacggactgccgcttcttcaacccggattttacaaccagaagaacaaaacttttcctgtcgtccaggactctgttaacttcacctttcctactcacaaactagaagctcaacgactacaccgcttttccagaagcattttccctactaatactactttcaaaaccggaggtgagctccacggtctccctacagaaaacccttgggtggaagcgggccttgtagtactaggaattcttgcgggtgggcttgtgattattctttgctacctatacacaccttgcttcactttcctagtggtgttgtggtattggtttaaaaaatggggcccatactagtcttgcttgttttactttcgcttttggaaccgggttctgccaattacgatccatgtctagactttgacccagaaaactgcacacttacttttgcacccgacacaagccgcatctgtggagttcttattaagtgcggatgggaatgcaggtccgttgaaattacacacaataacaaaacctggaacaataccttatccaccacatgggagccaggagttcccgagtggtacactgtctctgtccgaggtcctgacggttccatccgcattagtaacaacactttcattttttctgaaatgtgcgatctggccatgttcatgagcaaacagtattctctatggcctcctagcaaggacaacatcgtaacgttctccattgcttattgcttgtgcgcttgccttcttactgctttactgtgcgtatgcatacacctgcttgtaaccactcgcatcaaaaacgccaataacaaagaaaaaatgccttaacctctttctgtttacagacatggcttctcttacatctctcatatttgtcagcattgtcactgccgctcacggacaaacagtcgtctctatcccactaggacataattacactctcataggacccccaatcacttcagaggtcatctggaccaaactgggaagcgttgattactttgatataatctgtaacaaaacaaaaccaataatagtaacttgcaacatacaaaatcttacattgattaatgttagcaaagtttacagcggttactattatggttatgacagatacagtagtcaatatagaaattacttggttcgtgttacccagttgaaaaccacgaaaatgccaaatatggcaaagattcgatccgatgacaattctctagaaacttttacatctcccaccacacccgacgaaaaaaacatcccagattcaatgattgcaattgttgcagcggtggcagtggtgatggcactaataataatatgcatgcttttatatgcttgtcgctacaaaaagtttcatcctaaaaaacaagatctcctactaaggcttaacatttaatttctttttatacagccatggtttccactaccacattccttatgcttactagtctcgcaactctgacttctgctcgctcacacctcactgtaactataggctcaaactgcacactaaaaggacctcaaggtggtcatgtcttttggtggagaatatatgacaatggatggtttacaaaaccatgtgaccaacctggtagatttttctgcaacggcagagacctaaccattatcaacgtgacagcaaatgacaaaggcttctattatggaaccgactataaaagtagtttagattataacattattgtactgccatctaccactccaccaccccgcacaactactttctctagcagcagtgtcgctaacaatacaatttccaatccaacctttgccgcgcttttaaaacgcactgtgaataattctacaacttcacatacaacaatttccacttcaacaatcagcatcatcgctgcagtgacaattggaatatctattcttgtttttaccataacctactacgcctgctgctatagaaaagacaaacataaaggtgatccattacttagatttgatatttaatttgttctttttttttatttacagtatggtgaacaccaatcatggtacctagaaatttcttcttcaccatactcatctgtgcttttaatgtttgcgctactttcacagcagtagccacagcaaccccagactgtataggagcatttgcttcctatgcactttttgcttttgttacttgcatctgcgtatgtagcatagtctgcctggttattaattttttccaacttctagactggatccttgtgcgaattgcctacctgcgccaccatcccgaataccgcaaccaaaatatcgcggcacttcttagactcatctaaaaccatgcaggctatactaccaatatttttgcttctattgcttccctacgctgtctcaaccccagctgcctatagtactccaccagaacaccttagaaaatgcaaattccaacaaccgtggtcatttcttgcttgctatcgagaaaaatcagaaatccccccaaatttaataatgattgctggaataattaatataatctgttgcaccataatttcatttttgatataccccctatttgattttggctggaatgctcccaatgcacatgatcatccacaagacccagaggaacacattcccccacaaaacatgcaacatccaatagcgctaatagattacgaaagtgaaccacaacccccactactccctgctattagttacttcaacctaaccggcggagatgactgaaacactcaccacctccaattccgccgaggatctgctcgatatggacggccgcgtctcagaacaacgacttgcccaactacgcatccgccagcagcaggaacgcgtggccaaagagctcagagatgtcatccaaattcaccaatgcaaaaaaggcatattctgtttggtaaaacaagccaagatatcctacgagatcaccgctactgaccatcgcctctcttacgaacttggcccccaacgacaaaaatttacctgcatggtgggaatcaaccccatagttatcacccaacaaagtggagatactaagggttgcattcactgttcctgcgattccatcgagtgcacctacaccctgctgaagaccctatgcggcctaagagacctgctaccaatgaattaaa

SEQ ID NO: 160 - DNA, 972 bp, Human adenovirus
  misc_feature 1..972: note = Ad35 fiber; 30826 - 31797
  source 1..972: mol_type = genomic DNA
atgaccaagagagtccggctcagtgactccttcaaccctgtctacccctatgaagatgaaagcacctcccaacaccccttttataacccagggtttatttccccaaatggcttcacacaaagcccagacggagttcttactttaaaatgtttaaccccactaacaaccacaggcggatctctacagctaaaagtgggagggggacttacagtggatgacactgatggtaccttacaagaaaacatacgtgctacagcacccattactaaaaataatcactctgtagaactatccattggaaatggattagaaactcaaaacaataaactatgtgccaaattgggaaatgggttaaaatttaacaacggtgacatttgtataaaggatagtattaacaccttatggactggaataaaccctccacctaactgtcaaattgtggaaaacactaatacaaatgatggcaaacttactttagtattagtaaaaaatggagggcttgttaatggctacgtgtctctagttggtgtatcagacactgtgaaccaaatgttcacacaaaagacagcaaacatccaattaagattatattttgactcttctggaaatctattaactgaggaatcagacttaaaaattccacttaaaaataaatcttctacagcgaccagtgaaactgtagccagcagcaaagcctttatgccaagtactacagcttatcccttcaacaccactactagggatagtgaaaactacattcatggaatatgttactacatgactagttatgatagaagtctatttcccttgaacatttctataatgctaaacagccgtatgatttcttccaatgttgcctatgccatacaatttgaatggaatctaaatgcaagtgaatctccagaaagcaacatagctacgctgaccacatccccctttttcttttcttacattacagaagacgacaactaa

SEQ ID NO: 161 - DNA, 126 bp, Human adenovirus
  misc_feature 1..126: note = Ad35 fiber tail; 30826 - 30951
  source 1..126: mol_type = genomic DNA
atgaccaagagagtccggctcagtgactccttcaaccctgtctacccctatgaagatgaaagcacctcccaacaccccttttataacccagggtttatttccccaaatggcttcacacaaagccca

SEQ ID NO: 162 - DNA, 273 bp, Human adenovirus; identical to SEQ ID NO: 144
  misc_feature 1..273: note = Ad35 fiber shaft; 30952 - 31224
  source 1..273: mol_type = genomic DNA

SEQ ID NO: 163 - DNA, 573 bp, Human adenovirus
  misc_feature 1..573: note = Ad35 fiber knob; 31225 - 31797
  source 1..573: mol_type = genomic DNA
ttatggactggaataaaccctccacctaactgtcaaattgtggaaaacactaatacaaatgatggcaaacttactttagtattagtaaaaaatggagggcttgttaatggctacgtgtctctagttggtgtatcagacactgtgaaccaaatgttcacacaaaagacagcaaacatccaattaagattatattttgactcttctggaaatctattaactgaggaatcagacttaaaaattccacttaaaaataaatcttctacagcgaccagtgaaactgtagccagcagcaaagcctttatgccaagtactacagcttatcccttcaacaccactactagggatagtgaaaactacattcatggaatatgttactacatgactagttatgatagaagtctatttcccttgaacatttctataatgctaaacagccgtatgatttcttccaatgttgcctatgccatacaatttgaatggaatctaaatgcaagtgaatctccagaaagcaacatagctacgctgaccacatccccctttttcttttcttacattacagaagacgacaactaa

SEQ ID NO: 164 - DNA, 1686 bp, Human adenovirus
  misc_feature 1..1686: note = Ad35 penton; 13690 - 15375
  source 1..1686: mol_type = genomic DNA
atgaggcgagtcgtgctaggcggagcggtggtgtatccggagggtcctcctccttcgtacgagagcgtgatgcagcagcagcaggcgacggcggtgatgcaatccccactggaggctccctttgtgcctccgcgatacctggcacctacggagggcagaaacagcattcgttactcggaactggcacctcagtacgataccaccaggttgtatctggtggacaacaagtcggcggacattgcttctctgaactatcagaatgaccacagcaacttcttgaccacggtggtgcagaacaatgactttacccctacggaagccagcacccagaccattaactttgatgaacgatcgcggtggggcggtcagctaaagaccatcatgcatactaacatgccaaacgtgaacgagtatatgtttagtaacaagttcaaagcgcgtgtgatggtgtccagaaaacctcccgacggtgctgcagttggggatacttatgatcacaagcaggatattttggaatatgagtggttcgagtttactttgccagaaggcaacttttcagttactatgactattgatttgatgaacaatgccatcatagataattacttgaaagtgggtagacagaatggagtgcttgaaagtgacattggtgttaagttcgacaccaggaacttcaagctgggatgggatcccgaaaccaagttgatcatgcctggagtgtatacgtatgaagccttccatcctgacattgtcttactgcctggctgcggagtggattttaccgagagtcgtttgagcaaccttcttggtatcagaaaaaaacagccatttcaagagggttttaagattttgtatgaagatttagaaggtggtaatattccggccctcttggatgtagatgcctatgagaacagtaagaaagaacaaaaagccaaaatagaagctgctacagctgctgcagaagctaaggcaaacatagttgccagcgactctacaagggttgctaacgctggagaggtcagaggagacaattttgcgccaacacctgttccgactgcagaatcattattggccgatgtgtctgaaggaacggacgtgaaactcactattcaacctgtagaaaaagatagtaagaatagaagctataatgtgttggaagacaaaatcaacacagcctatcgcagttggtatctttcgtacaattatggcgatcccgaaaaaggagtgcgttcctggacattgctcaccacctcagatgtcacctgcggagcagagcaggtttactggtcgcttccagacatgatgaaggatcctgtcactttccgctccactagacaagtcagtaactaccctgtggtgggtgcagagcttatgcccgtcttctcaaagagcttctacaacgaacaagctgtgtactcccagcagctccgccagtccacctcgcttacgcacgtcttcaaccgctttcctgagaaccagattttaatccgtccgccggcgcccaccattaccaccgtcagtgaaaacgttcctgctctcacagatcacgggaccctgccgttgcgcagcagtatccggggagtccaacgtgtgaccgttactgacgccagacgccgcacctgtccctacgtgtacaaggcactgggcatagtcgcaccgcgcgtcctttcaagccgcactttctaa

SEQ ID NO: 165 - DNA, 2859 bp, Human adenovirus
  misc_feature 1..2859: note = Ad35 hexon; 18255 - 21113
  source 1..2859: mol_type = genomic DNA
atggccaccccatcgatgctgccccaatgggcatacatgcacatcgccggacaggatgcttcggagtacctgagtccgggtctggtgcagttcgcccgcgccacagacacctacttcaatctgggaaataagtttagaaatcccaccgtagcgccgacccacgatgtgaccaccgaccgtagccagcggctcatgttgcgcttcgtgcccgttgaccgggaggacaatacatactcttacaaagtgcggtacaccctggccgtgggcgacaacagagtgctggatatggccagcacgttctttgacattaggggcgtgttggacagaggtcccagtttcaaaccctattctggtacggcttacaactctctggctcctaaaggcgctccaaatgcatctcaatggattgcaaaaggcgtaccaactgcagcagccgcaggcaatggtgaagaagaacatgaaacagaggagaaaactgctacttacacttttgccaatgctcctgtaaaagccgaggctcaaattacaaaagagggcttaccaataggtttggagatttcagctgaaaacgaatctaaacccatctatgcagataaactttatcagccagaacctcaagtgggagatgaaacttggactgacctagacggaaaaaccgaagagtatggaggcagggctctaaagcctactactaacatgaaaccctgttacgggtcctatgcgaagcctactaatttaaaaggtggtcaggcaaaaccgaaaaactcggaaccgtcgagtgaaaaaattgaatatgatattgacatggaattttttgataactcatcgcaaagaacaaacttcagtcctaaaattgtcatgtatgcagaaaatgtaggtttggaaacgccagacactcatgtagtgtacaaacctggaacagaagacacaagttccgaagctaatttgggacaacagtctatgcccaacagacccaactacattggcttcagagataactttattggactcatgtactataacagtactggtaacatgggggtgctggctggtcaagcgtctcagttaaatgcagtggttgacttgcaggacagaaacacagaactttcttaccaactcttgcttgactctctgggcgacagaaccagatactttagcatgtggaatcaggctgtggacagttatgatcctgatgtacgtgttattgaaaatcatggtgtggaagatgaacttcccaactattgttttccactggacggcataggtgttccaacaaccagttacaaatcaatagttccaaatggagaagataataataattggaaagaacctgaagtaaatggaacaagtgagatcggacagggtaatttgtttgccatggaaattaaccttcaagccaatctatggcgaagtttcctttattccaatgtggctctgtatctcccagactcgtacaaatacaccccgtccaatgtcactcttccagaaaacaaaaacacctacgactacatgaacgggcgggtggtgccgccatctctagtagacacctatgtgaacattggtgccaggtggtctctggatgccatggacaatgtcaacccattcaaccaccaccgtaacgctggcttgcgttaccgatctatgcttctgggtaacggacgttatgtgcctttccacatacaagtgcctcaaaaattcttcgctgttaaaaacctgctgcttctcccaggctcctacacttatgagtggaactttaggaaggatgtgaacatggttctacagagttccctcggtaacgacctgcgggtagatggcgccagcatcagtttcacgagcatcaacctctatgctacttttttccccatggctcacaacaccgcttccacccttgaagccatgctgcggaatgacaccaatgatcagtcattcaacgactacctatctgcagctaacatgctctaccccattcctgccaatgcaaccaatattcccatttccattccttctcgcaactgggcggctttcagaggctggtcatttaccagactgaaaaccaaagaaactccctctttggggtctggatttgacccctactttgtctattctggttctattccctacctggatggtaccttctacctgaaccacacttttaagaaggtttccatcatgtttgactcttcagtgagctggcctggaaatgacaggttactatctcctaacgaatttgaaataaagcgcactgtggatggcgaaggctacaacgtagcccaatgcaacatgaccaaagactggttcttggtacagatgctcgccaactacaacatcggctatcagggcttctacattccagaaggatacaaagatcgcatgtattcatttttcagaaacttccagcccatgagcaggcaggtggttgatgaggtcaattacaaagacttcaaggccgtcgccataccctaccaacacaacaactctggctttgtgggttacatggctccgaccatgcgccaaggtcaaccctatcccgctaactatccctatccactcattggaacaactgccgtaaatagtgttacgcagaaaaagttcttgtgtgacagaaccatgtggcgcataccgttctcgagcaacttcatgtctatgggggcccttacagacttgggacagaatatgctctatgccaactcagctcatgctctggacatgacctttgaggtggatcccatggatgagcccaccctgctttatcttctcttcgaagttttcgacgtggtcagagtgcatcagccacaccgcggcatcatcgaggcagtctacctgcgtacaccgttctcggccggtaacgctaccacgtaa

SEQ ID NO: 166 - protein, 323 aa, Human adenovirus
  REGION 1..323: note = misc_feature - Ad35 fiber; 1 - 323 (GenBank accession no. AP_000601); Human adenovirus 35
MTKRVRLSDSFNPVYPYEDESTSQHPFINPGFISPNGFTQSPDGVLTLKCLTPLTTTGGSLQLKVGGGLTVDDTDGTLQENIRATAPITKNNHSVELSIGNGLETQNNKLCAKLGNGLKFNNGDICIKDSINTLWTGINPPPNCQIVENTNTNDGKLTLVLVKNGGLVNGYVSLVGVSDTVNQMFTQKTANIQLRLYFDSSGNLLTEESDLKIPLKNKSSTATSETVASSKAFMPSTTAYPFNTTTRDSENYIHGICYYMTSYDRSLFPLNISIMLNSRMISSNVAYAIQFEWNLNASESPESNIATLTTSPFFFSYITEDDN

SEQ ID NO: 167 - protein, 91 aa, Human adenovirus; identical to SEQ ID NO: 149
  REGION 1..91: note = misc_feature - Ad35 fiber shaft; 43 - 133 (GenBank accession no. AP_000601); Human adenovirus 35

SEQ ID NO: 168 - protein, 190 aa, Human adenovirus
  REGION 1..190: note = misc_feature - Ad35 fiber knob; 134 - 323 (GenBank accession no. AP_000601); Human adenovirus 35
LWTGINPPPNCQIVENTNTNDGKLTLVLVKNGGLVNGYVSLVGVSDTVNQMFTQKTANIQLRLYFDSSGNLLTEESDLKIPLKNKSSTATSETVASSKAFMPSTTAYPFNTTTRDSENYIHGICYYMTSYDRSLFPLNISIMLNSRMISSNVAYAIQFEWNLNASESPESNIATLTTSPFFFSYITEDDN

SEQ ID NO: 169 - protein, 561 aa, Human adenovirus
  REGION 1..561: note = misc_feature - Ad35 penton; 1 - 561 (GenBank accession no. AP_000580); Human adenovirus 35
MRRVVLGGAVVYPEGPPPSYESVMQQQQATAVMQSPLEAPFVPPRYLAPTEGRNSIRYSELAPQYDTTRLYLVDNKSADIASLNYQNDHSNFLTTVVQNNDFTPTEASTQTINFDERSRWGGQLKTIMHTNMPNVNEYMFSNKFKARVMVSRKPPDGAAVGDTYDHKQDILEYEWFEFTLPEGNFSVTMTIDLMNNAIIDNYLKVGRQNGVLESDIGVKFDTRNFKLGWDPETKLIMPGVYTYEAFHPDIVLLPGCGVDFTESRLSNLLGIRKKQPFQEGFKILYEDLEGGNIPALLDVDAYENSKKEQKAKIEAATAAAEAKANIVASDSTRVANAGEVRGDNFAPTPVPTAESLLADVSEGTDVKLTIQPVEKDSKNRSYNVLEDKINTAYRSWYLSYNYGDPEKGVRSWTLLTTSDVTCGAEQVYWSLPDMMKDPVTFRSTRQVSNYPVVGAELMPVFSKSFYNEQAVYSQQLRQSTSLTHVFNRFPENQILIRPPAPTITTVSENVPALTDHGTLPLRSSIRGVQRVTVTDARRRTCPYVYKALGIVAPRVLSSRTF

SEQ ID NO: 170 - protein, 952 aa, Human adenovirus
  REGION 1..952: note = misc_feature - Ad35 hexon; 1 - 952 (GenBank accession no. AP_000585); Human adenovirus 35
MATPSMLPQWAYMHIAGQDASEYLSPGLVQFARATDTYFNLGNKFRNPTVAPTHDVTTDRSQRLMLRFVPVDREDNTYSYKVRYTLAVGDNRVLDMASTFFDIRGVLDRGPSFKPYSGTAYNSLAPKGAPNASQWIAKGVPTAAAAGNGEEEHETEEKTATYTFANAPVKAEAQITKEGLPIGLEISAENESKPIYADKLYQPEPQVGDETWTDLDGKTEEYGGRALKPTTNMKPCYGSYAKPTNLKGGQAKPKNSEPSSEKIEYDIDMEFFDNSSQRTNFSPKIVMYAENVGLETPDTHVVYKPGTEDTSSEANLGQQSMPNRPNYIGFRDNFIGLMYYNSTGNMGVLAGQASQLNAVVDLQDRNTELSYQLLLDSLGDRTRYFSMWNQAVDSYDPDVRVIENHGVEDELPNYCFPLDGIGVPTTSYKSIVPNGEDNNNWKEPEVNGTSEIGQGNLFAMEINLQANLWRSFLYSNVALYLPDSYKYTPSNVTLPENKNTYDYMNGRVVPPSLVDTYVNIGARWSLDAMDNVNPFNHHRNAGLRYRSMLLGNGRYVPFHIQVPQKFFAVKNLLLLPGSYTYEWNFRKDVNMVLQSSLGNDLRVDGASISFTSINLYATFFPMAHNTASTLEAMLRNDTNDQSFNDYLSAANMLYPIPANATNIPISIPSRNWAAFRGWSFTRLKTKETPSLGSGFDPYFVYSGSIPYLDGTFYLNHTFKKVSIMFDSSVSWPGNDRLLSPNEFEIKRTVDGEGYNVAQCNMTKDWFLVQMLANYNIGYQGFYIPEGYKDRMYSFFRNFQPMSRQVVDEVNYKDFKAVAIPYQHNNSGFVGYMAPTMRQGQPYPANYPYPLIGTTAVNSVTQKKFLCDRTMWRIPFSSNFMSMGALTDLGQNMLYANSAHALDMTFEVDPMDEPTLLYLLFEVFDVVRVHQPHRGIIEAVYLRTPFSAGNATT

SEQ ID NO: 171 - protein, 42 aa, Human adenovirus; identical to SEQ ID NO: 63
  REGION 1..42: note = misc_feature - Ad35 fiber tail; 1 - 42 (GenBank accession no. AP_000601); Human adenovirus 35

SEQ ID NO: 172 - DNA, 159 bp, Human adenovirus
  misc_feature 1..159: note = Ad37 5 (left) ITR; 1 - 159
  source 1..159: mol_type = genomic DNA
catcatcataatataccccacaaagtaaacaaaagttaatatgcaaatgagcttttgaattttaacggttttggggcggagccaacgctgattggacgagaagcggtgatgcaaataacgtcacgacgcacggctaacggccggcgcggaggcgtggcc

SEQ ID NO: 173 - DNA, 159 bp, Human adenovirus
  misc_feature 1..159: note = Ad37 3 (right) ITR; 35055 - 35213
  source 1..159: mol_type = genomic DNA
ggccacgcctccgcgccggccgttagccgtgcgtcgtgacgttatttgcatcaccgcttctcgtccaatcagcgttggctccgccccaaaaccgttaaaattcaaaagctcatttgcatattaacttttgtttactttgtggggtatattatgatgatg

SEQ ID NO: 174 - DNA, 320 bp, Human adenovirus
  misc_feature 1..320: note = Ad37 Packaging Sequence; 160 - 479
  source 1..320: mol_type = genomic DNA
taggccggaagcaagtcgcggggctaatgacgtataaaaaagcggactttagacccggaaacggccgattttcccgcggccacgcccggatatgaggtaattctgggcggatgcaagtgaaattaggtcattttggcgccaaaactgaatgaggaagtgaaaagtgaaaaatacctgtcccgcccagggcggaatatttaccgagggccgagagactttgaccgattacgtggggtttcgattgcggtgtttttttcgcgaatttccgcgtccgtgtgaaagtccggtgtttatgtcacagatcagctgatccacagggt

SEQ ID NO: 175 - DNA, 3388 bp, Human adenovirus
  misc_feature 1..3388: note = Ad37 E1; 480 - 3867
  source 1..3388: mol_type = genomic DNA
atttaaaccagttgagcccgtcaagaggccactcttgagtgccagcgagtagagatttctctgagctccgctcccaaagtgtgagaaaaatgagacacctgcgcctcctgtcttcaactgtgcctattaacatggccgcattattgctggaggactatgtgagtacagtattggaggacgaactacatccatctccatttgagctgggacctacacttcaggacctttatgatttggaggtagatgcccatgatgacgacccaaacgaagaggctgtgaatttaatatttccagaatctctgattcttcaggctgacatagccagcgaagctgtacctacaccacttcatacaccgactttgtcacccatacctgaattggaagaggaggacgagttagacctccgatgttatgaggaaggttttcctcccagcgattcagaggacgaacagggtgagcagagcatggctctaatctcagaatatgcttgtgtggttgtggaagagcattttgtgttggacaatcctgaggtgcccgggcaaggctgtagatcctgccagtaccaccgggataagaccggagacacaaacgcctcctgcgctctgtgttacatgaaaaagaacttcagctttatttacagtaagtggagtgaatgtgagagaggctgagtgcttaacacataactgggtgatgcttaaacagctgtgctaagtgtggtttatttttgtttctaggtccggtgtcagaggatgagtcatcaccctcagaagaaaaccacccgtgtccccctgagctgtcaggcgaaacgcccctgcaagtgcacaaacccaccccagtcagacccagtggcgagaggcgagcagctgttgaaaaaattgaggacttgttacatgacatgggtggggatgaacctttggacctgagcttgaaacgccccaggaactaggcgcagctgtgcttagtcatgtgtaaataaagttgtacaataaaagtatatgtgacgcatgcaaggtgtggtttatgactcatgggcggggcttagtcctatataagtggcaacacctgggcactgggcacagaccttcagggagttcctgatggatgtgtggactatccttgcagactttagcaagacacgccggcttgtagaggatagttcagacgggtgctccgggttctggagacactggtttggaactcctctatctcgactggtgtacacagttaagaaggattataacgaggaatttgaaaatctttttgctgattgctctggcctgctagattctctgaatctcggccaccagtcccttttccaggaaagggtactccacagccttgatttttccagcccagggcgcactacagccggggttgcttttgtggtttttctggttgacaaatggagccagaacacccaactgagcaggggctacattctggacttcgcagccatgcacctgtggagggcatgggtgaggcagcggggacagagaatcttgaactactggcttatacagccagcagctccgggtcttcttcgtctacacagacaaacatccatgttggaggaagaaatgaggcaggccatggacgagaacccgaggagcggcctggaccctccgtcggaagaggagctggattgaatcaggtatccagcttgtacccagagcttagcaaggtgctgacatccatggctaggggagtgaagagggagaggagcgatgggggcaataccgggatgatgaccgagctgacggccagcctgatgaatcgcaagcgcccagagcgcattacctggcacgagctacagatggagtgcagggatgagttgggcctgatgcaggataaatatggcctggagcagataaaaacacattggttgaacccagatgaggattgggaggaggccattaagaaatatgccaagatagccctgcgcccagattgcaagtacatagtgaccaagaccgtgaatattagacatgcctgctacatttcagggaacggggcagaggtggtcatcgataccctggacaaggccgccttcaggtgttgcatgatgggaatgagagcaggagtgatgaatatgaattccatgatcttcatgaacatgaagttcaatggagagaagtttaatggggtgctgttcatggccaacagccacatgaccctgcatggctgcagtttctttggcttcaacaatatgtgcgccgaggtctggggcgcttccaagatcaggggatgtaagttttatggctgctggatgggcgtggtcggaagacctaagagcgagatgtctgtgaagcagtgtgtgtttgagaaatgctacctgggagtctctaccgagggcaatgctagagtgagacactgctcttccctggatacgggctgcttctgcctggtgaagggtacggcctctctgaagcataatatggtgaagggctgcacagatgagcgcatgtacaacatgctaacatgcgactcgggggtctgtcatatcctgaagaacatccatgtgacctcccaccccagaaagaagtggccagtgtttgagaataacctgctgatcaagtgccatatgcacctgggtgccagaaggggcaccttccagccgtaccagtgcaactttagccagaccaagctgctgttggaaaacgatgccttctccagggtgaacctgaacggcatctttgacatggatgtctcggtgtacaagatcctgagatacgatgagaccaagtccagggtgcgcgcttgcgagtgcgggggcagacacaccaggatgcagccagtggccctggatgtgaccgaggagctgagaccagaccacctggtgatggcctgtaccgggaccgagttcagctccagtggggaggacacagattagaggtaggtttgagtagtgggcgtggctaatgtgagtataaaggcgggtgtcttacgagggtctttttgcttttctgcagacatcatgaacgggaccggcggggccttcgaaggggggctttttagcccttatttgacaacccgcctgccgggatgggccggagttcgtcagaatgtgatgggatctacggtggatgggcgtccagtgcttccagcaaattcctcgaccatgacctacgcgaccgtggggagctcgtcgcttgacagcaccgccgcagccgcggcagccgcagccgccatgacagcgacgagactggcctcgagctatatgcccagcagcggtagcagcccctctgtgcccagttccatcatcgccgaggagaaactgctggccctgctggccgagctggaagccctgagccgccagctggccgccctgacccagcaggtgtccgatctccgcgagcaacagcagcagcaaaataaatgattcaataaa

SEQ ID NO: 176 - DNA, 18876 bp, Human adenovirus
  misc_feature 1..18876: note = Ad37 E2; 22777 - 3902
  source 1..18876: mol_type = genomic DNA
atggccggcggcagtcaggacgtgcgccggttcatggagcgagaggccactccgccccggggccacgggtcggcgcgctatccgccggagcaggagaggagcccctcgccgccgccacctcctctgcccaccaagcgccgaaagtatcagcgggtgggctccgggtcttccgaggaggacgtggtccccgtggacagccctccaaaaaagaagcaagccagaaagaccaagcatgtgaccaaggtagaccccgacgaagagatgccccaggaagacgccgtgatcgtgggagtgggattcagccagcctccggttctgttgaaggaaggcaaggacggaaaacgcatcgtcgagcccgcgacccctggtgtcctgaacgtgcgcaaccccctgagtctgcctctggtctcgtcatgggagaagggcatggataccatgaacgtgctgatggaacgctaccgcgtcgacagcggcttgcgcgatgcttacaagctcatgccggagcagaccgagatcttccagaagatgtgccagacctggatgaacgaggaggcccgcgggatgcaactgacattcaccacccagaaagcatttagcaccattatgggtcgcctgttgcaaggttacattttcagccacagcgggatcgcgcacaagaattgggagtgcaccggctgcgtcctgtgggatcacggctgcaccgaggtggaaggtcagctcaagtgtctgcatggaacggtgatgattcacaaggaccacgtggtggagatggatgtgaccagcgagaacggacagcgcgcgctgaaggagcagcccagcaaggctaaggtgacccagaaccgctggggacggagcgtggtgcaactgaccagccatgacgcgcgctgctgcgtgcatgatgccgggtgcgggaataaccagttcagcgggaagagctgcggcctgttttttagcgagggggccaaggcccagcaagctttcaagcagatcgcggccttcgtcaaggccctctacccgaatatgcagcgcggcgcggggatgatgctgatgcccgtgcactgcgagtgtaaccacaagcctcagagcgtgcccttcctgggccgccagctgtgcaagatgaccccgttcggcctgagcaacgccgaggacctggacaaggatcagattagcgacaagagcgtgcttgccagtgtgaagtaccccagtctgatggtgttccagtgctgcaaccccgtgtaccgcaactcgcgcgcgcagagcaccggtcccaactgcgatttcaagatctccggccctgacatgctgggcgccctgcaaatgagccggcgcatgtggagcgagaccttccccgagactccagtgcccaaactggtgatccccgagttcaagtggcagcccaagttccagtaccgcaacgtggccctccccagcgcggcgcacaacgacgagcgcgagaaccccttcgacttttaaataacttgcatatactccagcgcatgtgtaaaataaaagtgctgtttatttgagtcatacacgcagttgtttcattttatcaaaagcggtggcgtgttcgatggcggcgcggtgggagcgaaagtagggggagtggcgcgcgaggaagcggtagagctcctcctggttgcgcctgagggtgggcagcacctgtggcgattgtagcatgccgttgggcacccccgtcagcaagttcatggtggggttcccgtccatgggtcggtcgggccagtgcacgaaggcatgcaagaacatgcaacagaagagtccgcaggcggcggagtcgggcccctgcacggtctgggtggactgttcgaggctaagacagcgatcgggcgaggaggccagggcgcttcggcgcagcatggcctcgtactcgaagctgtaaatctgcttgagccggcggtccgagaacccgaaggggtcgaacatgtagcaggtgcgcgagcgcgggttccagccaaaggcgagccagtgcacgcccccggtctcgcggccggccgtgttgacgatggcgcaggccagcttgtcgccggcgaggaagcccgggaagcgcttgtcgtgggtgcccaaaaagtagggcccgcagcccaggtcgcgcacgatggccgcgagctctcgttcgctggagccgctcatgcttaggtggtggcgttgccggcggagaagggcgtgcgcaggtagacggcctcgatgacgccgcggtgcggctggtgcactctgaccacgtcgaaaacttcgaagagaagatagaggagggtgggctcatccatggggtccacctcgaaggtcatgtcgagcgcgtgggccgagttggcgtagagcatgttctgacccaggtcggtgagggcgcccatggacatgaagttgctggagaaggggatgcgccacatgaccctgtcgcagaggaactttttctgggtgacggatggcactgcggtggagccgatgagcgggtaggggaagttggcggggtagggctgcccctgacgcatggtgggtgccaggtagccggtgaagccagagttgttgtgctggaagggcagggtgactgccttgtagtccttgtagttgatctcatcgaccacctgcctgctcatgggctggaagttgcggaagaaggagtacatgcggtccttgtagccctcgggcacatggaagccctggtagccgatgttgtagtgggagagcatctggacgaggaaccagtccttggtcatgttgcattgggccacgttgtagccctccccgtcgacgctgcgcttgatctcgaactcgttcggcgtaagcagccggtcgttgccgggccagctgaccgaggagtcgaacatgatggaaaccttcttgaaggtgtggttgaggtagaaggtcccgtcgaggtaggggatggagcccgagtagacaaagtaggggtcaaaacccgagccaagggagggagtttccttggtcttgagccgggtgaaactccagccgcggaaggcggcccagttgcgcgaggggatggaaatgggcacgttggtggccttggccgggatggggtagagcatgttggcggccgagaggtagtcgttgaaggactggtcgttggtgtcgttgcgcagcatggcttccagggtggaggcggtgttgtgcgccatggggaagaaggtggcgtagaggttgacgctgtcgaagcggacggaggcgccgtcgacgcgcaggtcgtttccgagggaactctgcaggatcatgttgacatccttgcggaagttccactcgtaggtgtaggagccggggagcaggagcaggttcttgatggcaaagaacttttggggcacttggatgtggaagggcacgtagcggccattgcccaaaagcatggagcggtagcgcaggcccgcattgcggtggtggttaaaggggttgacgttgtccatggggtccagcgaccagcgggcgccgatgttaatgtaggcgtccaccagcgagggggctaccacgcggccgttcatgtactcataggtgttggtgttggcgggcagcgtgacgttggccggcgtgtacttgtaggagtcgggcaggtacagggccacgttcgagtacagaaaactcttccacaggttggcctggaggttgatctccatggcaaagatgttgccctttccaatttgattatgggctgaaatgtcatcatcctttacccaatctccattaactccgcctcctgtttgatcaggctttagtttaacaccttgataggctgaattagtttgaacaccgtccaaggggaagcaatagttaggaagttcatcttccacaccgtggttctcaatgatcctgacatcgggatcatagctgtccaccgcagagttccacatactaaaatatctggttctgtcaccaagagaatctagcaagagctggtaagacagttcggtgtttctgtcttgcaagtcgaccacggcattcaactgagaagcctgaccagccagcacacccatgttgccagtgctgttgtagtacaatagccccacaaagttgtctctgaagccaatgtagtttggtctgttaggcatggactgctgagttaaattagcttcagaactgtcatcctctttgcctggtttgtacaccacatgtgtatctggagtttccaaatctacattttcagtgtacaacaccacatctggtatatttatagtgcttgagtcaaagaaagccatgtccacatcgtattgaggatcggtaccattgggtgtttctttcaatttagcctgcccaccttccttgtttgtgggtttagcaaatgaaccatagcatggcttcattttggtatcttttttaagagccctgccgccataatattcatcattatcctgccagttttcttctccaacttgaggttctggctggaaagttttgtctgcatagattggtttttcagcatttgctgttttgtcagttccaatctgcaaaccgtctttagaaatattactgcctcccatggcggcaagtccaaatgtctttgtaacatctttttctgctccagttcctccgttttgcttttctttggtagtccactgactgggattgggggcgcccttgggggccaggctgttgtaagccgtgcccgagtagggtttgaagcttgggccgcggtccaggacgccgcggatgtcaaagtaagtgctggccatgtctagcacccggttgtcgcccacggccagagtgaagcgcgccttgtacgagtacgtggtgtcctcgcgatccacgggcacaaagcgcagcgtcagacgctgggaccggtccgtggtcacatcgtgggtgggagccaccgtggggttcctaaacttgttgcccaggctgaagtacgtgtcggtggcgcgggcaaactgcaccagacccgggctcaggtactccgaggcgtcctgcccggcgatgtgcatgtacgcccactgcggcatcatcgagggggtggccatcttcgcgcgttctctggcggtaaggcacatacaagttaagctctccctttagtgtcctctttactctctctcaatagcatcggcggcgcttcagacttttcactcccaggcccacgatactgtgcagcgtgctctgccagttctgggcctggcggcgggcggggacgcggcgcacggcggtcgccaccggagggggctgcacaaccggagctgcttttggtggagcgggcgtgggtggtggaggcaggtcaagggtagcgggtttcattacacccgtggccagcggcgcgatgatgcgcgtggtgggcatgccggccttgacggcctcctcgtacgagggcggctcgtccacttgcaggattgtctcctccgcgtcgggccgcggtcgcttctcgcccttgggcggcggaagagttgcatcttccatctccaccaccgtgggcggccgcgggtccaggcggctgtttatctcgcgctgcacggcctggttcgcgatgtccaccaccccgttaatgcccgaggccagcccgtccaccaccttttgctggaagttctggtctttgagcttttcccttaacaactgcccagtgctactattccaggccttgttcccataggtccggagcgtcgagccgaaatttttaagcccgctccagacactgctccaattgaaggcgcccccgttcagctggctggtgccgatctcgttccaggtgcccatgaacggccgcgtgccgtgccgcggagccagggacgcaaaattgatgtcttccattctaaaaatatacaggaccaggtgtgtcagagtctaaagaggctttattcgcacatcaacggcgctgcgacgcctgcagcgcaacggaagctatgcccgggatcgtgccgatggccgcggcgattatggggatgagcgcgggcagaaagccgccactcaggcgcctgcgcatggcccgccgccggcggcggttcaggccactgcctgccatgcctctcctgcggcgggatcttcctcggtaattcgggacggggatgcgcaggcggcaagtgagagccatctctctgcaacagtatcacagcacacggattaaaggatgctggggtggtagcgcacggtgggcagaacgagcgagcggccccgccgcgtggtcacgcggcgcacgcgggcgggggccagacggcggcgggtggcggtgcggcggcggcgtttgctggctgggcgcctgcggctggcgtagtaccgggtgccgcggtagcctggcgtcgggatgatggaaggatgcaacacgtagttgggcatcagccggctggcggcgccccatcttcgcctcctgggaggctcggtagccgtggcggcggtagaagtggacgcggtagcggtggaggctgggagccaggggtcggtttgcacctcgatgctggtcgagggttttttgtcgacatccatgtcggtggggatctgaatgtccacggtttgcacgcccaggcccggcgccacctgcttgatggggcgcaccttgacctcgggctccacatccatttttacggtgtccagcacgtcctccacgcgccggcgcttgggcaccatgatctgcatggtcgggtacatgctctcgccctcgcgcttgaccccgcggctcggcagcagcactgcctggggcagcacctgctgcagggtcacgggctttaggctcggcgtggggttgctttcgtccagcggcagcgagatcagctcctcttcgcgcgaccgcttcccgtaggcgaactcgcccgcccgctccgccgcctggtccaggatgtcgtcgtcgccgtacacctcgtcatagctacgcttgctcctgaccgaggaccgctcgccgggcgtgaacaccaccgccgtgccgggccgcaacacacgctgcaccctgcgccccttccaatttacgcgccgccgcggagcgaactcgcgcacaaactctactgccccctcgtccacctcatccttttttttaacccgcttgattttgcggggtttctggtccgcctggggtggtccgtaaatctccggggcgacgacctggagcatctcctccttgattttgcgctttgacatcgtcgcttgcgggggaggacacaagcattagatcagggacgaggaggacgggtgcgcacgggcacgcgcacgcccgtgacggagtcgcgcacccagtacacgtttccgcgcctgggtctggtcatgctagagatggccgcggcggcggcagcggccgctcgtctgcgagtcctgcctgcgggggtgggtgcagtggcagcgcggcgcgcggctcgcatcatggcccggcggcccgtgcgtctggcgcggcgcagcagagctcgggcggcgcgcatggcgggcgtgctccggtggcgcctggcgatccgtcgccgccggctcttgcgtctggcatagtcacgcgcgtctgccaccacgctgtcgatgaccgcgtccacggtcgagggggcgggggtgtagttgcgcgcatcggcgaccaccgagtcgatgacgtcgtcgacggtggtgcgcacggcggcaggagcagaggtccgcccccgcttgtaagcgccccagggagcgcggaagtgaccgcggacgcggacggggtgctgctgggagcgtttcttggctcctccgtacatggtgctgggcctagtaagaccccagccggtgttattgctgggcgagatgagaatagacattttttagaaggtgcgactggaaagcacgcgcggcgcgactatgcccagggccttgtagacgtagggacaggtgcggcgacgggcgtcagtgacggtcactcgctggactccgcggatactgctgcgcagcggtagcgtcccgtgatctgtgagagcaggcacgttttcactgacggtggtgatggtgggcgcgggcgggcggcaaaggatctggttgtcggggaagcggttgaagacgtgggtgagggaggtgtagctgcggatgagctgggagtagacggcgaggtcgttgtaaaagctcttggcgcggaagggcatgagctcggcgccgaccacggggtagttgctgacttgctgggtagagcggaaggtgacggggtcttgcatgaggtccggcagcgaccagtagacttgctccgcgccgcaggtgacgtccggggtggtgagcagcgtccacgactgcacccccttctcgggatccccgtaggtataggacaggtaccaactgcggtacagggtgtctgtggttccctcgatcacattgtagcttctgtctgaatcatctttcaaaatggccttcaactcaatttcttttcctgctgctttggcttctgccgctgatgcatagttatctcctcttgggacggcatcattctgagccttaatagtatttgcatctgctttgccagcttcttccttatccttcagatactccttgacattcaggagagcggggatgttgccccctactaggtcctcatacatgattctgaagccctcttgaaaaggttgcttcttgcgaatgcccaggaggttgctcaggcggctctcggtgaaatccaccccgcagcccggcagcagcaccacgtccgggtggaaggcctcgtaggtgtagacccctggcatcaccagcttggtcaccgggtcccagcccagcttgaaatttctgctgtcaaacttgactccgatatcactctccagcacgccattttgccgccccacttgcaagtagttttccaagatggcgttgttcattaggtctatggtcatggtctcggaaaagttgccctcgggcagggtaaactcaaaccactgatactctaagatatccttgctcctatcatttgcatcagccccttccgccttttttctagccaccatcacccgcgccttaaacttgctggtgaacatgtactcgttcacattaggcatgttggtgtgcagaatggtcttcagatcaccgccccaccgcgaccgctcgtcaaaatttatcgtctgcgtgctggcctcggcaggggtgaaatcgttgttctgcaccaccgtggtcaggaagttgctgtggtcgttttggtagttcagggaagcgatgtccgccgacttgttgtccaccaaatacacgcgagtggtgtcgtacagcggagccagctccgagtaacgaatgctgtttctgccctccgtaggagccatataccgcggaggcacaaacggaacctccagggtcgcctgcgccatcacgctctcgtacgagggaggaggagaggaagacaccaccgcgcgcctcatctctaacaaggaagagaacgcacgctatggccttggtgagttttattttgcattcaaaacatccgtcgccccagtctgggctgcagatgcgcgaacgggttggccccaccgctcccgcccaagtccaacacgctgctatcgtcggccgagtcctcgtcgtcccacaccaggccccgctgccggtcgtgacgctgtcgccgcggcgcgggcgcaggttccctatggtcctgagcgtaggttttccagcggttcagtttgtccaccagactctctatcccgttattgaccatggcgttcttgacccgcggcggctgcagcagcgagtcgttcaggtactcgtcctcgcccagcaagcgcggccggctcaccctgccgctgttcaccgagcccggcaagctatgcaaactccctaagctaggaaaggggctccgacccaccgcgccctcgctcgcgggcgtgcgcaccgcctcctggcgcttttgcaaggtcggtgagaacaccgcgctgtccacgtcgtcccacaaaaacccgtcgttggggtcaggcatgtcgtactcgcccgtgtagaaccccggcggcgggagccagtgcgggttcaagatggcattggtaaagtagtccgagttcatggacgccgcgcggtgcaggtagtccatcagcttattaataaacggccggttggcggcgtacatgctaggttccatgttgcgcgcggtcatgtccagcgcggcgctgggggtggccccctcctgcatcaggaacagccctacgctctgctgcacatatctcaggatgcgctcctcctcggccgacagcgcgtactgcgccgggatcttctgctgtctattggtcagcaagaagttcagggtggccctcagactgtcggtgtcgttctgacccagcgcgcggctcacgctagtgatctcctggaaggtctgctcatccacctgcgcctggcctatggcctcgcggtacagcgtcagcaggtgacccaggtacgagttgcggttcacgctgccactgtcggtgaagggcgcgatcagcagcagcagcagccgcgagttgggcgtcagcaagctgctcaccgtcgaccggtcgcccacgggcgcctgcacgccccacagcccgcgcaggttcttgaaagcctgactcaggttcaccgtctgcaggccctgtctgctcgtctggaaaaagtagtccgggcccgactggtacacctcgctctggggcacctcggtcaccatcagccgcagcgcgcttataaagttggtataatcatcctgcccgcgcggcacgttcgccggctgcgtcgccaggaaggcgttcagcgccaccagcgaacccaggccctcgttcttgaaccgctcgcgctgcgccacggcctcgcgcacgtccgtcaccagccggtccaggttggactgcacgtttgtgctgttgtagcggcccacgcgctccagcagggcgttgtacactagcccggcctcgtcgggacggatggccttgttctccgccagcgcgttcacgatcgccagcaccttctcgtgcgtggggttggtccgagaaggaaccaccgcctccagaatggccgagagtctgttggcctgcggctgttgtctaaaggactcggggttgcgggtcgtcagggccatgatgcgttgcatcgcggcctcccagtcgtccgatgctagaccggacggctggctttgcagcgccgcccttatggcggggtccggggcttgctgcatctaaaaacacatcacggaggcgtcagtaccccgcaacgggtgcatcctcctcctcttcctcttcctcatccaagtcctctggaccgtaggcggcctccaaggcgcgtcggctcggctgccaatgcaggtccgcccccatgtcaaagtaggactcctcaccgccggtggcgcctcctaccagcgcccggcgcagactcagcatcagctcgcggtcgctcagctcgcgccgccggcttgtgctcacggccttgtggatgcggtcgttgcggtacacgcccaggtcgtcgctcagcgtcagcaccttgagcgccatgcgcatgtaaaagctgtctatcttcacctccttgtctatgggcacatacggcgtcttgtaaatcttgcgcgcgtaaaacttgcccaggctcagcaccgagtagttgatcgccgccaccttctcggccaggctcaggctgcgctcctgcactacgatgctctgcaagatgttaatcagctccagcagccagcgaccctcgggctcggcgatgttcagcagtgcctccctgaacgcctcgttgtccctgctgtgctgcaccaccaggaacagctgtgccgtcagaggcttgctgtccgggttctgcacgatggcctccgccaggtcccacaggtgcatcaggcccagggccacctcctcgcgcgcgatcagggtgcgcacgtggttgttgaaactcttttggaagttgcgctcctgcttcaccgtctgctcgtaggccgtcaccaggttggccgccgccacgtgcgcgcgcgcggggctgatccccgtctgctcgttcggctcgaaatcctcgtcgcgcagcacgcgctggcggtccaggccctcgcgcagctccctgcccgcccgaaaccggcagtcgcgcatctcctcgggctcctccccgctgcggtccctgaacaggttctgcgcaggcacgtacgccgggcgcacgtccttctgcagctgcacgcggggatgtcgctccggggacggcgcccccagtctcgccagcccttcgccctcttccaagtccatctctgtctgtggctgtggctggctagcgccggcgcctgctacggccgcggtcgcggtggtcgccgggggggtgggacgcatttggcgcaggacgggatgcatctggcaaaaagaaaaaagggggctcgctcccgtaactggagaagtcggctggctgtgggtctttaaatcggcggggtgaccaagtcccgctcgccgcggccgtccttgaaccgggttctgccgcgactcaaccctggcgatgcttctccagactacgggcgcgagccactacccggcagggttttcggccgctttcaagtctagcgactcccctcggccgacaaaaagggctctccgccgtatcctggcggctatcgggcttgggtcgagacgggagtgccaataccacgttagtcgcggctccagcctgattcgaggggactcgaaccggggtacacacgcggcctaacccgtttgcgttccgccaggctacggaggaagagcccgctcaaccgctttcgtttttgcctctagagcatcaatgactgcgcgcgtctcaccggccagaccgtgccgaccatggactatttcctgcccctgcgcaacatctggaaccgcgtccgcgagttcccgcgcgcctccaccaccgccgccggcatcacctggatgtcccgctacctctacggctaccaccgactcatgcttgaggacctggccccgggcgcgccggccacccagcgctggccgctctaccgccagccgccgccgcactttctagtcggataccagtacctcgtgcgcacctgcaacgactatgtcttcgactcgcgcgccttctcgcggctcaggtactccgaggtcgtgcaacccggcctgcagaccgtcaactggtcgcttatggccaactgcacttacaccatcaacacaggggcctaccaccgcttcgtcgacatggacgacttccaggacaccctcacccgcgtgcaacaggccatcctcgccgagcgcgtcgtcgccgacctggcgctcgtgcagccgttcaggggcgtcggggtcacccgcatggaagactccgcctccgccagtgatgacatcgagaggctcatgcatgactactacaagaacctgagccggtgtcagggccaggcctggggcatggccgagcggctccgcatccagcaagcgggacccaaggacctggtcctcctcgccaccatccgccgcctcaaaaacgcctacttcaattacatcatcagcaaccgcaattctaacagcgtccacagggctgctacgtgtttgagcttaccttgcgactgcgattggctagacgctttcctcgaaagattctccgatccggtcgatctcgacgcgctcacgtgccctacaccgcaattgataagatgcattgtcagcgccctatcgctgcccaacggggacccaccccattaccgggagatgaccggcggcgtcttcacgctgcgtcctcgcgaacggggtcgcgccgtcaccgaaaccatgcgtcgccgccgcggggagatgatcgagcgcttcgtcgaccgtctcccggtgcgtcgccgtcgtcgtcgggccccgccaccaccaccgcccccagaggaagaaatagaagaagaggtcgtcatggaagaagaggaagaggaggaggcccccggggatttcgagcgcgaggtgcgcgccaccatcgccgaactcatcaggctcctggaagacgagctcacggtctcggcccgcaacgcccagtttttcaacttcgccgtggatttctacgaggccatggaaaggctggaggccattggcgacatcagcgaaatgcccctgcgccgctggattatgtacttcttcgtcaccgagcacatcgccaccaccctcaactacctcttccaacgcctgcgcaactatgccgtcttcgcgcggcacgtggagctcaacctcgcgcaggtggtcatgcgcgcgcgcgacgccgacggggacgtggtttacagccgcgtctggaacgagagcggcctgggcgccttctcgcagctcatgggtcgcatctcgaatgaccttgccgccaccgtagagcgcgcgggccgcggcgatctccaggaggaggaaatcgagcagttcatgtccgagatcgcctaccaggacaactcgggcgacgtgcaagagatcctgcgtcaggccgccgtcaatgacgccgagattgattctgttgaactgtctttcaggttcaaagtcacggggcccgtggtcttcacgcaaaggcggcagatccaggatgtcaaccgccgcgtcgtcgcgcacgccagcgctctcagggcgcagcaccgggacctgcccgagcgccacgccgacgtgcctctaccgccactgcccgcggggccggaaccgccgctgccgccgggagcgcgtccgcgacaccgcttctaaaagcgcaccgcggcacggtcgtggccccgcgcagctacgggctcatgcaatgcgtggacacgaccaccaactcacccgtggagatcaagtaccatctgcatctcaagcacgccctcacccgcctctacgaggtcaacctcagaaccctgcccccggacctggatctccgcgacaccatggacagctcccaactgcgcgccctcgttttcgctctccgcccccgccgcgccgagatctggacctggctcccgcgcgggctcgtcagcctctccgtcctcgaggagccccagggtgagtcccacgcaggcgaacatgaaaaccaccagccagggccgccactcctgaagttcctcctcaagggacgcgctgtgtatctcgtggatgaggtacagcccgtgcagcgctgcgagtactgcggacgcttttacaagcatcagcacgagtgctcggttcgccggcgggatttctactttcatcacatcaacagccactcgaccaactggtggcaggaaatccagttcttcccaatcggctctcatcctcgcacggagcggctctttgtcacctacgatgtagaaacctacacctggatggggtccttcggcaagcagctcgtccccttcatgctggtcatgaaattctccggggaccccgagctggtcgccctcgctcgcgatctcgccgtgcgcttacgctgggatcgctgggagcgggaccccctcaccttctactgcgtcaccccagaaaagatggccgtgggccagcagttccgcctctttcgcgacgagctccagaccctcatggcccgcgagctctgggcttcattcatgcaagccaacccacatctccaggagtgggcgctcgagcagcacggcctgcaatgccccgaggacctcacctacgaggaactcaaaaagctgccgcacatcaaaggccgcccgcgattcatggaactctacatcgtcgggcacaacatcaacggcttcgacgagatcgtcctcgccgcccaggtcatcaacaaccgagcctccgttccgggccctttccgcatcacccgcaatttcatgccgcgggcaggcaagattctcttcaatgacgtcactttcgctctgcctaaccccctctcgaagaagcgcaccgatttcgagctctgggagcacggcggctgcgacgactcggatttcaagtaccagttcttgaaagtcatggttagggataccttcgccctgacgcacacctcgctccgcaaggccgctcaagcttacgccctccccgtggagaagggctgctgtccctacaaggccgtgaaccatttctacatgctgggctcttaccgtgcggacgatcgaggattcccgctccgggagtactggaaggatgacgaggagtacgccctcaaccgcgcgctgtgggagaagaaagaagaggcgggttatgacatcatccgtgaaacgctggactactgcgccatggacgtccttgtcaccgccgagctcgttgccaagctgcaagactcctacgcgcacttcatccgcgactcggtccgcttgccccacgcccactttaacatcttccaacggcccaccatctcctccaactcgcatgccatctttcgccagatcgtcttccgcgccgagcagccccagcgcaccaatctcggccccgctttcttggccccctcgcacgagttgtatgactatgtgcgcgccagcatccgcggggggcgctgttatcccacctacatcggcatcctctcggagcccatctatgtctacgacatctgcggcatgtacgcctccgccctcacgcatcccatgccctggggtccgcccctcaacccctacgagcgagcgctggccgcccgcgagtggcagatggccttggatgatgcatcctcaaaaatcgattattttgacaaggaactctgtccgggcatcttcaccatcgatgcggacccccctgacgagcatctgcttgatgtgctgcccccgttctgctcgcgcaagggcggacgcctctgctggaccaacgagcccctgcgcggcgaggtggccaccagcgtggacctggtcaccctgcataatcgcggctggcgcgtcaggatcgtgcccgacgagcgcaccaccgtcttcccagaatggaagtgtgtcgcgcgcgagtatgtccagctcaacatcgcggccaaggagcgcgccgaccgtgacaaaaatcagaccatgagatccatcgccaagcttctctccaacgccctctatggctcctttgccaccaagcttgacaataaaaaaatagtcttttctgaccagatggatgaaagtctcctaaaaagcattgcggcagggcaggccaacatcaaatcctcctcgtttctagaaactgacaacctgagtgccgaggtcatgcccgctctcgagagggaatacctaccccaacagctggcgctcgtggacagcgacgcggaagagagtgaggacgagcacagacccgcccccttttatacccccccgtcggggacccccggtcacgtggcctacacctacaagccaatcaccttcttggatgcggaggagggggacatgtgtctgcacacggtggaaaaggtggaccccctggtggacaacgaccgctacccctcgcacgtggcctcctttgtcttggcgtggacgcgcgcctttgtctcagagtggtccgagtttctctacgaggaggaccgcgggacgcccctgcaggacaggccaatcaagtccgtctacggggacacagacagcctgtttgtcaccgaacgcggacacagactcatggagacgcgaggtaagaagcgcatcaaaaagaacgggggaaaactggtttttgaccccgagcagcccgagctcacctggctcgtcgagtgcgaaaccgtctgcgcccactgcggagcggacgccttcgctcccgagtccgtctttctcgcacccaagctctacgccctgcaatccctcctctgtcccgcctgcgggcgctcttccaaaggcaagctccgtgccaagggccacgccgccgaggcccttaactacaagctcatggtcaactgctatctcgccgacgcgcagggcgaagaccgtgcccgtttcagcaccagcaggatgagtctcaagcgcacccttgcaagcgcccagcccggggcccaccccttcaccgtgacggagaccaccctcactcggaccctgagaccctggaaggacatgacgctggccgcgctggacgcccatcgtctcgtgccctacagtcgcagtcgtcccaacccccgaaacgaggaagtctgctggatcgagatgccgtagagcacgtcaccgagctatgggaccgcctggagctcctctcgcagacccttgccaagatgcccatggccgacgggctcaagcccctgaaaaactttgcttccctgcaagagctgctctcgctgggcggggaccgcctcctcggcgagctcgtccgggaaaacctccaagtgagagacatgctcaacgaggtggcccccctcctccgggacgacggcagctgcatctccttgaactaccacctgcaacccgtcatcggggtcatctacggcccgaccgggtgcggcaagtcccagctgttaagaaacctgctctcctcgcagctcatcacccccgccccggaaaccgtttttttcatcgccccgcaggtggacatgatccccccctccgagatgaaagcctgggagatgcagatctgcgaggggaacttcgccccggggcccgagggaacgatcgtcccccaatctggcacccttcgccccaaattcattaaaatgtcttatgatgatctcacccaggagcataattatgatgtctctgaccccagaaacgtttttgccaaagccgcagcccacgggcccattgccatcatcatggatgagtgcatggaaaacctgggcgggcacaagggcgtctccaaattcttccacgcattcccttccaagttgcatgataagttccccaagtgcacgggctacaccgttctggtggtcctgcacaatatgaacccccggcgggatctgggtggcaacatcgccaacctcaagatccaggccaaactgcacatcatctccccccgcatgcatccctcccagcttaaccgctttgccaacacctacaccaaggggctccccgtggccatcagtctcctcctcaaggacatcatccagcaccacgcccagcgcccctgctatgactggattatctacaacacgaccccagagcacgaggccatgcagtggtgctacctccacccccgggacgggctcatgcccatgtacctcaacatccaatcccacctctaccgggtcctggaaaaaatccaccgcactctcaatgatcgggagaggtggaccagggcctaccgcgcgcgaaaaaataaataa

SEQ ID NO: 177 - DNA, 4574 bp, Human adenovirus
  misc_feature 1..4574: note = Ad37 E3; 26198 - 30771
  source 1..4574: mol_type = genomic DNA
atgtcctatggtgactcggctgagctcgctcggttgaggcatctggaccactgccgccgcctgcgctgctttgcccgggagagctacggcctcatctactttgagctgcccgaggagcaccccaacggccctgcacacggagtgcggatcaccgtagagggcaccaccgagtctcacctggtcaggttcttcacccagcaacccttcctggtcgagcgggaccggggcgccaccacctacaccgtctactgcatttgtcctaccccgaagttgcatgagaatttttgttgtactctttgtggtgagtttaataaaagctaaactcttgcaatactctggaccttgtcgtcatcaactcaacgagaccgtctacctcaccaaccagactgaggtaaaacttacctgcagaccacacaagacctatatcatctggttcttcgagaacacctcatttgcagtctccaacactcactgcaacgacggtgttgaacttcccaacaacctttccagtggactgagttacaatacacgtagagctaagctcatcctctacaatccttttgtagagggaacctaccagtgccagagcggaccttgcttccacagttttactttggtgaacgttaccggcagcagcacagccgctccagaaactaaccttccttctgatactatcaaaccttgtttcggaggtgagctaaggcttcccccttctcaggagggggttagcccatacgaagtggtcgggtatttgattttaggggtggtcctgggtgggtgcatagcggtgctagctcagctgccttgctgggtggaaatcaaaatctttatatgctgggtaagacattgtggggaggaactatgaaggggctcttgctgattatcctttccctggtggggggtgtgctgtcatgccacgaacagccacgatgtaacatcaccacaggcaatgagaggaacgactgctctgtagttatcaaatgcgagcaccattgtcctctcaacattacattcaaaaataagaccatgggaaatgtatgggtgggattctggcaaccaggagatgagcagaactacacggtcactgtccatggtagcaatggcaatcacactttcggtttcaaattcatttttgaagtcatgtgtgatatcacactacatgtggctagacttcatggcttgtggccccctaccaaggataacatggtgggtttttctttggcttttgtgatcatggcctgcttgatgtcaggtctgctggtaggggctctagtgtggtttctgaaacgcaagcccaggtatggaaatgaagagaaggaaaaattgctataaattctttttctttttcgcagaaccatgaatacagtgatccgtatcgtgctgctctctcttcttgtagcttttagtcaggcaggatttcatactatcaatgctacatggtgggctaatataactttagtgggacccccagacacaccagtcacttggtatgatactcaaggattgtggttttgcaatggcagtagagttaagaatcctcaaatcagacatacatgtaatgatcaaaaccttactttgatccatgtgaacaaaacttatgaaagaacatacatgggttataatagacaagggactaaaaaagaagactacaaagttgtagttataccacctcctcctgctactgtaaaaccacagccagagccagagtatgtgtttgtttatatgggagagaacaaaactctagaaggtcctccgggaactccagtcacatggtttaatcaggatggaaagaaattttgtgaaggagaaaaagttcttcatccagaatttaaccacacctgtgacaaacaaaaccttatactactgtttgtgaattttacacatgatggagcttaccttgggtacaatcatcaaggaacccagagaacacactatgaagttacagtattagatctttttccagattctggccaaatgaaaattgaaaatcatagtgaggaaacagagcaaaaaaatgatgaacatcataactggcagaaacagggtgggcaaaaacagggtgggcaaaaaacaaatcaaacaaaagttaatgacaggagaaaaacagcgcaaaaaagaccatcaaagctaaagccggcaactattgaggcaatgctggttacagtgactgccgggtctaacttaactttggttggacctaaagcagaaggaaaagttacttggtttgatggagatttaaaaagaccatgtgagcctaattacagactaagacacgaatgtaataatcaaaacttaactctgattaatgtaactaaagattatgagggaacttactatggtacaaatgacaaagatgagggcaaaaggtacagagtgaaagtaaatactacaaattctcaatctgtgaaaattcagccatataccagacaaactactcctgatcaagagcacaaatttgaattacagttcgaaactaatggaaattatgattcaaaaattccctcaaccactgtggcaatcgtggtgggtgtgattgcgggcttcataactctgatcattgtcttcatatgctacatctgctgccgcaagcgtcccagggcatacaatcatatggtagacccactactcagcttctcttactaagactcagtcactttcatttcagaaccatgaaggctttcacagcttgcgttctgattagcctagtcacacttagtgtagctattaaaaatcaatatcatgttcataatgttaccagagatggatatatcacattaaatgtaacaattgataatactacctggacaagatatcatttaaataagtggcatcaaatttgtacgtggtcagacccatcatacaaatgtcacagcaatggcagcattaccattcatgctttcaatattacttctggccagtacaaagctgaaagttttactaactggtttagatattacggtaatcataaacatgaaattcatatttttaacataactgtaattgagcatcctacaacaaaagcacccaccactgctaatacagctacatcaattaaatcaacaaccacacagcctactactagggagacaactcaacctaccaccacagtcagtacaactactgagaccactactcaaactacacagctagacacaacagtgcagaatagcactgtgttggttaggtatctgttgagggaggaaagtactactgaacagacagaggctacctcaagtgcctttagcagcactgcaaatttaacttcgcttgcttggactaatgaaaccggagtatcattgatgaatcatcagcctttctcaggtttggatattcaaattacttttctggttgtttgtgggatctttattcttgtggttcttctgtactttgtctgctgcaaagccagagagaaatctaggaggcccatctacaggccagtaatcggggaacctcagccactccaagtggaagggggtctaaggaatcttcttttctctttttcagtatggtgatcagccatgattcctaggttcttcctatttaacatcctcttctgtctcttcaacatctgcgctgcctttgcagccgtctcgcacgcctcgcccgactgtctcgggcccttcccaacctacctcctctttgccctgctcacctgcacctgcgtctgcagcattgtctgcctggtcatcaccttcctgcagcttatcgactggtgctgtgcgcgctacaattatctccatcacagtcccgaatacagggacaagaacgtagccagaatcttaaggctcatctgaccatgcagactctgctcatgctgctatccctcctatcccctgccctagccacttatgctgattactctaaatgcaaattcgcagacatatggaatttcttagattgctatcaggaaaaaattgatatgccctcctattacttggtgattgtgggaatagtcatggtctgctcctgcactttctttgccatcatgatttacccctgttttgatctcggctggaactctgttgaagcattcacatacacactagaaagcagttcactagcctccacgccaccacccacaccgcctcctcgcagaaatcagttccccctgatacagtacttagaagagccccctccccgacccccttccactgttagctactttcacataaccggcggcgatgactgaccaccacctggacctcgagatggacggccaggcctccgagcagcgcatcctgcaactgcgcgtccgtcagcagcaggagcgggccgccaaggagctccttgatgccatcaacatccaccagtgcaagaagggcatcttctgcctggtcaaacaggcaaagatcacctacgagctcgtgtccaacggcaaacagcatcgccttacctatgagatgccccagcagaagcagaagttcacctgcatggtgggcgtcaaccccatagtcatcacccagcagtcgggcgagaccaacggctgcatccactgctcctgcgaaagccccgagtgcatctactcccttctcaagaccctttgcggactccgcgacctcctccccatgaactga

SEQ ID NO: 178 - DNA, 1098 bp, Human adenovirus
  misc_feature 1..1098: note = Ad37 fiber; 31038 - 32135
  source 1..1098: mol_type = genomic DNA
atgtcaaagaggctccgggtggaagatgacttcaaccccgtctacccctatggctacgcgcggaatcagaatatccccttcctcactcccccctttgtctcctccgatggattcaaaaacttcccccctggggtactgtcactcaaactggctgatccaatcaccattaccaatggggatgtatccctcaaggtgggaggtggtctcactttgcaagatggaagcctaactgtaaaccctaaggctccactgcaagttaatactgataaaaaacttgagcttgcatatgataatccatttgaaagtagtgctaataaacttagtttaaaagtaggacatggattaaaagtattagatgaaaaaagtgctgcggggttaaaagatttaattggcaaacttgtggttttaacaggaaaaggaataggcactgaaaatttagaaaatacagatggtagcagcagaggaattggtataaatgtaagagcaagagaagggttgacatttgacaatgatggatacttggtagcatggaacccaaagtatgacacgcgcacactttggacaacaccagacacatctccaaactgcacaattgctcaagataaggactctaaactcactttggtacttacaaagtgtggaagtcaaatattagctaatgtgtctttgattgtggtcgcaggaaagtaccacatcataaataataagacaaatccaaaaataaaaagttttactattaaactgctatttaataagaacggagtgcttttagacaactcaaatcttggaaaagcttattggaactttagaagtggaaattccaatgtttcgacagcttatgaaaaagcaattggttttatgcctaatttggtagcgtatccaaaacccagtaattctaaaaaatatgcaagagacatagtttatggaactatatatcttggtggaaaacctgatcagccagcagtcattaaaactacctttaaccaagaaactggatgtgaatactctatcacatttaactttagttggtccaaaacctatgaaaatgttgaatttgaaaccacctcttttaccttctcctatattgcccaagaatga

SEQ ID NO: 179 - DNA, 126 bp, Human adenovirus
  misc_feature 1..126: note = Ad37 fiber tail; 31038 - 31163
  source 1..126: mol_type = genomic DNA
atgtcaaagaggctccgggtggaagatgacttcaaccccgtctacccctatggctacgcgcggaatcagaatatccccttcctcactcccccctttgtctcctccgatggattcaaaaacttcccc

SEQ ID NO: 180 - DNA, 429 bp, Human adenovirus
  misc_feature 1..429: note = Ad37 fiber shaft; 31164 - 31592
  source 1..429: mol_type = genomic DNA
cctggggtactgtcactcaaactggctgatccaatcaccattaccaatggggatgtatccctcaaggtgggaggtggtctcactttgcaagatggaagcctaactgtaaaccctaaggctccactgcaagttaatactgataaaaaacttgagcttgcatatgataatccatttgaaagtagtgctaataaacttagtttaaaagtaggacatggattaaaagtattagatgaaaaaagtgctgcggggttaaaagatttaattggcaaacttgtggttttaacaggaaaaggaataggcactgaaaatttagaaaatacagatggtagcagcagaggaattggtataaatgtaagagcaagagaagggttgacatttgacaatgatggatacttggtagcatggaacccaaagtatgacacgcgcaca

SEQ ID NO: 181 - DNA, 540 bp, Human adenovirus
  misc_feature 1..540: note = Ad37 fiber knob; 31593 - 32132
  source 1..540: mol_type = genomic DNA
ctttggacaacaccagacacatctccaaactgcacaattgctcaagataaggactctaaactcactttggtacttacaaagtgtggaagtcaaatattagctaatgtgtctttgattgtggtcgcaggaaagtaccacatcataaataataagacaaatccaaaaataaaaagttttactattaaactgctatttaataagaacggagtgcttttagacaactcaaatcttggaaaagcttattggaactttagaagtggaaattccaatgtttcgacagcttatgaaaaagcaattggttttatgcctaatttggtagcgtatccaaaacccagtaattctaaaaaatatgcaagagacatagtttatggaactatatatcttggtggaaaacctgatcagccagcagtcattaaaactacctttaaccaagaaactggatgtgaatactctatcacatttaactttagttggtccaaaacctatgaaaatgttgaatttgaaaccacctcttttaccttctcctatattgcccaagaa

SEQ ID NO: 182 - DNA, 1560 bp, Human adenovirus
  misc_feature 1..1560: note = Ad37 penton; 13530 - 15089
  source 1..1560: mol_type = genomic DNA
atgaggcgcgcggtggtgtcttcctctcctcctccctcgtacgagagcgtgatggcgcaggcgaccctggaggttccgtttgtgcctccgcggtatatggctcctacggagggcagaaacagcattcgttactcggagctggctccgctgtacgacaccactcgcgtgtatttggtggacaacaagtcggcggacatcgcttccctgaactaccaaaacgaccacagcaacttcctgaccacggtggtgcagaacaacgatttcacccctgccgaggccagcacgcagacgataaattttgacgagcggtcgcggtggggcggtgatctgaagaccattctgcacaccaacatgcctaatgtgaacgagtacatgttcaccagcaagtttaaggcgcgggtgatggtggctagaaaaaaggcggaaggggctgatgcaaatgataggagcaaggatatcttagagtatcagtggtttgagtttaccctgcccgagggcaacttttccgagaccatgaccatagacctaatgaacaacgccatcttggaaaactacttgcaagtggggcggcaaaatggcgtgctggagagtgatatcggagtcaagtttgacagcagaaatttcaagctgggctgggacccggtgaccaagctggtgatgccaggggtctacacctacgaggccttccacccggacgtggtgctgctgccgggctgcggggtggatttcaccgagagccgcctgagcaacctcctgggcattcgcaagaagcaaccttttcaagagggcttcagaatcatgtatgaggacctagtagggggcaacatccccgctctcctgaatgtcaaggagtatctgaaggataaggaagaagctggcaaagcagatgcaaatactattaaggctcagaatgatgccgtcccaagaggagataactatgcatcagcggcagaagccaaagcagcaggaaaagaaattgagttgaaggccattttgaaagatgattcagacagaagctacaatgtgatcgagggaaccacagacaccctgtaccgcagttggtacctgtcctatacctacggggatcccgagaagggggtgcagtcgtggacgctgctcaccaccccggacgtcacctgcggcgcggagcaagtctactggtcgctgccggacctcatgcaagaccccgtcaccttccgctctacccagcaagtcagcaactaccccgtggtcggcgccgagctcatgcccttccgcgccaagagcttttacaacgacctcgccgtctactcccagctcatccgcagctacacctccctcacccacgtcttcaaccgcttccccgacaaccagatcctttgccgcccgcccgcgcccaccatcaccaccgtcagtgaaaacgtgcctgctctcacagatcacgggacgctaccgctgcgcagcagtatccgcggagtccagcgagtgaccgtcactgacgcccgtcgccgcacctgtccctacgtctacaaggccctgggcatagtcgcgccgcgcgtgctttccagtcgcaccttctaa

SEQ ID NO: 183 - DNA, 2850 bp, Human adenovirus
  misc_feature 1..2850: note = Ad37 hexon; 17775 - 20624
  source 1..2850: mol_type = genomic DNA
atgtgccttaccgccagagaacgcgcgaagatggccaccccctcgatgatgccgcagtgggcgtacatgcacatcgccgggcaggacgcctcggagtacctgagcccgggtctggtgcagtttgcccgcgccaccgacacgtacttcagcctgggcaacaagtttaggaaccccacggtggctcccacccacgatgtgaccacggaccggtcccagcgtctgacgctgcgctttgtgcccgtggatcgcgaggacaccacgtactcgtacaaggcgcgcttcactctggccgtgggcgacaaccgggtgctagacatggccagcacttactttgacatccgcggcgtcctggaccgcggcccaagcttcaaaccctactcgggcacggcttacaacagcctggcccccaagggcgcccccaatcccagtcagtggactaccaaagaaaagcaaaacggaggaactggagcagaaaaagatgttacaaagacatttggacttgccgccatgggaggcagtaatatttctaaagacggtttgcagattggaactgacaaaacagcaaatgctgaaaaaccaatctatgcagacaaaactttccagccagaacctcaagttggagaagaaaactggcaggataatgatgaatattatggcggcagggctcttaaaaaagataccaaaatgaagccatgctatggttcatttgctaaacccacaaacaaggaaggtgggcaggctaaattgaaagaaacacccaatggtaccgatcctcaatacgatgtggacatggctttctttgactcaagcactataaatataccagatgtggtgttgtacactgaaaatgtagatttggaaactccagatacacatgtggtgtacaaaccaggcaaagaggatgacagttctgaagctaatttaactcagcagtccatgcctaacagaccaaactacattggcttcagagacaactttgtggggctattgtactacaacagcactggcaacatgggtgtgctggctggtcaggcttctcagttgaatgccgtggtcgacttgcaagacagaaacaccgaactgtcttaccagctcttgctagattctcttggtgacagaaccagatattttagtatgtggaactctgcggtggacagctatgatcccgatgtcaggatcattgagaaccacggtgtggaagatgaacttcctaactattgcttccccttggacggtgttcaaactaattcagcctatcaaggtgttaaactaaagcctgatcaaacaggaggcggagttaatggagattgggtaaaggatgatgacatttcagcccataatcaaattggaaagggcaacatctttgccatggagatcaacctccaggccaacctgtggaagagttttctgtactcgaacgtggccctgtacctgcccgactcctacaagtacacgccggccaacgtcacgctgcccgccaacaccaacacctatgagtacatgaacggccgcgtggtagccccctcgctggtggacgcctacattaacatcggcgcccgctggtcgctggaccccatggacaacgtcaacccctttaaccaccaccgcaatgcgggcctgcgctaccgctccatgcttttgggcaatggccgctacgtgcccttccacatccaagtgccccaaaagttctttgccatcaagaacctgctcctgctccccggctcctacacctacgagtggaacttccgcaaggatgtcaacatgatcctgcagagttccctcggaaacgacctgcgcgtcgacggcgcctccgtccgcttcgacagcgtcaacctctacgccaccttcttccccatggcgcacaacaccgcctccaccctggaagccatgctgcgcaacgacaccaacgaccagtccttcaacgactacctctcggccgccaacatgctctaccccatcccggccaaggccaccaacgtgcccatttccatcccctcgcgcaactgggccgccttccgcggctggagtttcacccggctcaagaccaaggaaactccctcccttggctcgggttttgacccctactttgtctactcgggctccatcccctacctcgacgggaccttctacctcaaccacaccttcaagaaggtttccatcatgttcgactcctcggtcagctggcccggcaacgaccggctgcttacgccgaacgagttcgagatcaagcgcagcgtcgacggggagggctacaacgtggcccaatgcaacatgaccaaggactggttcctcgtccagatgctctcccactacaacatcggctaccagggcttccatgtgcccgagggctacaaggaccgcatgtactccttcttccgcaacttccagcccatgagcaggcaggtggtcgatgagatcaactacaaggactacaaggcagtcaccctgcccttccagcacaacaactctggcttcaccggctacctggcacccaccatgcgtcaggggcagccctaccccgccaacttcccctacccgctcatcggctccaccgcagtgccatccgtcacccagaaaaagttcctctgcgacagggtcatgtggcgcatccccttctccagcaacttcatgtccatgggcgccctcaccgacctgggtcagaacatgctctacgccaactcggcccacgcgctcgacatgaccttcgaggtggaccccatggatgagcccaccctcctctatcttctcttcgaagttttcgacgtggtcagagtgcaccagccgcaccgcggcgtcatcgaggccgtctacctgcgcacgcccttctccgccggcaacgccaccacctaa

SEQ ID NO: 184 - protein, 361 aa, Human adenovirus
  REGION 1..361: note = misc_feature - Ad37 fiber; 1 - 361 (GenBank accession no. ABK59080); Human adenovirus 37
MSKRLRVEDDFNPVYPYGYARNQNIPFLTPPFVSSDGFKNFPPGVLSLKLADPITITNGDVSLKVGGGLTLQDGSLTVNPKAPLQVNTDKKLELAYDNPFESSANKLSLKVGHGLKVLDEKSAAGLKDLIGKLVVLTGKGIGTENLENTDGSSRGIGINVRAREGLTFDNDGYLVAWNPKYDTRTLWTTPDTSPNCTIAQDKDSKLTLVLTKCGSQILANVSLIVVAGKYHIINNKTNPKIKSFTIKLLFNKNGVLLDNSNLGKAYWNFRSGNSNVSTAYEKAIGFMPNLVAYPKPSNSKKYARDIVYGTIYLGGKPDQPAVIKTTFNQETGCEYSITFNFSWSKTYENVEFETTSFTFSY

SEQ ID NO: 185 - protein, 143 aa, Human adenovirus
  REGION 1..143: note = misc_feature - Ad37 fiber shaft; 43 - 185 (GenBank accession no. ABK59080); Human adenovirus 37
PGVLSLKLADPITITNGDVSLKVGGGLTLQDGSLTVNPKAPLQVNTDKKLELAYDNPFESSANKLSLKVGHGLKVLDEKSAAGLKDLIGKLVVLTGKGIGTENLENTDGSSRGIGINVRAREGLTFDNDGYLVAWNPKYDTRT

SEQ ID NO: 186 - protein, 176 aa, Human adenovirus
  REGION 1..176: note = misc_feature - Ad37 fiber knob; 186 - 361 (GenBank accession no. ABK59080); Human adenovirus 37
LWTTPDTSPNCTIAQDKDSKLTLVLTKCGSQILANVSLIVVAGKYHIINNKTNPKIKSFTIKLLFNKNGVLLDNSNLGKAYWNFRSGNSNVSTAYEKAIGFMPNLVAYPKPSNSKKYARDIVYGTIYLGGKPDQPAVIKTTFNQETGCEYSITFNFSWSKTYENVEFETTSFTFSY

SEQ ID NO: 187 - protein, 519 aa, Human adenovirus
  REGION 1..519: note = misc_feature - Ad37 penton; 1 - 519 (GenBank accession no. ABK59086); Human adenovirus 37
MRRAVVSSSPPPSYESVMAQATLEVPFVPPRYMAPTEGRNSIRYSELAPLYDTTRVYLVDNKSADIASLNYQNDHSNFLTTVVQNNDFTPAEASTQTINFDERSRWGGDLKTILHTNMPNVNEYMFTSKFKARVMVARKKAEGADANDRSKDILEYQWFEFTLPEGNFSETMTIDLMNNAILENYLQVGRQNGVLESDIGVKFDSRNFKLGWDPVTKLVMPGVYTYEAFHPDVVLLPGCGVDFTESRLSNLLGIRKKQPFQEGFRIMYEDLVGGNIPALLNVKEYLKDKEEAGKADANTIKAQNDAVPRGDNYASAAEAKAAGKEIELKAILKDDSDRSYNVIEGTTDTLYRSWYLSYTYGDPEKGVQSWTLLTTPDVTCGAEQVYWSLPDLMQDPVTFRSTQQVSNYPVVGAELMPFRAKSFYNDLAVYSQLIRSYTSLTHVFNRFPDNQILCRPPAPTITTVSENVPALTDHGTLPLRSSIRGVQRVTVTDARRRTCPYVYKALGIVAPRVLSSRTF

SEQ ID NO: 188 - protein, 949 aa, Human adenovirus
  REGION 1..949: note = misc_feature - Ad37 hexon; 1 - 949 (GenBank accession no. ABK59070); Human adenovirus 37
MCLTARERAKMATPSMMPQWAYMHIAGQDASEYLSPGLVQFARATDTYFSLGNKFRNPTVAPTHDVTTDRSQRLTLRFVPVDREDTTYSYKARFTLAVGDNRVLDMASTYFDIRGVLDRGPSFKPYSGTAYNSLAPKGAPNPSQWTTKEKQNGGTGAEKDVTKTFGLAAMGGSNISKDGLQIGTDKTANAEKPIYADKTFQPEPQVGEENWQDNDEYYGGRALKKDTKMKPCYGSFAKPTNKEGGQAKLKETPNGTDPQYDVDMAFFDSSTINIPDVVLYTENVDLETPDTHVVYKPGKEDDSSEANLTQQSMPNRPNYIGFRDNFVGLLYYNSTGNMGVLAGQASQLNAVVDLQDRNTELSYQLLLDSLGDRTRYFSMWNSAVDSYDPDVRIIENHGVEDELPNYCFPLDGVQTNSAYQGVKLKPDQTGGGVNGDWVKDDDISAHNQIGKGNIFAMEINLQANLWKSFLYSNVALYLPDSYKYTPANVTLPANTNTYEYMNGRVVAPSLVDAYINIGARWSLDPMDNVNPFNHHRNAGLRYRSMLLGNGRYVPFHIQVPQKFFAIKNLLLLPGSYTYEWNFRKDVNMILQSSLGNDLRVDGASVRFDSVNLYATFFPMAHNTASTLEAMLRNDTNDQSFNDYLSAANMLYPIPAKATNVPISIPSRNWAAFRGWSFTRLKTKETPSLGSGFDPYFVYSGSIPYLDGTFYLNHTFKKVSIMFDSSVSWPGNDRLLTPNEFEIKRSVDGEGYNVAQCNMTKDWFLVQMLSHYNIGYQGFHVPEGYKDRMYSFFRNFQPMSRQVVDEINYKDYKAVTLPFQHNNSGFTGYLAPTMRQGQPYPANFPYPLIGSTAVPSVTQKKFLCDRVMWRIPFSSNFMSMGALTDLGQNMLYANSAHALDMTFEVDPMDEPTLLYLLFEVFDVVRVHQPHRGVIEAVYLRTPFSAGNATT

SEQ ID NO: 189 - protein, 42 aa, Human adenovirus
  REGION 1..42: note = misc_feature - Ad37 fiber tail; 1 - 42 (GenBank accession no. ABK59080); Human adenovirus 37
MSKRLRVEDDFNPVYPYGYARNQNIPFLTPPFVSSDGFKNFP

SEQ ID NO: 190 - DNA, 114 bp, Human adenovirus
  misc_feature 1..114: note = Ad50 5 (left) ITR; 1 - 114
  source 1..114: mol_type = genomic DNA
caatcaatataatataccttatagatggaatggtgccaatatgtaaatgaggtaatttaaaaaagtgcgcgctgtgtggtgattggctgcggggtgaacggctaaaaggggcgg

SEQ ID NO: 191 - DNA, 114 bp, Human adenovirus
  misc_feature 1..114: note = Ad50 3 (right) ITR; 35272 - 35385
  source 1..114: mol_type = genomic DNA
ccgccccttttagccgttcaccccgcagccaatcaccacacagcgcgcacttttttaaattacctcatttacatattggcaccattccatctataaggtatattatattgattg

SEQ ID NO: 192 - DNA, 365 bp, Human adenovirus
  misc_feature 1..365: note = Ad50 Packaging Sequence; 115 - 479
  source 1..365: mol_type = genomic DNA
acatgctgggaggtgacgtgacttatgggggaggagttatgttgcaagttatcgcggtaaaggtgacgtaaaacgaggtgtggtttggacacggaagtagacagttttcccacgcttactgacaggatatgaggtagttttgggcggatgcaagtgaaaattctccattttcgcgcgaaaactgaatgaggaagtgaatttctgagtcatttcgcggttatgacagggtggagtatttgccgagggccgagtagactttgaccgtttacgtggaggtttcgattaccgtgtttttcacctaaatttccgcgtacggtgtcaaagtcctgtgtttttacgtaggtgtcagctgatcgctagggtat

SEQ ID NO: 193 - DNA, 3431 bp, Human adenovirus
  misc_feature 1..3431: note = Ad50 E1; 480 - 3910
  source 1..3431: mol_type = genomic DNA
ttaaacctgtcgagttccgtcaagaggccactcttgagtgccagcgagaagagttttctcctccgcgccgcgagtcagttttgcgctttgaaaatgagacacctgcgattcctgccacaggagattatctccagcgagaccgggatagaaatactggagtttgtggtaaataccctgatgggagatgacccggaaccgccagcgcagcctttcgatccacctacgctgcacgatctgtatgatttagaggtagacgggccggacgatcccaatgaggaagctgtaaatgggttttttactgattctatgctactagctgccgatgaaggattggacataaaccctcctcctgagacccttgataccccaggggtggttgtggaaagcggcagaggtgggataaaattgcctgatctgggagcagctgaaatggacttgcgttgttatgaagagggttttcctccgagtgatgatgaagatggggaaactgaacagtccatccataccgcagtgaatgagggagtaaaagctgccagcgatgtttttaagttggactgtccggagctgcctggacatggctgtaagtcttgtgaatttcacaggaataacactggaatgaaagaactattgtgctcgctttgctatatgagaatgcactgccattttatttacagtaagtgtatttaagtgaaatttaaaggaatagtgtagctgtttaataactgttgaatggtagatttatgtttttacttgtgattttttgtaggtcctgtgtctgatgatgagtcgccttctcctgattcaactacctcacctcctgaaattcaggcgcccgtacctgcaaacgtatgcaagcccattcctgtgaagcctaagtctgggaaacgccctgctgtggataagcttgaggacttgttggagggtggggatggacctttggaccttagtacccggaaactgccaaggcaatgagtgccctgcagctgtgtttatttaatgtgacgtcatgtaataaaattatgtcagctgctgagtgttttattgcttcttgggtggggacttggatatataagtaggagcagatctgtgtggttagcttatagcaacctgctgccatccatggaggtttgggctatcttggaagacctgagacagactaggctactgctagaaaacgcctcggacggagtctctggcttttggagattctggttcggtggtgatctagctaggctagtgtttaggataaaacaggactacagggaagaatttgaaaagttattggacgacagtccaggactttttgaagctcttaacttgggccatcaggctcattttaaggagaaggttttatcagttttagatttttctactcctggtagaactgctgctgctgtagcttttcttacttttatattggataaatggatccgacaaacccacttcagcaagggatacgttttggatttcatagcagcagctttgtggagaacatggaaggctcgcagcatgaggacaatcttagattactggccagtgcagcctctgggagtagcagggatactgagacacccaccgaccatgccagcggttctggaggaggagcagcaggaggacaatccgagagccggcctggaccctccggtggaggagtagctgacctgtttcctgaactgcgacgggtgcttactaggtctacgtccagtggacaggacaggggcattaagagggaaaggaatcctagtgggaataattcaagaaccgagttggctttaagtttaatgagccgtaggcgtcctgaaactgtttggtggcatgaggttcagagcgaaggcagggatgaagtttcaatattgcaggagaaatattcactagaacaacttaagacctgttggttggaacctgaggatgattgggaggtggccattaggaattatgctaagatatctctgaggcctgataaacagtatagaattactaaaaagattaatattagaaatgcatgctacatatcagggaatggggcagaggttataatagatacccaagataaagcagcttttagatgttgtatgatgggtatgtggccaggggttgtcggcatggaagcagtaacatttatgaatattaggtttaaaggggatgggtataatggcattgtatttatggctaacactaagctgattctacatggttgtagcttttttgggtttaataatacttgtgtagaagcttgggggcaagttggtgtgaggggttgtagtttttatgcatgctggattgcaacatcaggtagggtcaagagtcagttgtctgtgaagaaatgcatgtttgagagatgtaatcttggcatactgaatgaaggtgaagcaagggtccgccactgcgcagctacagaaactggctgcttcattctaataaagggaaatgccagtgtgaagcataatatgatctgtggacattcgaatgagaggccttatcagatgctgacttgcgctggtggacattgcaatattcttgctaccgtgcatatcgtttcccatgcacgcaagaaatggcctgtatttgaacataatgtgattaccaagtgcaccatgcacataggtggtcgcaggggaatgtttatgccttaccagtgtaacatgaatcatgtgaaggtgatgttggaaccagatgccttttccagagtgagcttaacaggaatctttgatatgaatattcaactatggaagatactgagatatgatgacactaaaccgagggtgcgcgcatgcgaatgcggaggcaagcatgctagattccagccggtgtgcgtggatgtgactgaagacctgagacccgatcatttggtgcttgcctgcactggagcggagttcggttctagtggtgaagaaactgactaaagtgagtagtggggcaagatgtggatggagactttcaggttggtaaggtggacagattgggtaaattttgttaatttctgtcttgcagctgccatgagtggaagcgcttcttttgaggggggagtatttagcccttatctgacgggcaggctcccatcatgggcaggagttcgtcagaatgtcatgggatccactgtggatgggagacccgtccagcccgccaattcctcaacgctgacctatgccactttgagttcgtcaccattggatgcagctgcagccgccgccgctactgctgccgccaacaccatccttggaatgggctattacggaagcatcgttgccaattccagttcctctaataacccttcaaccctggctgaggacaagctacttgttctcttggctcagctcgaggccttaacccaacgcttaggcgaactgtctaagcaggtggcccagttgcgtgagcaaactgagtctgctgttgccacagcaaagtctaaataaagatctcaaatcaataaa

SEQ ID NO: 194 - DNA, 19668 bp, Human adenovirus
  misc_feature 1..19668: note = Ad50 E2; 23590 - 3923
  source 1..19668: mol_type = genomic DNA
atggccagccgcggaggaaatcagtcaagcgaccgccaacgggagcacacccccgaacgcggaatgggctctgccagccatccgcctccaaggccggaccgcagcccatctcagtcgcctccacctctgcccccgaagaggaacacctaccgtcgcgtggggtccgattcttctatcgagagccaggtggtactggtaagcgaaacttcgcggtcatccctgtctccggaacggagcaacagtcctcccccgatccctcccaagaagaagcccaggaagaccaagcatgtccctctgcaagacatcagccaggacagcgaagaagaaagagaacaggctcagttggtggccgtgggcttcagctaccccccggtgcgcatcattgagaaggatggcaagagaagtgttgagaagatcgacaagaatgaccctatagctaaaggagctacttctattgctgttaggaatcctttgagcttgcccctggtatctgcctgggagaagggcatggaagtgatggctgtgctaatggagaggtataggctggataatgacctgagaacctctttcaagctgatgccagagcagcacgagcagtacaagcgtatctgccaccagtatgtgaacgaggagcaccgtggcatcccgctgacatttagtagcatgaagaccctgacagcgatgatgggaagattcatgcagggattggtgcattcttattctgagatcgcccacaataattgggagtgcaccgggtgcgctctgtgggctcatggatgcaccgattacgaaggcaaggtgaaatgcctgcatggcactatcatgatccagaaggaccacattatcgagatggatgtggcgagcgaaaacgggcagcgcgctatgaaggagaacccagacagagccaagatcacccagaaccgctggggcagaaatgtggtccagttggccaacaacgatgcccgctgctgtgtgaatgatgccaactgtgctactaaccaattttccagcaagtcctgtgggatgttttacaccgagggaagtaaggctcaggaagctttcaagcagtacgaagccttcatgaaggccgtgtacccagggataacccccgaccaagccaggatgatgctgatccccattcattgcgattgcaaccacaagccaggctgcgctcccgtgatgggcaggcagacctgtaagatgaccccctttggaatggccaatgctgaagacttggatgtgactaccatcagtgacccgaccgtgctggcaagcgtgagacacccagccttgatggtgttccagtgttgcaacccagtgtaccgcaactcccgtgtccagaatgccggccccaactgtgatttcaagatctctgctcctgacctgcttggcgccctgcaactgaccagaaagttgtggcaagacacctttcccgaaattccagttcccaagctggtgatccccgagttcaagtggcagaacaggttacagttccgcaacgtctccctgcccacgggtcactctgactcccgccagaacccatttgatttctgagtgaatgatgaaaacgaatgagcaaaaaaccagagccttagtgcatgtaaaaataaaatgctttttattgaacacggttttacatgacttattgcatatccatacggtcaaacgcggtggccctttcaatgcgtgcgcggtgagaacgaaagtaagatgagtgggtgtttaggaagcgatatagcgcctcctggttgcggcgcagggtgggctggacttggggtgattggagcatgctgtttgacaccccagtcagcaacttcatggtggggtttccgttcatggggcggtcgggccagtgcacaaaggcatgaaggaacatacagcaaaaaagtccacaggcggctgagcgcgggccctgcacgctctgggtggacttttccagggtgatgcagcggtctttggtagcaagggcactgcggcgcaggagcccctcgtactcaaactggtaaatctgtttgagtcgctcatccgagaacccaaaaggatcaaaaaggtagcaggtgttggagcgcgggttccaaccaaaagccagccagtgctctccccccgtctcgcgtccggcagtgttgactatggcgcaggcgagcttgtcgggggccatgaaccccgggaaacgcttgtcaaaggttcccaggaaatagggtccgcagcccaggtctcggacgatggctttgagctcttgctcgctggagccgtttccggacccgcatgacatggctgcagctgctgcttgcaagaagcaagaggcttcttatgtggtggcgttgccggccgagaacggtgtgcgcaggtagacggcctcgatgacgccgcggtgtggctggtgcactctgaccacgtcgaagacttcgaaaagaagataaagcagggtgggctcatccatgggatccacctcaaaagtcatgtccagcgcatgggccgagttggcatacagcaagttctgtcccaggtctgtaagggcacccatggacatgaagttgctagagaatgggatgcgccacatggtcctgtcgcacaggaattttttctgggtgacactggttactgcagtggttccaattagggggtatgggtagttagcagggtacgcttgaccctgacgcatggtaggagccatgtaacccacaaagccagagttattatgctggtagggtacggcgacagctttatagtctttgtagttaatctcatcaaccacctgtctactcatgggctggaagtttctgaagaaggagtacatgcgatccttgtaaccctcaggaacgtagaagccctggtatccaatgttgtagttggcaagcatctggaccaggaaccagtctttggtcatgttacattgggccacattgtagccttccccatcaactgtgcgcttgatttcgaactcatttggacttagcaatctgtcattaccaggccagctcactgaagagtcaaacatgatggagactttcttgaaagtgtggttaaggtagaaggtaccatccaggtagggtatagaaccagagtaaacaaagtagggatcgaaccctgatcccaaagagggagtctccttggttttgagtctggtgaaggaccagcctctgaaggcggcccagttgcgagagggaatggagatgggaacgttggtagcgttggccgggatggggtagagcatgttggcagcagaaaggtagtcattgaatgattgatcattggtgtcattgcgcagcatggcttcaagggtggaggcagtgttgtgggccatggggaagaaggtggcatagagattgatgctggtaaaacttatgctggcaccatcgacccggagatcattaccaagggaactctgcaggaccatgttcacatcctttctgaagttccactcgtaggtgtaagaaccgggtagaagcagcaggttcttcacagcaaagaatttctgaggcacttgaatgtggaaaggcacgtaacgaccattgcccaaaagcatggaccggtatcgcaggccagcgttgcggtgatggttaaaggggttgacattgtccatggcatccaaagaccatctggcgccaatgtttacgtaggtatccaccagggatgggggaaccacccgcccattcatgtagtcataagtgttggtgttagttggaagagtgacattggctggggtgtatttgtaggagtctgggagatacagagccacattggaataaagaaaacttctccagagattagcttggaggttaatttccatggcaaacggatttcccttagcaatttcacttatgccctttggctctaaatctttccaagtagtggtttcatcaccatttgtctcaattcccttgtaactgtctattcgcggacctacaccatccaatggaaaacaatagttaggaagttcatcttccacaccatggttctcaataacacgcacatctgggtcatagctatccactgcttgattccacatactgaaatatctggttctgtcccccagagaatcaagcaagagttgatatgacaattctgtgtttctgtcttgcaagtcaaccactgcatttagctgagacgcttgtccagccagcactcccatgttgccagtactgttgtagtacatgagtccgatgaagttgtccctgaagccaatatagttaggtctattgggcatggactgttgaccaaggtttgcatgagagctagcatctgaagctccaggtttgtacaccacatgagtgtcaggagtttctagatccacattttctgcatacattacaattttaggcttgaggccagtcatttgtgatcttaggtcgaaaaagttcatgtcaatgtcatattcaaccttgccttcttcttctttcttcacttttgcctgcccgcctttaacattagtaggtttagcgaaagacccgtagcagggtttcattttagtttcaggtttaagtgctctgcctccatatttttcatctgtgccatccgtatcagtccaagattcctctcccacctgaggttctggctgatacagtttatcagcataaatgggtttagggccaccttcagatggaacttccaaacctattggcagtccttcttttgtaatttcagcttcggcttttactggcgcattgccaaaagtgtatgtagcttgttggtcgtcttccccatcctcttcatctcccttattaagccactgagatgtattgggagcgcccttaggggccaatgagttgtaagcagtgccagaatatggcttgaagctaggacctctatccaacacaccccgaatgtcaaagaaagtgctggccatatccagcactctgttgtcgcccacagccaaggtgtatcgaactttgtatgcgtaggtattgtcttcccggtcaacgggcacaaagcgcagcatcagccgctgactgcggtcggtggtcacatcatgggtgggcgccacggtggggttcctaaacttgttccccagattgaagtaggtgtctgtggcgcgggcgaactgcaccagacccggactcaggtactccgaagcatcctgtccggcgatgtgcatgtatgcccactggggcagcatcgatggggtggccatcttgaaatcaactcagcctcggcgcgcgacctcttccttgctcctctgctgttgctgcggcggcggcgtgatgatgacacatacacacagacaggcaagttaagcgctactccatatttaatttaaaagcagcgacggcgctttacactttgcacgcccagacccacgatgctgttcagagtactctgccagtttgcattcggacgtggagtgcccccaggacgcggtctggctacggcgacgggctgtacggtggtgggcttcggggtagcgacaggcttgcgagcaggcgctgcaacagcagggggaggcaagtccaaggtagcgggtcggtgtgactgagaaggtttcattaccccggtagccatgggggctacaggtctggtggtgggcattccaagcttcactgcctcctcgtaggagggcgggtcgtctgagcgtgtgactagtgtctcctccagatcggggcgcggacgcttgtcgccccgcttttcaaggggagggagatcttcctccacttccatttcaccaggggctgacggcggcgggtcaaggcggctgtttatctgtttctgcacggcctggttggccagatccaccaccccattgataccagaggcgattccatcaaccaccttctgttggaagttttgctctttaagcttatttttcaatgcctgccctgtgctgctgttccaagctttgttcccataggtttttatggtagagccaaaatttttaagcccgctccagatactgctccaattgaaggcgcccccgttcagttggctggtgccgatgtcgctccaggtgcccatgtacggcctcgtgccgtgtcgcggagccagggatgaaaaattgatgtcttccatctctacaaaaacatagtcacaggaccaggagcatcagagtccattctgttttatttataagtttttccaatgtcagtggcgctgcgaggcctgaaccgccacggaagctatgcctggtatcgccccgatcgccgcggctatgatggggatcagagcaggcagaaagccaccccccagcctcttgctgatagcgcgccgccgcctgtggcgtcgcattccgcgccccaacatccctcttctacggcgcgagtttcttcctcggtagccagtaatggggacacgaaggcggcaagtgagggccatatctgcaaggaggcagcggcaacagttgttaagttgtgatgcttggatggtagcgtacgcgcggtaacgtcaggggatccgcgcggccatcgcgatacactctccgcaccagagcagcgggagtcagattgctggtggggcggcggcgacgacgatgactacgacttgcaggtgttttgcggcgacggcgggaagtgctgctcctgctgcggtagtagcgagtgcctcggtaacccggagttggaataatggatgggtgcagagcataatttggcatcagcaaacttgctggaccgtactttcgccgggatcttcgagtggtgttgacagcagctggagttgtaacgggtgcggtcatccagggatccgtttgcacctcaatggaggtggttgtgggctttgcaggttcggtttggacttccattgactcggtgggaatcttgatgtctacggtttgtactcccaaacctggcgccacctgcttgatgggtctcactttgacctcaggttgtatatcgggatccactttcattttctccagcacgtcctccagccgctggcgcttgggcaccatcaattgcatagtgggatacagatcctcaccctctcgcttgttgcctctgcgtggaggcacgggcagcacttgctgcagggtgactggcttgagactaggggtgggattcccattgtccaagggaatggacaccgcctcctccttggggctcgagcgggagcgcttgccataagcaaactcgcccaggcggtcggccgcctgctccagaatatcatcatccccatacacctcatcataggaccgcttaaaagcagtgctggagcgctcgccgggcgtaaagaccaccgtggttccaggtctcagcacaggctgcactttgcgtccacgccactgcactcgccgccttggggcgaactcgcgtacaaactccgccagaccatcattgccatcttcttcctttttgtcctttttgacccgcttgattttgcggggctttttttcatccttcaccggcggaccgtagatttcaggcgcgatgacctggagcatctcttccttgtatttgcgcttggacatcctcgctgggacacaacatcggagactgctcagtatcttctaagagcgaggggggcgggtgcgcacgggcacgcgctggccggtggtggcgtcgcgcacccagtacacattgcctcttcgcggttgggccatgttggcaatggccgctgctgccgccgtggctgcgcgcctgcgggacctgccggcactggcacctgaagccgcgcgtctggccgctctaagcatagctcttcgccccacgcgtttggccctcctcagcagagctcttgccgctcgcatagcgggagtagcccggtggcgcctggcgatgcgtctccgcctgctcttccggcgagcataggcgcgggcgtcagccactacgctgtcaataactgcatccacagtagatgtaggtgcagtaggagtataattacgagcatcggccaccacctggtcgatcacatcatcgacggtggttctagtgcgggtacgacccttgagggcgccccatggagcgcggaagtgcccgcgcacgcgcacagggtgctgtgtagagcgtttgcgagcacctccgtacatcttgcttggcgcgcgcaggccccaaccggtgttattactaggtgagataagaatggacatttttttttagaaagtgcggcttgaaaggacgcgcggcgcgactatgcccagggccttgtagacgtaggggcaggtgcggcgtctggcgtcagtaacggtcacgcgctggactccccggatactgctgcgcaacggcagggtcccgtgatctgtgagagcaggaacgttttcactgacggtggtaatggtgggcgctggcgggcggatgaggatctggttctcagggaagcggttgaagacgtgcgtgagcgaggtggactggcgaagctgctgggagtacacggcttgctcgttgtagaaactctttgagaagaccggcatgagctctgcacctaccactggatagttgctgacttgtctcgtggaacggaatgtgacagggtcctgcatcatgtctgggagcgaccagtacacctgctctgctccacaggtgacatccgaggtggtgagcagtgtccaggaacggactcctttttcagggtcaccatagttgtaggacaggtaccagctgcggtaggctgtattcactttatcttccaagacattgtaacttctactcttgctgtctttttctacaggtttaatagtgagtttggtctctgtagtttcggccacagcagccaatagcgattcttcagttgcaacagatgaagctgtatagttgtctcctctgacttcttcggcattagccacccttacagggtcgctgacaactatgttggctttagcaatagcagcagctttagcggcttctgttttggcttctcgttctttcttactgttcttataggcttctacatccaacagggccgggatattacccccttcaagatcctcatacaagatcttaaaaccctcctggaatgggtgtcttttcctgataccaagcaagttactaaggcgactttcagtaaagtcaactccgcaaccaggcaacaatacaatgtcaggatggaatgcctcataggtgtaaaccccaggcataatcaacttagtttccggatcccaacccagtctaaagttcctggtgtcaaatttaacaccaatgtcactctccaacactccattctgtctgcccacttcaaggtaattatcaatgatggcattgttcattaggtcaatggtcattgtggctgagaagttcccttccggtagagtaaactcaaaccactcatattccaaaatatcctgcttgtgatcataattgtcatctactgtgacaccttcaggagcctttctagacaccatcacccgagctttgaacttgttgctaaacatgtactcgttcacgttgggcatgttggtgtgcatgatagtcttcagctgaccgccccatcgcgaccgctcgtcaaagttgatggtctgggtgctggcctccgtgggggtaaagtcattgttttgcaccaccgtggtgaggaagttgctgtggtcgttctgatagttcagtgaggcgatgtccgcggacttgttgtccaccaaatacaaccgggtggtatcatacaatggtgccagctccgagtaacgaatgctgtttctcccctccgtaggtgccaggtaccgagggggtacaaagggagcctccagtggtggctgcatcgccgccgccgccgcctgctgcatcacgctctcgtacgaaggaggaggaccctccggatacaccaccgctccgcctagcacggttcgcctcatcatactagctataacagagaagaaacgaacgcacgctggtcgccatggccttggtgagtatttattttcggtttcttacatcaggcgcccgacgcgggggcgcaggtgagcgaacgggttaccaccactcccacccaagtccaacacgctgctgtcgtcggcggaatcatcatcggcccacaccaggccccgctgcctgtcgtgccactggcgtttacgggtagcgatgccccggctatcccccagcgcccggggatcgtccctgtgatcgtgcgcgtacgtcttccagcggttcattttgtcaaccaagctttctatcccgttgttggggaaattcttctccctctcgggtctcaacagggagtcgttcaaatactcctcctcgccgatcaagcgaggacgggttattcttcccagctcactgctgcgtacactgtttagcgaaaatggcaaactagggaaaggacttgcggcctcgggagccgctgcagcacccgttgctccggacagtgacacggaagagtgccttctatcgccaccttccttcttccaagtgttataaccaggaggcggggagaaaacactactgtccacatcgtcccataaaaacccgtcattggggtcgggcatgtcatactcgcccgtatagaacccaggtgggggcagccaatgggggttcaggatagcattggtgaaataatcagagttcatagcagccgccctgtgtaagtagtctagcagtttattgataaaaggccggttactggcatacatgctgggctccatgtttcgggctgtcatatcgagcgcagcagtaggagtcgccccctcctgcattaggaacagtcccacgctctgctgcacgtatctcaggatccgttcctcctccgcggtaagcgaatactgaggagggatcttctgcgaccggttggtcagcaagaagtttaaggtggcttccaagctgccagtgtcctcccgacccagagcgcggctcacttgggtaatttcttgataggtttgctcatctacctgagtttgccctatggcctcgcgatacaggttcaacagatagcccaagtacgaattacggtcgatgctaccgctgtcagtgaatggggctaccaagagcagtagtaggcgggagttgggggtcagcaagctagacacggtcgcccgatctcccactggggcgcgcactccccacagaccattcaggttcttaaaagcctggctcaggttcactgtctgcaagccctgtctgctggtctggaaaaagtagtctggcccggactggtacacttcgctttgagggacttcggccaccatgagtctcaatgcacttagaaagtttgtgtagtcttgctgaccgcgaggcacgttggcaggctgagtgctgaggaaggcgttcaaagccaccagcgaccctaaattggcgtctcgctggaaccgctcgcgctgagacacggcctcgcgcacatcggtcaccatccggtccaggttggtctgcacgttgctgctgttgtaacgggctacgcgctccaatagggcattgtataccagcccagcctcatcgggacgtatggctttgttctccaccagcgcgttcacgatggccaggaccttctcgtgtgtggggttggagcgggagggcactacggcctccaggatggcagaaaggcggttggcctggggttgctgtctaaaggcttcggggttgcgggtcgtcagcgccatgatgcgttgcatggcctggctccaatcgtccgaggagttaatgccggacggctggctctgtagcgccgcccgttttgcggggtccggtgcctgctgttccatctagcaaaaatatggatggtcgcgccatcagtcttccagatactcgccctcctcatcctggccttcatccacctcttctatgtaaggaagctcataccctgctgcgtccagggccctgcgactgggctgccactgcaagtccgctcccatgtcaaagtagttttccccctcggttccagccccagtcagagctctttgcaagctgtgcataagttctctgtcgctcagctcacgccttctgctggcgctcactgcgcggtgcatcctgtcgttgcggtacactcccagatcgtcactcaaggtcagcaccttgagagtcatgcgcatataaaacccatctatcttcacctccttgtctataggtacgtatggggttttgtagatcttgcgagcgtagtgcttgcccaggctcaagaccgagtagttaatagcagccaccttctcagctagacccaggctacgttcttgcacgattatactttgcagaatattgataagatcatacaaccatctcccctcgggctcagtaatgttcaacagcgcctccctaaatgcctcattgtctctactatgttgcaccaccagaaacagctgagcggttagaggtttgctggtggggttctgggtaatggcttccatcaggtcccacaggtgcatcagacccagtgtcacttcctcgcgggcaatcagggtgcgcacatggttgttgaaagatttttgaaagttgcgctcctccttcacggtctgctcgtaagctgatactaggttggccgcggccacatgtgccctagcaggacttattcctgtcacttcatcgacttcaaaatcatcatcacgcagcacccgtcttcggtccagaccgtgacgcagttcgcgacccgcgttaaagcgggaagctcgcatttcctcaggctcctcgccgctcctgtccctgaacaggttctgctggggcacgtacgcctcgcgagagtcctttttcagttgcacccgcgggtgccgctcgggcgatggtgcgcccaggcgcgccagtccctcgccctcttccaagtccagatcataggcgggctgccccgcgccgctgacggctgcagccgcagtagttacaggagcaggaagagccttttgtggctgttgttgtagctgctgctgagaagggggctgttgctgggggcgcatctgtcgcagcacgggatgcatctgggcaacaaaaaaacaaaaaaagagggctcgctcccgtaaactggagaagtcggctggcggggtcttagaaatgacgaggctgccaaaccctcgcttgtcgcggaaaccggccgatccggcgcgctaagactcgaaccggggcacaccgcaacgcaaccctggcgattgattctccagactacgggcgcgagccactcccagccccgagaactgagtgttctaaagcttgacgcagcattggctcccatccaggaaaaagccaaaaaaaaaaaaacgacccgcctccgtatcctggaggttttgtgcaggcctgggtcgagacgggagtgccagtaccacgttagctgcggctccagcctgatccgagattcgaaccggggtacacgcgcagcccaacccgttcgcttagcctccaggccacggagacgagccgctgaccgctttcgtttttgcccgtatgtctagagcatcaacgactgtgcacgtctcacgggccaaaccgtgcctaccatgaactacttcatgccgctgcgcaacatctggaaccgcgtacgcgagttcccgcgggcatccaccaccgcctccggtatcacctggatgtccaggtacatctacggttatcaccgcctcatgctggaagacctcgcccctggcgccccggctacagagcgatggcccctataccgccagccgccgccgcactttctcatcggctaccagtacctggtgcgcacctgtaacgattacatctttgacacccgcgcatactcgcgccttaagtataccgagcttgtgcgccctgggcaccagacagtcaactggtcagtcatggccaactgctcctacacaatcaacaccggggcttaccaccgcttcgtggactttgacgacttccaagccaccctcacccaggtgcagcaagccatcctcgcagaaagggttgtagcggacctggcacttgtccagcccatgcgcgggttcgggatcactcgcatgcatggcagagcgggcgaagaagaagtgcccgtggaacgactcatgcaagactactataaagatctggccagatgtcaggataatgcttggggaatggcccatcgcctgcgcatccaacaagccggacccaaagacctggtgctcctcgccaccatccgccgtctcaaaactgcctattttaatttcatcaccagcagcatcgtctcaccctccaaagaggaggaaggagaagaaagagagaaccccgaccgagcgtctagccgcccccgcccgcaagaaacagtgctcagcctaccttgcgattgcgactggttagacgctttcgtcgaaaggttttcagatcccgtggatcttgagacgatcaggtccttgcgcggagtacctacggggcaattaataaaatgcataatcagcgcggtgtccctgcccaacggagagcctcccagtcaccacttcagggagatgcgcggaggcgtcttcactctgagacccagggagaacggtcgtgccgtcaccgagaccatgcgccgccgccgcggagaggtcattgaaagattcatcgaccgtctgcccgtgcgccgccggcgtcgccgcgttccccctcctcctgcagccccacctgaagaggaagagatgttagtggaagaagaagagattgaggaagaaatcccaggggctttcgagctcgaggtgcgcaccaccatcgccgaactcatccgtcttttggaagaagagttgaccgtgtccgcgcgtaactcccagtttttcaactttgccgtggacttctacgaggccatggagcgcttggaagcgctgggcgatgtcagcgagatgccgctgagacgatggatcatgtatttcttcgtcaccgagcacatcgccaccacactcaactaccttttccagcgcctatgcaactatgcggtcttcacccgccacgtggagctcaacctcgcccaggtggtcatgcgcgcgagagatcccgtgggggctgtggtctacagccgcgtctggaacgaggcgggcatgaatgcattctctcaactcattgggcgtatctccaacgacctcgcggccaccgtcgagagagcgggccgcggagatcttcaagaggaagagatcgagcagttcatggccgagatcgcctaccaggacaactctggcgacgtgcaagaaatccttaggcaagccgccgtcaacgataccgagattgattctgttgaactctctttcaggttcaagctcacggggccggtagctttcacccagaggcgtcagatccaggatgtcaaccgccgcgtcgtggcgcatgcgagtcttctgagggcgcagtaccagaacctacccgcgcgcggcgccgacgtaccactgccggccatgccgccgggtcccgaaccgcccctgccgcccggtgcgcgccctcgacaccgcttctaaacatgcaagaagcaacagagccaccgccgcccaaaaggaaaaacaagggcacggtggtagcgcccaaggggcacggaaccctgcaagccatcgacatctccaccaacggacccgtggagatcaagtaccatctgaacctccctcacgccctcgaaaagatcatgcaagtcaatctcctgacactgcctactaacctgactccgcagcgtctcaggaccctggacagctccggcctgcgcgctctcgtcctcgagctccgcccctgccgcgccgaggtctggacttgcctcccgcgagggctcgtcagcatgaccaccatcgagacagaagatggtcatgccgatgcagacaacatagtagagcgcgaggtacaatcgccaggcctcaattttccactgaaatttctcgtcaaaggaagtcaggtacaactcattcatgaggtgcatcccgtgaatcgatgcgagtactgcggccgtctgtacaagcacaagcatgaatgctcggcgcgtcgcagggagttctacttccatcacatcaacagccattcctccaactggtggcaggagatccagttcttcccgattggctctcatcctcgcacagaaaggctcttcctcacctacgatgtggaaacctacacctggatggggtcctttggcaagcagctaatccccttcatgctggtcatgaaactctctggagaccagcggctcgtcaacatcgcctatgacctggccataaaactcaagtgggatcgctggcggcaggacccccaaaccttctattgcgtcaccccagaaaagatggcagtcgggcagcattttcgtcagtaccgggaccagttacaaacagcactggcagtggacctctggtcctccttcctcaaagcgaaccctcacgtgcacgaatgggccctcgaacactatgctctcactgaccctacagacctcacttttgaagaactcaagaagctgcctcatgtcaggggcacccctcgattcttagaactgtacatagtggggcacaacatcaatggctttgatgagatcgtcttggccgctcaggttatcaataaccgagcagaggtccctcagcctttcagaatcacccgaaatttcatgcccagggccggcaagatcctcttcaatgatgttactttcgctttgcccaaccccgcctacaagaagcgggtggacttccaactctgggaacagggggcctgtgatgacatcgacttcaagtatcaattcctcaaagtcatggtcagggacacttttgccctcactcatacctcgctgcgcaatgcagcccaagcatactctctcccagtggagaagggatgctgtccctacaaggcagtcaatcagttctacatgttgggctcttaccgtgcagaaaaagacgggtttcccctcgaagagtactggaaggatcgcgaagaataccttctcaaccgcgagctgtgggaaaagaaaagccaaccgcgttatgacatcatccaggaaactctcgactactgtgccctggacgtactcgtcaccgccgagctggtagccaagctgcaagagtcatatgcccacttcataagggactctgtaggcctacctcatgcccattttaacatattccagagacctactatctcttccaattcccatgccatctttcgccagatcgtttacagggcggaaaaacccaaccgcaccaatctgggcccgggtcttctcgccccctcacatgaactctatgactatgtgcgagcaagcatcagaggggggcgctgttatcccacttacatcggcatcctcgaagagcccctctatgtctacgatatctgtggcatgtatgcctccgcgctcacccaccccatgccctggggcacccctcttaacccctacgagcgcgcgctggcagttcgagaatggcagatgaccttggatgatcccgccaccatcagctattttgacaaagatttgctaccgggaatatttaccatagatgcggacccccctgatgagttcatgctagaccccctcccccctttctgttcaagaaaaggaggtcgactctgctggaccaatgagcccctccgaggcgaggtagccaccagtgtggatctgataaccctgcacaataggggatggcgagtcagaatagttccggatgaactgacaaccatcttccctgaatggaaatgtgtggcgcgcgagtacgtccagcttaacatcgccgccaaggagcgcgcggacaaggaaaagaaccaaaccatgcgctccatcgccaagcttctatccaatgccctctatggatcatttgccaccaagctggataacaagaagattgtgttttctgaccagatggacgagagtcttatgaaaggcatctctgctggtactgtcaatatcaaatcctcctcgttcctagaaactgacaacctgagtgcagaggtcatgcccgccttcgagagagaatacctaccccaacagctggcgctcctggacagtgatccggaagacagtgaggacgaacagaggcccgcccacttttatacccccccggcggggacccctggtcacgtggcctacacttacaagccaatcacattcttggatgtggaggagggggacatgtgtttacataccgtagagaaggtggaccccctggttgacaacgaccgctacccctcccacgtggcctcctttgtgctggcctggacacgcgcttttgtatcagagtgggctgggttcctctacgaagaggaccgaggcactccgctcgaggacaggcccataaagtcggtctacggggacacggacagcctctttgtcacccagcggggacacgaactcatggaaaccaaaggtaagaaacgcatcaaaaaacatggcggaaaacttgtttttgaccccgatgagccggatctgacctggctcgtggagtgcgaaaccgtctgcgcctcctgcggtgcggatgcatactcccccgaatccattttcctcgcgcccaagctgtatgccctcaaatgtatctactgccccgcctgccataaaacttccaaaggtaagctccgtgccaaaggccacgcggccgaggcgctcaactacgaactcatggtaaactgctacctggccgacatgcagggcgccgatcggcagcggttctcgaccagcaggatgagtctgaagcgcaccctcgcaagcgcccaaccaggcgcgcaccccttcaccgtgacggaaacaaccctgactcggacgctgcgaccatggaaggatcggaccctagcagcgctggacgctcatcgtctgattccctactccaggagccgtcccaacccgcgaaacgaggaggtctgctggatcgagatgccatagagcacatcaccgagctctgggaccggctcgagctcttgcaacagactctttccaaaatgcccatggctgacgggctgaaaccgttgaaaaacttctcctcgctccaggagcttctatcccttgggggagagcgcctcctaacggacttggtgcgggaaaatatccatgtaagggaaatgatgaacgaagtggcccccctgctccgggaggacggcagctgtcgctccctaaactaccatctgcaacccgtaattggggtcatttacggtcccactgggtgcggcaagtctcagctgcttaggaatttgctctcatcccagttaatcaccccggctccagaaacggtattttttatagccccgcaggtggacatgatccccccctcggaactgaaagcctgggaaatgcaaatatgtgagggaaactatgctcccgggccagagggaactttcatcccccaatctggcaccctccgcccaaagtttattaaaatggcttatgatgacctgactcaggagcataactatgatgtttcagacccccggaacgtgttcgcccgtgccgctgcccacggccccatcgctatcattatggatgagtgcatggagaatctggggggtcacaaaggcgtctccaaattttttcatgcttttccctctaagctgcatgataaatttcccaagtgcaccggatacactgtcttggtggttctgcacaatatgaacccgagacgggatctaggcggcaacattgccaacctcaagatccagtccaaaatgcatataatttcccccaggatgcacccgtcccagctcaacagatttgtaaacacctacactaagggcctccccgttgcaattagtctgctcctaaaagatattgtgcaacaccatgcactccgaccttgctatgactgggtgatttataacactaccccggagcaagaggctcttcaatggagctatctccacccccgagacggactaatgcccatgtatctaaacattcaatcccacctttacagggtactggaaaagatccaccgagttctcaatgatcgagaccgatggtccagggcataccgcgcgcgaaaaaccaaataaacattcatttgtttttataaca

SEQ ID NO: 195 - DNA, 4121 bp, Human adenovirus
  misc_feature 1..4121: note = Ad50 E3; 27102 - 31222
  source 1..4121: mol_type = genomic DNA
tataaaacgcctggtgatcagaggccgaggtatccagctcaacgacgagtcggttagctcttcgcttggtctgcgaccagacggagtcttccagatcgccggctgtgggagatcttccttcactcctcgtcaggctgtgctgactttggagagttcgtcctcgcagccccgctcgggcggcatcggaactctccagtttgtggaggagtttactccctctgtctacttcaaccccttctccggctctcctggccagtacccggacgagttcataccgaacttcgacgcaatcagcgagtcagtggatggctatgattgatgtctaatggtggcgcggctgagctagctcgactgcgacacctagaccactgccgccgctttcgctgtttcgcccgggaactcaccgagttcatctacttcgaactctccgaggagcaccctcagggtccggcccacggagtgcggattaccatcgaagggggaatagactctcgcctgcatcgcatcttctcccagcggcccgtgctgattgagcgcgaccagggaaatacaaccatctccatctactgcatctgtaaccaccccggattgcatgaaagcctttgctgtcttgtttgtgctgagtttaataaaaactgagttaagaccttcctacggactaccgcttcttcaatcaggactttacaacaccaaccagatcttccagaagacccagacccttcctcctctgatccaggactctaactctaccttaccagcaccctccactactaaccttcccgaaactaacaagcttggatctcatctgcaacaccgcctttcacgaagccttctttctgccaatactaccactcccaaaaccggaggtgagctccgcggtcttcctactgacgacccctgggtggtagcgggttttgtaacgttaggattagttgcgggtgggcttgtgctaatcctttgctacctatacacaccttgctgtgcatatttagtcatattgtgctgttggtttaagaaatgggggccatactagtcgtgcttgctttactttcgcttttgggtctgggctctgctaatctcaatcctcttgatcacaatccatgtctagacttcgacccagaaaattgcacacttacttttgcacccgacacaagccgtctctgtggagttcttattaagtgcggatgggactgcaggtccgttgaaattacacataataacaaaacatggaacaataccttatccaccacatgggagccaggagttcccgagtggtatactgtctctgtccgaggtcctgacggttccattcgcattagtaacaacactttcattttttctgaaatgtgcgatctggccatgtttatgagcaaacagtatgacctatggcctcctagcaaagagaacattgtggcattttccattgcttattgcttggtaacatgcatcatcactgctatcatttgtgtgtgcatacacttgcttatagttattcgccctagacaaagcaatgaggaaaaagagaaaatgccttaacctttttcctcataccttttctttacagcatggcttctgttacagctctaattattgccagcattgtcactgtcgctcacgggcaaacaattgtccatattaccttaggacataatcacactcttgtagggcccccaattacttcagaggttatttggaccaaacttggaagtgttgattattttgatataatttgcaacaaaactgaaccaatatttgtaatctgtaacagacaaaatctcacgttaattaatgttagcaaaatttataacggttactattatggttatgatagatccagtagccaatataaaaattacttagttcgcataactcagcccaaatcaacagtgccaactatgacaataattaaaatggctaataaagcattagaaaattttacattaccaacaacgcccaatgaaaaaaacattccaaattcaatgattgcaattattgcggcggtggcattgggaatggcactaataataatatgcatgttcctatatgcttgttgctataaaaagtttcaacataaacaggatccactactaaattttaacatttaattttttatacagatgatttccactacaatttttatcattactagccttgcagctgtaacttatggccgttcacacctaactgtacctgttggctcaacatgtacactacaaggaccccaagaaggctatgtcacttggtggagaatatatgataatggagggttcgctagaccatgtgatcagcctggtacaaaattttcatgcaacggaagagacttgaccattattaacataacattaaatgagcaaggcttctattatggaaccaactataaaaatagtttagattacaacattattgtagtgccagccaccacttctgctccccgcaaatccactttctctagcagcagtgccaaagcaagcacaattcctaaaacagcttctgctatgttaaagcttcgaaaaatcgctttaagtaattccacagcagctcccaatacaattcctaaatcaacaattggcatcattactgccgtggtagtgggattaatgattatatttttgtgcataatgtactacgcctgctgctatagaaaacatgaacaaaaaggtgatgcattactaaattttgatatttaattttttatagaattatgatattgtttcaatccaatgccactaacactatcaatgtgcagactactttaaaacatgacatggaaaaccacactacctcctatgcatacacaaatattcagcctaaatacgctatgcaactagaaatcaccatactaattgtaattggaattcttatactatctgttattctttattttatattctgccgtcaaatacccaatgttcatagaaattctaaaagacgtcccatctattctcctatgattagtcgtccccatatggctctgaatgaaatctaagatctttttttttcttttacagtatggtgaacatcaatcatgattcctagaaatttcttcttcaccatactcatctgtgctttcaatgtctgtgctactttcacagcagtagccactgcaagcccagactgtataggaccatttgcttcctatgcactttttgcctttgttacttgcatctgcgtgtgtagcatagtctgcctggttattaattttttccaactggtagactggatctttgtgcgaattgcctacctacgtcaccatcccgaataccgcaatcaaaatgttgcggcacttcttaggcttatttaaaaccatgcaggctatgctaccagttattttaattctgctactaccctgcattgccctaccttccaccgccactcgcgctacacctgaacaacttagaaaatgcaaatttcaacaaccatggtcatttcttgattgctaccatgaaaaatctgattttcccacatactggatagtgattgttggaataattaacatactttcatgtacctttttctcaatcacaatataccccacatttaattttgggtggaattctcccaatgcactgggttacccacaagagctagatgaacatatcccactacaacacatacaacaaccactagcattggtagagtatgaaaatgagccacaaccttcactgcctcctgctattagttacttcaacctaaccggcggagatgactgaaatactcaccacctccaattccgccgaggatctgcttgatatggacggccgcgcctcagaacagcgactcgcccaactacgcatccgccagcagcaggaacgcgtgaccaaagagctcagagatgtcatccaaattcaccaatgcaaaaaaggcatattttgtttggtaaaacaagccaagatatcctacgagatcaccgctactgaccatcgcctctcttacgaacttggcccccaacgacaaaaatttacatgcatggtgggaatcaaccctatagttatcacccagcaaagtggagatactaagggttgcattcactgctcttgcgattccaccgagtgcacctacaccctgctgaagaccctatgcggcctaagagacctgctacccatgaattaaaaattaataaa

SEQ ID NO: 196 - DNA, 972 bp, Human adenovirus
  misc_feature 1..972: note = Ad50 fiber; 31409 - 32380
  source 1..972: mol_type = genomic DNA
atgaccaagagagtccggctcagtgattccttcaaccctgtctacccctatgaagacgaaagcacctcccaacacccctttataaacccagggtttatttccccaaatggctttacacaaagcccagacggagttcttactttaaattgtttaaccccactaacaaccacaggcgggcctttacagttaaaagtgggagggggacttatagtggatgacactgatgggaccttacaagaaaacatacgtgttacagcacccattactaaaaataatcattctgtagaactatccattggaaatggattagaaacacaaaacaataaactatgtgccaaattgggaaatgggttaaaatttaacaacggtgacatttgtataaaggatagtattaacaccttatggactggaataaagcctccacctaactgtcaaatagtggaaaacactgatacaaacgatggcaaacttactttagtattagtaaaaaacggaggacttgttaatggctacgtatctctagttggtgtatcagacactgtgaaccaaatgttcacacaaaagtcagcaaccatacaattaagattatatttcgactcttctggaaatctattaactgatgaatcaaacttaaaaattccacttaaaaataaatcttctacagcaaccagtgaagctgcaaccagcagcaaagcctttatgccaagtactacagcttatccctttaacaccactactagggatagtgaaaactatattcatggaatatgttactatatgactagttatgatagaagtctagttcccttaaacatttctataatgctaaacagccgtacgatttcttccaatgttgcctatgccatacaatttgaatggaatctaaatgcaaaagaatctccagaaagcaacatagctacgctgaccacatccccctttttcttttcttatattagagaagacgacaactaa

SEQ ID NO: 197 - DNA, 126 bp, Human adenovirus
  misc_feature 1..126: note = Ad50 fiber tail; 31409 - 31534
  source 1..126: mol_type = genomic DNA
atgaccaagagagtccggctcagtgattccttcaaccctgtctacccctatgaagacgaaagcacctcccaacacccctttataaacccagggtttatttccccaaatggctttacacaaagccca

SEQ ID NO: 198 - DNA, 273 bp, Human adenovirus
  misc_feature 1..273: note = Ad50 fiber shaft; 31535 - 31807
  source 1..273: mol_type = genomic DNA
gacggagttcttactttaaattgtttaaccccactaacaaccacaggcgggcctttacagttaaaagtgggagggggacttatagtggatgacactgatgggaccttacaagaaaacatacgtgttacagcacccattactaaaaataatcattctgtagaactatccattggaaatggattagaaacacaaaacaataaactatgtgccaaattgggaaatgggttaaaatttaacaacggtgacatttgtataaaggatagtattaacacc

SEQ ID NO: 199 - DNA, 570 bp, Human adenovirus
  misc_feature 1..570: note = Ad50 fiber knob; 31808 - 32377
  source 1..570: mol_type = genomic DNA
ttatggactggaataaagcctccacctaactgtcaaatagtggaaaacactgatacaaacgatggcaaacttactttagtattagtaaaaaacggaggacttgttaatggctacgtatctctagttggtgtatcagacactgtgaaccaaatgttcacacaaaagtcagcaaccatacaattaagattatatttcgactcttctggaaatctattaactgatgaatcaaacttaaaaattccacttaaaaataaatcttctacagcaaccagtgaagctgcaaccagcagcaaagcctttatgccaagtactacagcttatccctttaacaccactactagggatagtgaaaactatattcatggaatatgttactatatgactagttatgatagaagtctagttcccttaaacatttctataatgctaaacagccgtacgatttcttccaatgttgcctatgccatacaatttgaatggaatctaaatgcaaaagaatctccagaaagcaacatagctacgctgaccacatccccctttttcttttcttatattagagaagacgacaac

SEQ ID NO: 200 - DNA, 1683 bp, Human adenovirus
  misc_feature 1..1683: note = Ad50 penton; 13888 - 15570
  source 1..1683: mol_type = genomic DNA
atgaggcgaaccgtgctaggcggagcggtggtgtatccggagggtcctcctccttcgtacgagagcgtgatgcagcaggcggcggcggcggcgatgcagccaccactggaggctccctttgtaccccctcggtacctggcacctacggaggggagaaacagcattcgttactcggagctggcaccattgtatgataccacccggttgtatttggtggacaacaagtccgcggacatcgcctcactgaactatcagaacgaccacagcaacttcctcaccacggtggtgcaaaacaatgactttacccccacggaggccagcacccagaccatcaactttgacgagcggtcgcgatggggcggtcagctgaagactatcatgcacaccaacatgcccaacgtgaacgagtacatgtttagcaacaagttcaaagctcgggtgatggtgtctagaaaggctcctgaaggtgtcacagtagatgacaattatgatcacaagcaggatattttggaatatgagtggtttgagtttactctaccggaagggaacttctcagccacaatgaccattgacctaatgaacaatgccatcattgataattaccttgaagtgggcagacagaatggagtgttggagagtgacattggtgttaaatttgacaccaggaactttagactgggttgggatccggaaactaagttgattatgcctggggtttacacctatgaggcattccatcctgacattgtattgttgcctggttgcggagttgactttactgaaagtcgccttagtaacttgcttggtatcaggaaaagacacccattccaggagggttttaagatcttgtatgaggatcttgaagggggtaatatcccggccctgttggatgtagaagcctataagaacagtaagaaagaacgagaagccaaaacagaagccgctaaagctgctgctattgctaaagccaacatagttgtcagcgaccctgtaagggtggctaatgccgaagaagtcagaggagacaactatacagcttcatctgttgcaactgaagaatcgctattggctgctgtggccgaaactacagagaccaaactcactattaaacctgtagaaaaagacagcaagagtagaagttacaatgtcttggaagataaagtgaatacagcctaccgcagctggtacctgtcctacaactatggtgaccctgaaaaaggagtccgttcctggacactgctcaccacctcggatgtcacctgtggagcagagcaggtgtactggtcgctcccagacatgatgcaggaccctgtcacattccgttccacgagacaagtcagcaactatccagtggtaggtgcagagctcatgccggtcttctcaaagagtttctacaacgagcaagccgtgtactcccagcagcttcgccagtccacctcgctcacgcacgtcttcaaccgcttccctgagaaccagatcctcatccgcccgccagcgcccaccattaccaccgtcagtgaaaacgttcctgctctcacagatcacgggaccctgccgttgcgcagcagtatccggggagtccagcgcgtgaccgttactgacgccagacgccgcacctgcccctacgtctacaaggccctgggcatagtcgcgccgcgcgtcctttcaagccgcactttctaa

SEQ ID NO: 201 - DNA, 2823 bp, Human adenovirus
  misc_feature 1..2823: note = Ad50 hexon; 18460 - 21282
  source 1..2823: mol_type = genomic DNA
atggccaccccatcgatgctgccccagtgggcatacatgcacatcgccggacaggatgcttcggagtacctgagtccgggtctggtgcagttcgcccgcgccacagacacctacttcaatctggggaacaagtttaggaaccccaccgtggcgcccacccatgatgtgaccaccgaccgcagtcagcggctgatgctgcgctttgtgcccgttgaccgggaagacaatacctacgcatacaaagttcgatacaccttggctgtgggcgacaacagagtgctggatatggccagcactttctttgacattcggggtgtgttggatagaggtcctagcttcaagccatattctggcactgcttacaactcattggcccctaagggcgctcccaatacatctcagtggcttaataagggagatgaagaggatggggaagacgaccaacaagctacatacacttttggcaatgcgccagtaaaagccgaagctgaaattacaaaagaaggactgccaataggtttggaagttccatctgaaggtggccctaaacccatttatgctgataaactgtatcagccagaacctcaggtgggagaggaatcttggactgatacggatggcacagatgaaaaatatggaggcagagcacttaaacctgaaactaaaatgaaaccctgctacgggtctttcgctaaacctactaatgttaaaggcgggcaggcaaaagtgaagaaagaagaagaaggcaaggttgaatatgacattgacatgaactttttcgacctaagatcacaaatgactggcctcaagcctaaaattgtaatgtatgcagaaaatgtggatctagaaactcctgacactcatgtggtgtacaaacctggagcttcagatgctagctctcatgcaaaccttggtcaacagtccatgcccaatagacctaactatattggcttcagggacaacttcatcggactcatgtactacaacagtactggcaacatgggagtgctggctggacaagcgtctcagctaaatgcagtggttgacttgcaagacagaaacacagaattgtcatatcaactcttgcttgattctctgggggacagaaccagatatttcagtatgtggaatcaagcagtggatagctatgacccagatgtgcgtgttattgagaaccatggtgtggaagatgaacttcctaactattgttttccattggatggtgtaggtccgcgaatagacagttacaagggaattgagacaaatggtgatgaaaccactacttggaaagatttagagccaaagggcataagtgaaattgctaagggaaatccgtttgccatggaaattaacctccaagctaatctctggagaagttttctttattccaatgtggctctgtatctcccagactcctacaaatacaccccagccaatgtcactcttccaactaacaccaacacttatgactacatgaatgggcgggtggttcccccatccctggtggatacctacgtaaacattggcgccagatggtctttggatgccatggacaatgtcaacccctttaaccatcaccgcaacgctggcctgcgataccggtccatgcttttgggcaatggtcgttacgtgcctttccacattcaagtgcctcagaaattctttgctgtgaagaacctgctgcttctacccggttcttacacctacgagtggaacttcagaaaggatgtgaacatggtcctgcagagttcccttggtaatgatctccgggtcgatggtgccagcataagttttaccagcatcaatctctatgccaccttcttccccatggcccacaacactgcctccacccttgaagccatgctgcgcaatgacaccaatgatcaatcattcaatgactacctttctgctgccaacatgctctaccccatcccggccaacgctaccaacgttcccatctccattccctctcgcaactgggccgccttcagaggctggtccttcaccagactcaaaaccaaggagactccctctttgggatcagggttcgatccctactttgtttactctggttctataccctacctggatggtaccttctaccttaaccacactttcaagaaagtctccatcatgtttgactcttcagtgagctggcctggtaatgacagattgctaagtccaaatgagttcgaaatcaagcgcacagttgatggggaaggctacaatgtggcccaatgtaacatgaccaaagactggttcctggtccagatgcttgccaactacaacattggataccagggcttctacgttcctgagggttacaaggatcgcatgtactccttcttcagaaacttccagcccatgagtagacaggtggttgatgagattaactacaaagactataaagctgtcgccgtaccctaccagcataataactctggctttgtgggttacatggctcctaccatgcgtcagggtcaagcgtaccctgctaactacccataccccctaattggaaccactgcagtaaccagtgtcacccagaaaaaattcctgtgcgacaggaccatgtggcgcatcccattctctagcaacttcatgtccatgggtgcccttacagacctgggacagaacttgctgtatgccaactcggcccatgcgctggacatgacttttgaggtggatcccatggatgagcccaccctgctttatcttcttttcgaagtcttcgacgtggtcagagtgcaccagccacaccgcggcgtcatcgaggccgtctacctgcgcacaccgttctcggccggcaacgccaccacataa

SEQ ID NO: 202 - protein, 323 aa, Human adenovirus
  REGION 1..323: note = misc_feature - Ad50 fiber; 1 - 323 (GenBank accession no. AAW33547); Human adenovirus 50
MTKRVRLSDSFNPVYPYEDESTSQHPFINPGFISPNGFTQSPDGVLTLNCLTPLTTTGGPLQLKVGGGLIVDDTDGTLQENIRVTAPITKNNHSVELSIGNGLETQNNKLCAKLGNGLKFNNGDICIKDSINTLWTGIKPPPNCQIVENTDTNDGKLTLVLVKNGGLVNGYVSLVGVSDTVNQMFTQKSATIQLRLYFDSSGNLLTDESNLKIPLKNKSSTATSEAATSSKAFMPSTTAYPFNTTTRDSENYIHGICYYMTSYDRSLVPLNISIMLNSRTISSNVAYAIQFEWNLNAKESPESNIATLTTSPFFFSYIREDDN

SEQ ID NO: 203 - protein, 91 aa, Human adenovirus
  REGION 1..91: note = misc_feature - Ad50 fiber shaft; 43 - 133 (GenBank accession no. AAW33547); Human adenovirus 50
DGVLTLNCLTPLTTTGGPLQLKVGGGLIVDDTDGTLQENIRVTAPITKNNHSVELSIGNGLETQNNKLCAKLGNGLKFNNGDICIKDSINT

SEQ ID NO: 204 - protein, 190 aa, Human adenovirus; identical to SEQ ID NO: 132
  REGION 1..190: note = misc_feature - Ad50 fiber knob; 134 - 323 (GenBank accession no. AAW33547); Human adenovirus 50

SEQ ID NO: 205 - protein, 560 aa, Human adenovirus
  REGION 1..560: note = misc_feature - Ad50 penton; 1 - 560 (GenBank accession No. AAW33525); Human adenovirus 50
MRRTVLGGAVVYPEGPPPSYESVMQQAAAAAMQPPLEAPFVPPRYLAPTEGRNSIRYSELAPLYDTTRLYLVDNKSADIASLNYQNDHSNFLTTVVQNNDFTPTEASTQTINFDERSRWGGQLKTIMHTNMPNVNEYMFSNKFKARVMVSRKAPEGVTVDDNYDHKQDILEYEWFEFTLPEGNFSATMTIDLMNNAIIDNYLEVGRQNGVLESDIGVKFDTRNFRLGWDPETKLIMPGVYTYEAFHPDIVLLPGCGVDFTESRLSNLLGIRKRHPFQEGFKILYEDLEGGNIPALLDVEAYKNSKKEREAKTEAAKAAAIAKANIVVSDPVRVANAEEVRGDNYTASSVATEESLLAAVAETTETKLTIKPVEKDSKSRSYNVLEDKVNTAYRSWYLSYNYGDPEKGVRSWTLLTTSDVTCGAEQVYWSLPDMMQDPVTFRSTRQVSNYPVVGAELMPVFSKSFYNEQAVYSQQLRQSTSLTHVFNRFPENQILIRPPAPTITTVSENVPALTDHGTLPLRSSIRGVQRVTVTDARRRTCPYVYKALGIVAPRVLSSRTF

SEQ ID NO: 206 - protein, 940 aa, Human adenovirus
  REGION 1..940: note = misc_feature - Ad50 hexon; 1 - 940 (GenBank accession no. AAW33530); Human adenovirus 50
MATPSMLPQWAYMHIAGQDASEYLSPGLVQFARATDTYFNLGNKFRNPTVAPTHDVTTDRSQRLMLRFVPVDREDNTYAYKVRYTLAVGDNRVLDMASTFFDIRGVLDRGPSFKPYSGTAYNSLAPKGAPNTSQWLNKGDEEDGEDDQQATYTFGNAPVKAEAEITKEGLPIGLEVPSEGGPKPIYADKLYQPEPQVGEESWTDTDGTDEKYGGRALKPETKMKPCYGSFAKPTNVKGGQAKVKKEEEGKVEYDIDMNFFDLRSQMTGLKPKIVMYAENVDLETPDTHVVYKPGASDASSHANLGQQSMPNRPNYIGFRDNFIGLMYYNSTGNMGVLAGQASQLNAVVDLQDRNTELSYQLLLDSLGDRTRYFSMWNQAVDSYDPDVRVIENHGVEDELPNYCFPLDGVGPRIDSYKGIETNGDETTTWKDLEPKGISEIAKGNPFAMEINLQANLWRSFLYSNVALYLPDSYKYTPANVTLPTNTNTYDYMNGRVVPPSLVDTYVNIGARWSLDAMDNVNPFNHHRNAGLRYRSMLLGNGRYVPFHIQVPQKFFAVKNLLLLPGSYTYEWNFRKDVNMVLQSSLGNDLRVDGASISFTSINLYATFFPMAHNTASTLEAMLRNDTNDQSFNDYLSAANMLYPIPANATNVPISIPSRNWAAFRGWSFTRLKTKETPSLGSGFDPYFVYSGSIPYLDGTFYLNHTFKKVSIMFDSSVSWPGNDRLLSPNEFEIKRTVDGEGYNVAQCNMTKDWFLVQMLANYNIGYQGFYVPEGYKDRMYSFFRNFQPMSRQVVDEINYKDYKAVAVPYQHNNSGFVGYMAPTMRQGQAYPANYPYPLIGTTAVTSVTQKKFLCDRTMWRIPFSSNFMSMGALTDLGQNLLYANSAHALDMTFEVDPMDEPTLLYLLFEVFDVVRVHQPHRGVIEAVYLRTPFSAGNATT

SEQ ID NO: 207 - protein, 42 aa, Human adenovirus; identical to SEQ ID NO: 63
  REGION 1..42: note = misc_feature - Ad50 fiber tail; 1 - 42 (GenBank accession no. AAW33547); Human adenovirus 50

SEQ ID NO: 208 - DNA, 35343 bp, Human adenovirus
  misc_feature 1..35343: note = Reference Ad3 Genome Sequence: GenBank accession no. NC_011203 (SEQ ID NO: 208); Human adenovirus 3
  source 1..35343: mol_type = genomic DNA
ctatctatataatataccttatagatggaatggtgccaacatgtaaatgaggtaatttaaaaaagtgcgcgctgtgtggtgattggctgcggggttaacggctaaaaggggcggcgcgaccgtgggaaaatgacgtgacttatgtgggaggagttatgttgcaagttattacggtaaatgtgacgtaaaacgaggtgtggtttgaacacggaagtagacagttttcccacgcttactgacaggatatgaggtagttttgggcggatgcaagtgaaaattctccattttcgcgcgaaaactaaatgaggaagtgaatttctgagtcatttcgcggttatgccagggtggagtatttgccgagggccgagtagactttgaccgtttacgtggaggtttcgattaccgtgtttttcacctaaatttccgcgtacggtgtcaaagttctgtgtttttacgtaggtgtcagctgatcgctagggtatttaaacctgacgagttccgtcaagaggccactcttgagtgccagcgagaagagttttctcctccgcgccgcaagtcagttctgcgctttgaaaatgagacacctgcgcttcctgccacaggaggttatctccagtgagaccgggatcgaaatactggagtttgtggtaaataccctaatgggagacgacccggaaccgccagtgcagcctttcgatccacctacgctgcacgatctgtatgatttagagatagacgggccggaggatcccaatgaggaagctgtgaatgggttttttactgattctatgctgctagctgctgatgaaggattggacataaaccctcctcctgagacacttgttaccccaggggtggttgtggaaagcggcataggtgggaaaaaattgcctgatctgggagcagctgaaatggacttgcgttgttatgaagagggttttcctcccagtgatgatgaagatggggaaactgagcagtccatccataccgcagtaaatgagggagtaaaagctgccagcgatgtttttaagttggactgtccggagctgcctggacatggctgtaagtcttgtgaatttcacaggaataacactggaatgaaagaactattgtgctcgctttgctatatgagaatgcactgccactttatttacagtaagtgtatttaagtgaaatttaaaggaatagtgtagctatttaataactgttgaatggtagatttatgtttttttcttgcgattttttgtaggtcctgtgtctgatgatgagtcaccttctcctgattcaactacctcacctcctgaaattcaggcgcccgcacctgcaaacgtatgcaagcccattcctgtgaagcctaagcctgggaaacgccctgctgtggataagcttgaggacttgttggagggtggggatggacctttggaccttagtacccggaaactgccaaggcaatgagtgccctgcagctgtgtttatttaatgtgacgtcatgtaataaaattatgtcagctgctgagtgttttattacttcttgggtggggacttggatatataagtaggagcagatctgtgtggttagctcacagcaacctgctgccatccatggaggtttgggctatcttggaagacctcagacagactaagctactgctagaaaacgcctcggacggagtctctggcctttggagattctggttcggtggtgatctagctaggctagtgtttaggataaaacaggactacagggaagaatttgaaaagttattggacgatagtccgggactttttgaagctcttaacttgggtcatcaggctcattttaaggagaaggttttatcagttttagatttttctactcctggtagaactgctgctgctgtagcttttcttacttttatattggataaatggatccgccaaactcacttcagcaagggatacgttttggatttcatagcagcagctttgtggagaacatggaaggctcgcaggatgaggacaatcttagattactggccagtgcagcctctgggagtagcagggatactgagacacccaccgaccatgccagcggttctgcaggaggagcagcaggaggacaatccgagagccggcctggaccctccggtggaggagtagctgacctgtttcctgaactgcgacgggtgcttactaggtctacgaccagtggacagaacaggggaattaagagggagaggaatcctagtgggaataattcaagaaccgagttggctttaagtttaatgagccgcaggcgtcctgaaactgtttggtggcatgaggttcagagcgaaggcagggatgaagtttcaatattgcaggagaaatattcactagaacaacttaagacctgttggttggaacctgaggatgattgggaggtggccattaggaattatgctaagatatctctgaggcctgataaacaatatagaattactaagaagattaatattagaaatgcatgctacatatcagggaatggggcagaggttataatagatacacaagataaagcagtttttagatgttgtatgatgggtatgtggccaggggttgtcggcatggaagcagtaacacttatgaatattaggtttaaaggggatgggtataatggcattgtatttatggctaacactaagctgattctacatggttgtagcttttttgggtttaataatacgtgtgtagaagcttgggggcaagttagtgtgaggggttgtagtttttatgcatgctggattgcaacatcaggtagggtcaagagtcagttgtctgtgaagaaatgcatgtttgagagatgtaatcttggcatactgaatgaaggtgaagcaagggtccgccactgcgcagctacagaaactggctgcttcattctaataaagggaaatgccagtgtgaagcataatatgatctgtggacattcggatgagaggccttatcagatgctgacctgcgctggtggacattgcaatattcttgctaccgtgcatatcgtttcacatgcacgcaaaaaatggcctgtatttgaacataatgtgattaccaagtgcaccatgcacataggtggtcgcaggggaatgtttatgccttaccagtgtaacatgaatcatgtgaaggtaatgttggaaccagatgccttttccagagtgagcttaacaggaatctttgatatgaatattcaactatggaagatcctgagatatgatgacactaaaccaagggtgcgcgcatgcgaatgcggaggcaagcatgctagattccagccggtgtgcgtggatgtgactgaagacttgagacccgatcatttggtgcttgcctgcactggagcggagttcggttctagtggtgaagaaactgactaaagtgagtagtggggcaagatgtggatggggactttcaggttggtaaggtgggcagattgggtaaattttgttaatttctgtcttgcagctgccatgagtggaagcgcttcttttgaggggggagtatttagcccttatctgacgggcaggctcccaccatgggcaggagttcgtcagaatgtcatgggatccactgtggatgggagacccgtccagcccgccaattcctcaacgctgacctatgccactttgagttcgtcaccattggatgcagctgcagccgccgccgctactgctgccgccaacaccatccttggaatgggctattatggaagcatcgttgccaattccagttcctctaataacccttcaaccctggctgaggacaagctacttgttctcttggcgcagctcgaggccttaacccaacgcttaggcgaactgtctaagcaggtggcccagttgcgtgagcaaactgagtctgctgttgccacagcaaagtctaaataaagatctcaaatcaataaataaagaaatacttgatataaaacaaatgaatgtttatttgatttttcgcgcgcggtatgccctggaccatcggtctcgatcattgagaacgcggtggatcttttccagtaccctgtaaaggtgggattgaatgtttagatacatgggcattagtccgtctcgggggtggagatagctccattgaagagcctcttgctccggggtagtgttataaatcacccagtcatagcaaggtcggagtgcatggtgttgcacaatatcttttaggagcagactaattgcaacggggaggcccttagtgtaggtgtttacaaatctgttgagctgggacgggtgcatccggggtgaaattatatgcattttggactggatcttgaggttggcaatgttgccgcctagatcccgtctcgggttcatattgtgcaggaccaccaagacagtgtatccggtgcacttgggaaatttatcatgcagcttagagggaaaagcatgaaaaaatttggagacgcctttgtgaccccccagattctccatgcactcatccataatgatagcgatggggccgtgggcagcggcacgggcgaacacgttccgggggtctgaaacatcatagttatgctcctgagtcaggtcatcataagccattttaataaactttgggcggagggtgccagattgggggatgaaagttccctctggcccgggagcatagtttccctcacatatttgcatttcccaggctttcagttcagagggggggatcatgtccacctgcggggctataaaaaataccgtttctggagccggggtgattaactgggacgagagcaaattcctaagcagctgagacttgccgcacccagtgggaccgtaaatgaccccaattacgggttgcagatggtagtttagggaacgacagctgccgtcctcccggagcaggggggccacttcgttcatcatttcccttacatggatattttcccgcaccaagtccgttaggaggcgctctcccccaagggatagaagctcctggagcgaggagaagtttttcagcggcttcagcccgtcagccatgggcattttggaaagagtctgttgcaagagctcgagccggtcccagagctcggtgatgtgctctatggcatctcgatccagcagacctcctcgtttcgcgggttgggacggctcctggagtagggaatcagacgatgggcgtccagcgctgccagggtccgatccttccatggtcgcagcgtccgagtcagggttgtttccgtcacggtgaaggggtgcgcgcctggttgggcgcttgcgagggtgcgcttcagactcatcctgctggtcgagaaccgctgccgattggcgccctgcatgtcggccaggtagcagtttaccatgagttcgtagttgagcgcctcggccgcgtggcctttggcacggagcttacctttggaagttttatggcaggcggggcagtagatacatttgagggcatacaacttgggcgcgaggaaaatggattcgggggagtatgcatccgcaccgcaggaggcgcagacggtttcgcactccacgagccaggtcagatccggctcatcggggtcaaaaacaagttttccgccatgttttttgatgcgtttcttacctttggtttccatgagttcgtgtccccgctgggtgacaaagaggctgtccgtgtccccgtagaccgactttatgggcctgtcctcgagcggagtgcctcggtcctcttcgtagaggaacccagcccactctgatacaaaagcgcgtgtccaggccagcacaaaggaggccacgtgggaggggtagcggtcgttgtcaaccagggggtccaccttctctacggtatgtaaacacatgtccccctcctccacatccaagaatgtgattggcttgtaagtgtaggccacgtgaccaggggtccccgccgggggggtataaaagggggcgggcctctgttcgtcctcactgtcttccggatcgctgtccaggagcgccagctgttggggtaggtattccctctcgaaggcgggcatgacctctgcactcaggttgtcagtttctaggaacgaggaggatttgatattgacagtaccagcagagatgcctttcataagactctcgtccatctggtcagaaaacacaatcttcttgttgtccagcttggtggcaaatgatccatagagggcattggatagaagcttggcgatggagcgcatggtttggttcttttccttgtccgcgcgctccttggcggtgatgttaagctggacgtactcgcgcgccacacatttccattcaggaaagatggttgtcagttcatccggaactattctgattcgccatcccctattgtgcagggttatcagatccacactggtggccacctcgcctcggaggggctcattggtccagcagagtcgacctccttttcttgaacagaaaggggggagggggtctagcatgaactcatcaggggggtccgcatctatggtaaatattcccggtagcaaatctttgtcaaaatagctgatggtggcgggatcatccaaggtcatctgccattctcgaactgccagcgcgcgctcataggggttaagaggggtgccccagggcatggggtgggtgagcgcggaggcatacatgccacagatatcgtagacatagaggggctcttcgaggatgccgatgtaagtgggataacatcgcccccctctgatgcttgctcgcacatagtcatagagttcatgtgagggggcaagaagacccgggcccagattggtgcggttgggtttttccgccctgtaaacgatctggcgaaagatggcatgggaattggaagagatagtaggtctctggaatatgttaaaatgggcatgaggtaagcctacagagtcccttatgaagtgggcatatgactcttgcagcttggctaccagctcggcggtgatgagtacatccagggcacagtagtcgagagtttcctggatgatgtcataacgcggttggcttttcttttcccacagctcgcggttgagaaggtattcttcgtgatccttccagtactcttcgaggggaaacccgtctttttctgcacggtaagagcccaacatgtagaactgattgactgccttgtagggacagcatcccttctccactgggagagagtatgcttgggctgcattgcgcagcgaggtatgagtgagggcaaaagtgtccctgaccatgactttgaggaattgatacttgaagtcgatgtcatcacaggccccctgttcccagagttggaagtccacccgcttcttgtaggcggggttgggcaaagcgaaagtaacatcattgaagaggatcttgccggccctgggcatgaaatttcgggtgattttgaaaggctgaggaacctctgctcggttattgataacctgagcggccaagacgatctcatcaaagccattgatgttgtgccccactatgtacagttctaagaatcgaggggtgcccctgacatgaggcagcttcttgagttcttcaaaagtgagatctgtagggtcagtgagagcatagtgttcgagggcccattcgtgcacgtgagggttcgctttaaggaaggaggaccagaggtccactgccagtgctgtttgtaactggtcccggtactgacgaaaatgctgtccgactgccatcttttctggggtgacgcaatagaaggtttgggggtcctgccgccagcgatcccacttgagttttatggcgaggtcataggcgatgttgacgagccgctggtctccagagagtttcatgaccagcatgaaggggattagctgcttgccaaaggaccccatccaggtgtaggtttccacatcgtaggtgagaaagagcctttctgtgcgaggatgagagccaatcgggaagaactggatctcctgccaccagttggaggaatggctgttgatgtgatggaagtagaactccctgcgacgcgccgagcattcatgcttgtgcttgtacagacggccgcagtactcgcagcgattcacgggatgcaccttatgaatgagttgtacctgacttcctttgacgagaaatttcagtggaaaattgaggcctggcgcttgtacctcgcgctttactatgttgtctgcatcggcatgaccatcttctgtctcgatggtggtcatgctgacgagccctcgcgggaggcaagtccagacctcggcgcggcaggggcggagctcgaggacgagagcgcgcaggccggagctgtccagggtcctgagacgctgcggagtcaggttagtaggcagtgtcaggagattaacttgcatgatcttttggagggcgtgagggaggttcagatagtacttgatctcaacgggtccgttggtggagatgtcgatggcttgcagggttccgtgtcccttgggcgctaccaccgtgcccttgtttttcattttggacggcggtggctctgttgcttcttgcatgtttagaagcggtgtcgagggcgcgcaccgggcggcaggggcggctcgggacccggcggcatggctggcagtggtacgtcggcgccgcgcgcgggtaggttctggtactgcgccctgagaagactcgcatgcgcgacgacgcggcggttgacatcctggatctgacgcctctgggtgaaagctaccggccccgtgagcttgaacctgaaagagagttcaacagaatcaatctcggtatcgttgacggcggcttgcctaaggatttcttgcacgtcgccagagttgtcctggtaggcgatctcggccatgaactgctcgatctcttcctcttgaagatctccgcggcccgctctctcgacggtggccgcgaggtcgttggagatgcgcccaatgagttgagagaatgcattcatgcccgcctcgttccagacgcggctgtagaccacagcccccacgggatctctcgcgcgcatgaccacctgggcgaggttgagctccacgtggcgggtgaagaccgcatagttgcataggcgctggaaaaggtagttgagtgtggtggcgatgtgctcggtgacgaagaaatacatgatccatcgtctcagcggcatctcgctgacatcgcccagcgcttccaagcgctccatggcctcgtagaagtccacggcaaagttaaaaaactgggagttacgcgcggacacggtcaactcctcttccagaagacggataagttcggcgatggtggtgcgcacctcgcgctcgaaagcccctgggatttcttcctcaatctcttcttcttccactaacatctcttcctcttcaggtggggctgcaggaggagggggaacgcggcgacgccggcggcgcacgggcagacggtcgatgaatctttcaatgacctctccgcggcggcggcgcatggtctcggtgacggcacgaccgttctccctgggtctcagagtgaagacgcctccgcgcatctccctgaagtggtgactgggaggctctccgttgggcagggacaccgcgctgattatgcattttatcaattgccccgtaggtactccgcgcaaggacctgatcgtctcaagatccacgggatctgaaaacctttcgacgaaagcgtctaaccagtcgcaatcgcaaggtaggctgagcactgtttcttgcgggcgggggcggctagacgctcggtcggggttctctctttcttctccttcctcctcttgggagggtgagacgatgctgctggtgatgaaattaaaataggcagttttgagacggcggatggtggcgaggagcaccaggtctttgggtccggcttgttggatacgcaggcgatgagccattccccaagcattatcctgacatctggccagatctttatagtagtcttgcatgagtcgttccacgggcacttcttcttcgcccgctctgccatgcatgcgagtgatcccgaacccgcgcatgggctggacaagtgccaggtccgctacaaccctttcggcgaggatggcttgctgcacctgggtgagggtggcttggaagtcgtcaaagtccacgaagcggtggtaggccccggtgttgattgtgtaggagcagttggccatgactgaccagttgactgtctggtgcccagggcgcacgagctcggtgtacttgaggcgcgagtatgcgcgggtgtcaaagatgtaatcgttgcaggtgcgcaccaggtactggtagccaatgagaaagtgtggcggtggctggcggtacaggggccatcgctctgtagccggggctccgggggcgaggtcttccagcatgaggcggtggtagccgtagatgtacctggacatccaggtgataccggaggcggtggtggatgcacgtgggaactcgcgcacgcggttccagatgttgcgcagcggcatgaagtagttcatggtaggcacggtctggccagtgaggcgcgcgcagtcattgacgctctgtagacacggagaaaacgaaagcgatgagcggctcgactccgtggtctgggggaacgtgaacgggttgggtcgcggtgtaccccggttcgagtccaaagctaagcgatcacgctcggatcggccggagccgcggctaacgtggtattggctatcccgtctcgacccagccgacgaatatccagggtacggagtagagtcgtttttgctgctttttcctggacgtgtgccattgccacgtcaagctttagaacgctcagttctcgggccgtgagtggctcgcgcccgtagtctggagaatcagtcgccagggttgcgttgcggtatgccccggttggagcctaagcgcggctcgtatcggccggtttccgcgacaagcgagggtttggcagccccgttatttccaagaccccgccagccgacttctccagtttacgggagcgagcccttttttttttttttttgtttttgtcgcccagatgcatccagtgctgcgacagatgcgcccccagcaacaggccccttctcagcaacagccacaaaaggctcttcttgctcctgcaactactgcagctgcagccgtgagcggcgcgggacagcccgcctatgatctggacttggaagagggcgagggattggcgcgcctgggggctccatcgcccgagcggcacccgcgggtgcaactaaaaaaggactctcgcgaggcgtacgtgccccagcagaacctgttcagggacaggagcggcgaggagccagaggagatgcgagcatctcgatttaacgcgggtcgcgagctgcgccacggtctggatcgaagacgggtgctgcaagacgaggattttgaggtcgatgaagtcacagggatcagcccagctagggcacatgtggccgcggccaacctagtctcggcctacgagcagaccgtgaaggaggagcgcaacttccaaaaatcttttaacaaccatgtgcgcaccctgatcgcccgcgaggaagtgaccctgggtctgatgcatctgtgggacctgatggaggctatcgcccaaaaccccactagcaaaccactgacagctcagctgtttctggtggttcaacatagcagggacaacgaggcattcagggaggcgttgttgaacatcaccgagcctgatgggagatggctgtatgatctgatcaacatcctgcaaagtattatagtgcaggaacgtagcctgggtttggctgagaaagtggcagctatcaactactcggtcttgagcctgggcaaatactacgctcgcaagatctacaagaccccctacgtacccatagacaaggaggtgaagatagatgggttttacatgcgcatgactctgaaggtgctgactctgagcgacgatctgggggtgtatcgcaatgacaggatgcaccgcgcggtgagcgccagcaggaggcgcgagctgagcgacagagaacttatgcacagcttgcaaagagctctaacgggggccgggactgatggggagaactactttgacatgggagcggatttgcaatggcaacccagtcgcagggccatggaggctgcagggtgtgagcttccttacatagaagaggtggatgaagtcgaggacgaggagggcgagtacttggaagactgatggcgcgacccgtatttttgctagatggaacagcagcaggcaccggaccccgcaatgcgggcggcgctgcagagccagccgtccggcattaactcctcggacgattggacccaggccatgcaacgcataatggcgctgacgacccgcaaccccgaagcctttagacagcaaccccaggccaaccgcctttctgccatactggaggccgtagtgccctcccgctccaaccccacccacgagaaggtcctggctatcgtgaacgcgctggtggagaacaaggccatccgtcccgatgaggccgggctggtatacaatgctctcttggagcgcgtggcccgttacaacagcagcaacgtgcaaaccaacctggaccggatggtgaccgatgtgcgcgaggccgtgtctcagcgcgagcgattccagcgcgacgccaacttggggtcgttggtagcgctaaacgctttcctcagcacccagcccgccaacgtgccccgtggtcagcaagactatacaaactttttgagtgcattgagactcatggtagctgaggtgccccagagcgaggtgtaccagtccgggccagattacttcttccagaccagcagacagggcttgcagacagtgaacctgactcaggctttcaagaacctgaagggtctgtggggagtgcacgccccagtaggggatcgcgcgaccgtgtctagcttgctgactcccaactcccgcctgctgctgctgctggtatccccctttactgacagcggtagcattgaccgcaactcgtacttgggctacctgcttaacctgtatcgcgaggccataggacagagccaggtggacgagcagacctatcaagaaatcacccaagtgagccgcgccctgggtcaggaagacacgggcagtttggaagccaccctgaacttcttgctaaccaaccggtcacagaagatccctcctcagtatgcgcttaccgctgaggaggagcggatcctcagatacgtgcaacagagcgttggactgttcctgatgcaggagggggcgacacctaccgccgcgctggacatgacagctcgaaacatggagcccagcatgtatgctagtaacaggcctttcattaacaaactgctggactacctgcacagggcggccgccatgaactctgattatttcaccaatgctatcctgaacccacactggctgcccccacctggtttctacactggcgagtacgacatgcccgaccccaatgacgggttcctgtgggacgatgtggacagcagcatattttccccgcctcccggttatacagtttggaagaaggaagggggcgatagaagacactcttccgtgtcgctatccggaacggctggtgctgccgcgaccgtgcccgaagctgcaagtcctttccctagcttgcccttttcactaaacagcgttcgcagcagtgaactggggagaataacccgcccgcgcttgatgggcgaggatgagtacttgaatgactctttgctgaggccagagagggaaaagaacttccccaacaatggaatagagagtctggtggataagatgagtagatggaagacctatgcgcaggatcacagagacgagcccaggatcttgggggctacaagcagaccgatccgtagacgccagcgccacgacaggcagatgggtcttgtgtgggacgatgaggactctgccgatgatagcagcgtgttggacttgggtggaagaggagggggcaacccgttcgctcatctgcgtcccagattcgggcgcatgttgtaaaagtgaaagtaaaataaaaaggcaactcaccaaggccatggcgaccgagcgtgcgttcgttcttttttgttatctgtgtctagtacgatgaggagacgagccgtgctaggcggagcggtggtgtatccggagggtcctcctccttcttacgagagcgtgatgcagcaacaggcggcgatgatacagcccccactggaggctcccttcgtacccccacggtacctggcgcctacggaagggagaaacagcattcgttactcggagctgtcgcccctgtacgataccaccaagttgtatctggtggacaacaagtcggcggacatcgcctccctgaactatcagaacgaccacagcaacttcctgaccacggtggtgcagaacaatgactttacccccacggaggctagcacccagaccatcaactttgacgagcggtcgcgatggggcggtcagctgaagaccatcatgcacaccaacatgcccaacgtgaacgagtacatgttcagcaacaagttcaaggcgagggtgatggtgtccagaaaagctcctgaaggtgttacagtaaatgacacctatgatcataaagaggatatcttgaagtatgagtggtttgagttcattttaccagaaggcaacttttcagccaccatgacgatcgacctgatgaacaatgccatcattgacaactacctggaaattggcagacagaatggagtgctggaaagtgacattggtgttaagtttgacactagaaatttcaggctcgggtgggaccccgaaactaagttgattatgccaggtgtctacacttatgaggcattccatcctgacattgtattgctgcctggttgcggggtagactttactgaaagccgacttagcaacttgcttggcatcaggaagagacatccattccaggagggtttcaaaatcatgtatgaagatcttgaagggggtaatattcctgcccttttggatgtcactgcctatgaggaaagcaaaaaggataccactactgaaacaaccacactggctgttgcagaggaaactagtgaagatgatgatataactagaggagatacctatataactgaaaaacaaaaacgtgaagctgcagctgctgaagttaaaaaagagttaaagatccaacctctagaaaaagacagcaagagtagaagctacaatgtcttggaagacaaaatcaacacagcctaccgcagttggtacctgtcctacaattacggtaaccctgagaaaggaataaggtcttggacactgctcaccacttcagatgtcacctgtggggcagagcaggtctactggtcgctccctgacatgatgcaagacccagtcaccttccgctccacaagacaagtcaacaactacccagtggtgggtgcagagcttatgcccgtcttctcaaagagtttctacaatgagcaagccgtgtactctcagcagctccgacaggccacttcgctcacgcacgtcttcaaccgcttccctgagaaccagatcctcatccgcccgccggcgcccacaattaccaccgtcagtgaaaacgttcctgctctcacagatcacgggaccctgccgttacgcagcagtatccggggagtccagcgcgtgaccgttactgacgccagacgccgcacctgtccctacgtttacaaggccctgggcatagtcgcgccgcgcgttctttcaagccgcactttctaaaaaaaaaaaaaatgtccattctcatctcgcccagtaataataccggttggggactgtatgcgcccaccaagatgtatggaggcgcccgcaagcgctctacccagcatcctgtgcgcgttcgcggtcatttccgcgctccctggggcgcactcaagggtcgtacccgcactcggaccacggtcgatgatgtgatcgaccaggtggtcgccgatgctcgtaattatactcctactgcgcctacatctactgtggatgcagttattgacagtgtggtggcagacgcccgcgcctatgctcgccggaagagccgaaggaggcgcatcgccaggcgccacagggctactcccgccatgcgagccgcaaaagctattctgcggagggccaaacgtgtggggcgaagagccatgcttagagcggccagacgcgcggcttcaggtgccagcagcggcaggtcccgcaggcgcgcggccacggcggcagcagcggccattgccaacatggcccaaccgcgaagaggcaatgtgtactgggtgcgtgatgccactaccggccagcgcgtgcccgtgcgcacccgcccccctcgcacttagaagatactgagcagtctccgatgttgtgtcccagcggcaagtatgtccaagcgcaaatacaaggaagagatgctccaggtcatcgcgcctgaaatctacggtccgccggtgaaggatgaaaaaaagccccgcaaaatcaagcgggtcaaaaataacaaaaaggaagaagatgacgatgatgggctggtggagtttgtgcgcgagttcgccccaagacggcgcgtgcagtggcgcgggcgcaaagtgcgtcaagtgctcagacccgggaccactgtggtttttacacctggcgagcgttccagcactacttttaaacggtcctatgatgaggtgtacggggatgacgatattcttgagcaggcggcagaccgccttgacgagtttgcttatggcaagcgcactagatccagtcccaaagaggaggctgtgtccattcctttggatcatggaaatcccacccccagcctcaaaccagtcaccctgcagcaagtgctgcccgtgcctgcgcggagaggcgtaaagcgcgagggtgaggacctatatcccaccatgcagctaatggtgcccaagcgccagaggctagaagacgtactggagaaaatgaaagtggatgccgatatccagcctgaggtcaaagtaagacctatcaaggaagtggcgccaggtttgggagtacaaaccttcgacatcaagattcccaccgagtccatggaagtgcagaccgaacctgcaaaacccaccacctcaattgaggtgcaaacggaaccctggatgcccgcgcccgttgccgcccccagcaccactcgaagatcacgacgaaagtacggcccagcaagtctgctaatgcccaactatgctctgcacccatccatcattcccactccgggttacagaggcactcgctactatcgaaaccggagcaacacctctcgccgccgcaaaccacctgcaagtcgcactcgccgtcgccgccgccgcaacactgccagcaaattgactcccgccgccctggtgcggagagtgtaccgcgatggtcgcgctgaacctctgacgctgccgcgcgcgcgctaccatccaagcatcaccacttaatgactgttgacgctgcctccttgcagatatggccctcacttgccgccttcgcgtccccattactggctaccgaggaagaaactcgcgccgtagaaggatgttggggcgagggatgcgccgccacagacgaaggcgcgctatcagcagacgattagggggtggctttttgccagctcttatacccatcatcgccgcagcgatcggggcgataccaggcatagcttcagtggcggttcaggcctcgcagcgccactaacattggaaaaaacttataaataaaaaatagaatggactctgacgctcctggtcctgtgactatgtttttgtagagatggaagacatcaatttttcatccctggctccgcgacacggcacgaggccgtacatgggcacctggagcgacatcggcacgagccaactgaacgggggcgccttcaattggagcagtatctggagcgggcttaaaaattttggctcgaccgtaaaaacctatgggaacaaagcttggaacagcagcacagggcaggctctgagaaataagcttaaggaacaaaacttccaacagaaggtggtcgatgggatcgcctctggtattaacggcgtagtggatctggccaaccaggctgtacaaaaacagataaacagccgcctggacccgccgcccgcaacccctggtgaaatggaagtggaggaagaacttcctccgctggaaaagcggggcgacaagcgtccgcgacccgagctagagcagacgctggtgacgcgcgcagacgagcccccttcatatgaggaggcagtaaagctcggaatgcccactaccaggcctgtagctcacatggctaccggggtgatgaaaccttctcagtcacatcgacccgccaccttggacttgcctcctccccctgcttctgcggcgcctgttcccaaacctgtcgctaccagaaagcccaccgccgtacagcccgtcgccgtagccagaccgcgtcctgggggcacaccgcgcccgaaagcaaactggcaaagtactctgaacagcatcgtgggtctgggcgtgcagagtgtaaagcgccgtcgctgctattaattaaatatggagtagcgcttaacttgcttgtctgtgtgtatgtatcatcaccacgccgccgcagcagaggagaaaggaagaggtcgcgcgccgaggctgagttgctttcaagatggccaccccatcgatgatgccccaatgggcatacatgcacatcgccggacaggatgcttcggagtacctcagtccgggtctggtgcagttcgcccgtgcaacagacacctacttcagtatggggaacaaatttagaaaccccacagtggcgcccacccacgatgtgaccaccgaccgtagccagcgcctgatgctgcgcttcgtgcccgttgaccgggaagacaatacctactcttacaaagttcgctacacgctggctgtaggcgacaacagagtgcttgacatggccagcacattctttgacattcggggggtgcttgatagaggtcctagcttcaagccatattccggcacagcttacaattcactcgctcctaagggcgcgcccaatacatctcagtggatagttacaacaaatggggacaatgcagtaactaccaccacaaacacatttggcattgcttccatgaagggagacaatattactaaagaaggtttgcaaattgggaaagacattaccactactgaaggagaagaaaagcccatttatgccgataaaacatatcagccagagcctcaagttggagaagaatcatggactgatactgatggaacaaatgaaaagtttggtggaagagcccttaaaccagctaccaacatgaagccatgctacgggtcttttgcaagacctacaaacataaaagggggccaagctaaaaacagaaaagtaaaaccaacaaccgaaggaggggttgaaactgaggaaccagatattgatatggaatttttcgatggtagagatgctgttgcaggagctttagcgcctgaaattgtgctttatacggaaaatgtaaatttggaaactccagacagtcatgtggtatataaaccagaaacgtctaataactctcatgcaaatttgggtcaacaagccatgcctaacagacccaattacattggcttcagggataacttcgtaggcctaatgtactacaacagtactggaaatatgggagttttggctggccaagcatcacaactgaatgcagtggttgacttgcaggacagaaatactgaactgtcatatcagcttttgcttgattctctgggagacagaaccagatacttcagcatgtggaatcaggctgtggacagttacgatcccgatgttcgcattattgaaaatcatggcatcgaggatgaactgcctaattactgttttcctctgaatggcataggaccagggcacacatatcaaggcattaaagttaaaaccgatgacactaatggatgggaaaaagatgctaatgttgctccagctaatgaaataaccataggcaacaacctggctatggaaattaatatccaagctaacctttggagaagttttctgtactctaatgtggctttgtaccttccagatgtttacaagtacacgccacctaacattactttgcccactaacaccaacacctatgagtacatgaacgggcgagtggtatccccatccctggttgattcatacatcaacattggcgccaggtggtctcttgacccaatggacaatgtgaatccattcaaccaccaccgcaatgctggtctgcgctacaggtccatgcttctgggaaatggtcgttatgtgcctttccacatacaagtgcctcagaaattctttgctgtcaagaacctacttcttctacctggctcctacacctacgagtggaacttccgaaaggatgtgaacatggtcctgcaaagttcccttggaaatgacctcagaacggatggtgctaccataagtttcaccagcatcaatctctatgccaccttcttccccatggctcacaacacagcttccacccttgaagccatgctgcgcaacgataccaatgatcagtcatttaacgactacctctctgcagctaacatgctttaccccattcctgccaatgcaaccaacattccaatttccatcccatctcgcaactgggcagccttcaggggctggtccttcaccagactcaaaaccaaggagactccatctcttggatcagggttcgatccctacttcgtatattctggatctattccctacctggatggcaccttttaccttaaccacactttcaagaaggtctccatcatgtttgactcctcagtcagctggcctggcaatgacaggctgttgagtccaaatgagtttgaaatcaagcgcactgtggacggggaaggatacaacgtggcacaatgcaacatgaccaaagactggttcctggttcagatgcttgccaattacaacattggctaccagggcttttacatccctgagggatacaaggatcgcatgtactcctttttcagaaacttccagcctatgagcaggcaggtggttgatgaggttaattacactgactacaaagccgtcaccttaccataccaacacaacaactctggctttgtagggtaccttgcacctactatgagacaaggggaaccttacccagccaattatccatacccgctcatcggaactactgccgttaagagtgtcacccagaaaaagttcctgtgcgacaggaccatgtggcgcattcccttctccagcaacttcatgtccatgggggcccttaccgacctgggacagaacatgctctatgccaactcagcccatgcgctggacatgacttttgaggtggatcccatggatgagcccaccctgctttatcttcttttcgaagtcttcgacgtggtcagagtgcaccagccacaccgcggcgtcatcgaggccgtctacctgcgcacaccgttctcggccggcaacgccaccacataagaagcctcttgcttcttgcaagcagcagctgcagccatgacatgcgggtccggaaacggctccagcgagcaagagctcaaagccatcgtccgagacctgggctgcggaccctatttcctgggaacctttgacaagcgtttcccggggttcatggcccccgacaagctcgcctgcgccatagtcaacactgccggacgcgagacggggggagagcactggctggcttttggttggaacccgcgctacaacacctgctacctttttgatccttttgggttctcggatgagcggctcaaacagatttaccagtttgagtacgaggggctcctgcgtcgcagtgcccttgctaccaaagaccgctgcatcaccctggagaagtctacccaaagcgtgcagggtccgcgctcagccgcctgtggacttttttgctgtatgttccttcatgcctttgtgcactggcccgaccgccccatggacggaaaccccaccatgaagttgctgactggggtgtccaacagcatgctccaatcaccccaagtccagcccaccctgcgccgcaaccaggaggtgctataccgcttcctaaacacccactcatcttactttcgttctcaccgcgcgcgcattgaaagggccaccgcgtttgaccgtatggatatgcaataagtcatgtaaaaccgtgttcaataaacagcactttatttttacatgcactgaggctctggttttgctcatttgtttcatcatttactcagaagtcgaatgggttctggcgggagtcagagtgacccgcgggcagggatacgttgcggaactgtaacctgttctgccacttgaactcggggattaccagcttgggaactggaatctcgggaaaggtgtcttgccacaactttctggtcagttgcatagcgccaagcaggtcaggagcagagatcttgaaatcacagttggggccggcattctggacacgggagttgcgatacactgggttgcaacactggaacactatcaacgctgggtgtcttacgcttgccaacacggttgggtcactgatggtagtcacatccaagtcttcagcattggccatcccaaagggggtcatcttacatgtctgcctgcccatcacgggagcgcagcctggcttgtggttgcaatcacaatgaatggggatcagcatcatcctggcttggtcgggagttatccctgggtacacagccttcatgaaggcttcgtactgcttaaaagcttcctgggccttacttccctcggtgtagaacatcccacaggacttgctggaaaattgattagtagtacagttggcatcattcacacaacagcgggcatcgttgttggccaactgaaccacatttctgccccagcggttttgggtgatcttggctctgtctggattctccttcatagcgcgctgcccgttctcgctcgccacatccatctcgataatgtggtccttctggatcatgatagtgccatgcaggcatttcaccttgccttcataatcggtgcatccatgagcccacagagcgcacccggtgcactcccaattattgtgggcgatctcagaataataatgtaccaatccctgcatgaatcttcccatcattgttgtcaaggtcttcatgctggtaaatgtcagcgggatgccacggtgctcctcgttcacatactggtggcagatacgcttgtattgctcgtgctgctctggcatcagcttgaaagaggttctcagatcattatccagcctgtacctttccattagcacagccatcacttccatgcccttctcccaggcagataccaggggcagactcaaaggattcctaacagcaataaaagtagctcctttagctatagggtcattcttgtcgatcttctcaacacttctcttgccatccttctcaatgatgcgcaccggggggtagctgaagcccacggccaccaactgagcctgttctctttcttcttcactatcctggctgatgtcttgcagagggacatgcttggtcttcctgggcttcttcttgggagggatcgggggaggactgttgctccgctccggagacagggatgactgcgaagtttcgcttaccaataccacctggctctcggtagaagaaccggaccccacacgacggtaggtgttcctcttcgggggcagaggtggaggcgactgagatgggctgcggtctggccttggaggcggatggctggcagagctcattccgcgttcgggggtgtgctcccggtggcggtcgcttgactgatttcctccgcggctggccattgtgttctcctaggcagagaaacaacagacatggaaactcagccatcactgccaacatcgctgcaagcaccatcacacctcgcccccagcagcgacgaggaggagagcttaaccaccccaccacccagtcccgctaccaccacctctaccctcgatgatgaggaggaggtcgacgcagcccaggagatgcaggcgcaggataatgtgaaaacggaagagattgaggcagatgtcgagcaggacccgggctatgtgacgccggcggagcaccaggaggagctgaaacgctttctagacagagaggatgacgaccgcccagagcatcaagcagatggcgtttaccaggaggctgggatcagggatcatgtcgccgactacctcaccggccttggtggggaggacgtgctcctcaaacatctagcaaggcagtcgatcatagttaaagacgcattgctcgatctcactgaagtgcccatcagtgtggaagagcttagccgcgcctacgagctgaacctcttttcgcctcaggtaccccccaagcggcagccaaacggcacctgcgaggccaaccctcgactcaacttctatccagcttttactatccccgaagtgttggccacctaccacatctttttcaagaaccaaaagattccagtctcctgccgcgccaaccgcacccgcgccgatgccctgctcaacttgggtccgggagctcgcttacctgatatagcttccttggaagaggttccaaagatctttgagggtctgggaagtgatgagacacgggccgcaaatgctctgcaacagggagagaatgacatggatgaacaccacagcgctctggtggaactggagggtgacaatgcccggattgcagtgctcaagcgcagtatcgtggtcacccattttgcctaccccgctgttaacctgccccccaaagttatgagcgctgtcatggaccatctgctcatcaaacgagcaagacctctttcagaaaaccagaacatgcaggatccagacgcctcggacgagggcaagccggtagtcagtgacgagcagctatctcgctggctgggtaccaactccccccgagatttggaagagaggcgcaagcttatgatggctgtagtgctagtaactgtggagctggagtgtctgcgccgctttttcaccgaccctgagaccctgcgcaagctagaggagaacctgcactacacctttagacatggcttcgtgcggcaggcatgcaagatctccaacgtggagcttaccaacctggtttcttacatgggcattttgcatgagaaccgactagggcagagcgtcctgcacaccacccttaaaggggaggcccgccgtgactacatccgagactgtgtctacctctacctctgccatacctggcaaactggtatgggtgtgtggcaacagtgtttggaagagcagaacctaaaagagctggacaagctcttgcagagatccctcaaagccctgtggacaggttttgatgagcgcaccgtcgcctcggacctggcagacatcatcttccccgagcgtctcagggttactctgcgaaacggcctgccagactttatgagccagagcatgcttaacaactttcgctctttcatcctggaacgctccggtatcctgcctgccacctgctgtgcgctgccctccgactttgtgcctctcacctaccgcgagtgcccaccgccgctatggagccactgctacctgttccgcctggccaactacctctcctaccactcggatgttatagaggatgtgagcggagacggcctgctggaatgccactgccgctgcaatctttgcacaccccaccgctcccttgcctgcaacccccagttgctgagcgagacccagattatcggcaccttcgagctgcagggtcccagaagtaaaggcgaggggtcttctccggggcagagtttgaaactgacaccggggctgtggacctccgcctacctgcgcaagtttcaccccgaggactaccatccctatgagatcaggttctatgaggaccaatcacatcctcccaaagtcgagctctcagcctgcgtcatcacccagggagcaattctggcccaattgcaagccatccaaaaatctcgccaagaatttctgctaaaaaagggaaacggggtctaccttgaccctcagaccggtgaggagctcaacacaaggttcccccaggatgtcccatcgccgaggaagcaagaagttgaaggtgcagctgtcgcccccagaggatatgaaggaagactgggacagtcaggcagaggaggagatggaagattgggacagccaggcagaggaggtggacagcctggaggaagacagtttggaggaggaagacgaggaggcagaggaggtggaagaagcaaccgccgccaaacagttgtcatcggcggcggagacaagcaagtccccagacagcagcacggctaccatctccgctccgggtcggggggcccagcggcggcccaacagtagatgggacgagaccgggcgattcccaaacccgaccaccgcttccaagaccggtaagaaggagcgacagggatacaagtcctggcgtggacataaaaacgctatcatctcctgcttgcatgaatgcgggggcaacatatccttcacccggcgatacctgctcttccaccacggtgtaaacttcccccgcaatatcttgcattactaccgtcacctccacagcccctactgcagtcagcaagtcccggcaaccccgacagaaaaatacagcagcgacaacggtgaccagaaaaccagcagttagaaaatccacaacaagtgcaccaggaggaggactgaggatcacagcgaacgagccagcgcagaccagagagctgaggaaccggatctttccaaccctctatgccattttccagcagagtcgggggcaagagcaggaactgaaagtaaaaaaccgatctctgcgctcgctcaccagaagttgtttgtatcacaagagcgaagaccaacttcagcgcactctcgaggacgccgaggctctcttcaacaagtactgcgcgctgactcttaaagagtagcccttgcccgcgctcattttgaaaacggcgggaatcacgtcacccttggcacctgtcctttgcccttgtcatgagtaaagagattcccacgccttacatgtggagctatcagccccaaatggggttggcagcaggcgcttcccaggactactccacccgcatgaattggcttagcgccgggccctcaatgatatcacgggttaatgatatacgagcttatcgaaaccagttactcctagaacagtcagctctcaccaccacaccccgtcaacaccttaatccccgaaattggcccgccaccctggtgtaccaggaaaatcccgctcccaccaccgtactacttcctcgagacgcccaggccgaagttcagatgactaacgcaggtgtacagctggcgggcggttccgccctatgtcgtcaccgacctcaacagagtataaaacgcctggtgattagaggccgaggtatccagctcaacgacgagtcggttagctcttcgcttggtctgcgaccagacggagtcttccaaatcgccggctgtgggagatcttccttcactcctcgtcaggctgtgctgactttggagagttcgtcctcgcagccccgctcgggcggcattggaactctccagtttgtggaggagtttactccctctgtctacttcaaccccttctccggctctcctggccagtacccggacgagttcataccaaacttcgacgcaatcagcgagtcagtggatggctatgattgatgtctaatggtggtgcggctgagctagctcgactgcgacacctagaccactgccgccgctttcgctgcttcgcccgggaactcaccgagttcatctacttcgaactctccgaggagcaccctcagggtccggcccacggagtgcggattaccatcgaagggggaatagactctcgcctgcatcgcatcttctcccagcggcccgtgctaattgaacgcgaccagggaaatacaaccatctccatctactgcatctgtaaccaccccggattgcatgaaagcctttgctgtcttgtttgtgctgagtttaataaaaactgagttaagaccctcctacggactaccgcttcttcaatcaggactttacaacaccaaccagatcttccagaagacccagacccttcctcctttcatccaggactctaactctaccttaccagcaccctccactactaaccttcccgaaacaaacaagcttgcatctcatctgcaacaccgcctttcacgaagccttctttctgccaatactaccactcccaaaaccggaggtgagctccgcggtcttcctactgacgacccctgggtggtagcgggttttgtaacgttaggagtagttgcgggtgggcttgtgctgatcctttgctacctatacacaccttgctgtgcatatttagtcatattgtgctgttggtttaagaaatgggggccatactagtcgtgcttgctttactttcgcttttgggtctgggctctgctaatctcaatcctctcgatcacgatccatgtttagacttcgacccagaaaactgcacacttacttttgcacccgacacaagccgtctctgtggagttcttattaagtgcggatgggactgcaggtccgttgaaattacacataataacaaaacatggaacaataccttatccaccacatgggagccaggagttccccagtggtatactgtctctgtccgaggtcctgacggttccatccgcattagtaacaacactttcattttttctgaaatgtgcgatctggccatgttcatgagcagacagtatgacctatggcctcccagcaaagagaacattgtggcattttccattgcttattgcttggtaacatgcatcatcactgctatcatttgtgtgtgcatacacttgcttatagttattcgccctagacaaagcaatgaggaaaaagagaaaatgccttaacctttttcctcataccttttctttacagcatggcttctgttacagctctaattattgccagcattgtcactgtcgctcacgggcaaacaattgtccatattaccttaggacataatcacactcttgtagggcccccaattacttcagaggttatttggaccaaacttggaagtgttgattattttgatataatttgcaacaaaactaaaccaatatttgtaatctgtaacagacaaaatctcacgttaattaatgttagcaaaatttataacggttactattatggttatgacagatccagtagtcaatataaaaattacttagttcgcataactcagcccaaattaacagtgccaactatgacaataattaaaatggctaataaagcattagaaaattttacatcaccaacaacacccaatgaaaaaaacattccaaattcaatgattgcaattattgcggcggtggcattgggaatggcactaataataatatgcatgctcctatatgcttgttactataaaaagtttcaacataaacaggatccactactaaattttaacatttaattttttatacagatgatttccactacaatttttatcattactagccttgcagctgtaacttatggccgttcacacctaactgtacctgttggctcaacatgtacactacaaggaccccaagaaggctatgtcacttggtggagaatatatgataatggagggttcgctagaccatgtgatcagcctggtacaaaattttcatgcaacggaagagacttgaccattattaacataacatcaaatgagcaaggcttctattatggaaccaactataaaaatagtttagattacaacattattgtagtgccagccaccacttctgctccccgcaaatccactttctctagcagcagtgccaaagcaagcacaattcctaaaacagcttctgctatgttaaagcttccaaaaatcgctttaagtaattccacagccgctcccaatacaattcctaaatcaacaattggcatcattactgccgtggtagtgggattaatgattatatttttgtgtataatgtactacgcctgctgctatagaaaacatgaacaaaaaggtgatgcattactaaattttgatatttaattttttatagaattatgatattgtttcaatcaaataccactacctcctatgcatacacaaacattcagcctaaatacgctatgcaactagaaatcacaatactaattgtaattggaattcttatactatctgttattctttattttatattctgccgtcaaatacccaatgttcatagaaattctaaaagacgtcccatctattctcctatgattagtcgtccccatatggctctgaatgaaatctaagatctttttttttttctcttacagtatggtgaacatcaatcatgatccctagaaatttcttcttcaccatactcatctgtgcttttaatgtctgtgctactttcacagcagtagccactgcaagcccagactgtataggaccatttgcttcctatgcactttttgccttcgttacttgcatctgcgtgtgtagcatagtctgcctggttattaattttttccaactggtagactggatctttgtgcgaattgcctacctacgtcaccatcccgaataccgcaatcaaaatgttgcggcacttcttaggcttatttaaaaccatgcaggctatgctaccagtcattttaattttgctactaccctgcattcccctagcttccaccgccactcgcgctacacctgaacaacttagaaaatgcaaatttcaacaaccatggtcatttcttgattgctaccatgaaaaatctgattttcccacatactggatagtgattgttggaataattaacatactttcatgtacctttttctcaatcacaatataccccacatttaattttgggtggaattctcccaatgcactgggttacccacaagaaccagatgaacatattccactacaacacatacaacaaccactagcactggtacagtatgaaaatgagccacaaccttcactgccccctgccattagttacttcaacctaaccggcggagatgactgacccaatcgccacatcatccaccgctgccaaggagctgctggacatggacggacgtgcctcagaacagcgactcatccaactacgcattcgtcagcagcaggaacgagcagtaaaagagctaagggatgccattgggattcaccagtgcaaaaaaggcatattctgcttagtaaaacaatccaaaatctcctacgagatcaccgctactgaccatcgtctctcatacgagctcggtccgcagcgacaaaaattcacctgcatggtgggaatcaaccccatagttatcacccagcagtctggagatactaagggttgtatccagtgttcctgtgattccaccgagtgcatctacacactgctgaagaccctctgcggccttcgagacctcctacccatgaactaatcattgcccctaccttacccaatcaaaatattaataaagacacttacttgaaatcagcaatacagtctttgtcaaaactttctaccagcagcacctcaccctcttcccaactctggtactctaaacgtcggagggtggcatactttctccacactttgaaagggatgtcaaattttatttcctcttctttgcccacaatcttcatttctttatccccagatggccaagcgagctcggctaagcacttccttcaacccggtgtacccttatgaagatgaaagcagctcacaacacccatttataaatcctggtttcatttcccctgacgggttcacacaaagtccaaacggggttttaagtcttaaatgtgttaatccacttaccactgcaagcggctccctccaacttaaagtgggaagtggtcttacagtagacactactgatggatccttagaagaaaacatcaaagttaacacccccctaacaaagtcaaaccattctataaatttaccaataggaaacggtttgcaaatagaacaaaacaaactttgcagtaaactcggaaatggtcttacatttgactcttccaattctattgcactgaaaaataacactttatggacaggtccaaaaccagaagccaactgcataattgaatacgggaaacaaaacccagatagcaaactaactttaatccttgtaaaaaatggaggaattgttaatggatatgtaacgctaatgggagcctcagactacgttaacaccttatttaaaaacaaaaatgtctccattaatgtagaactatactttgatgccactggtcatatattaccagactcatcttctcttaaaacagatctagaactaaaatacaagcaaaccgctgactttagtgcaagaggttttatgccaagtactacagcgtatccatttgtccttcctaatgcgggaacacataatgaaaattatatttttggtcaatgctactacaaagcaagcgatggtgccctttttccgttggaagttactgttatgcttaataaacgcctgccagatagtcgcacatcctatgttatgacttttttatggtccttgaatgctggtctagctccagaaactactcaggcaaccctcataacctccccatttaccttttcctatattagagaagatgactgacaacaaaaataaagttcaacattttttattgaaattccttttacagtattcgagtagttattttgcctcccccttcccatttaacagaatacaccaatctctccccacgcacagctttaaacatttggataccattagagatagacatagttttagattccacattccaaacagtttcagagcgagccaatctggggtcagtaatacataaaaatgcatcgggatagtcttttaaagcgctttcacagtccaactgttgcggatgcgactccggagtctgaatcacggtcatctggaagaagaacgatgggaatcataatccgaaaacggaatcgggcgattgtgtctcatcaaacccacaagcaaccgctgtctgcgtcgctccgtgcgactgctgtttatgggatcggggtccgcagtgtcctgaagcatgattttaatagcccttaacattaactttctggtgcgatgcgcgcagcaacgcattctgatttcacttagattactacagtaggtacagcacattatcacaatattgtttaataaaccataattaaaagcgctccagccaaaactcatatctgatataatcgcccctgcatgaccatcataccaaagtttaatataaattaaatgtcgttccctcaaaaacacactacccacatacatgatctcttttggcatgtgcatattaacaatttgtctgtaccatggacaacgttggttaatcatgcaacccaatataaccttccggaaccacactgccaacaccgctcccccagccatgcattgaagtgaaccctgctgattacaatgacaatgaagaacccaattctctcgaccatgaatcacttgagactgaaaaatatctatagtagcacaacaaagacataaatgcatgcatcttctcataatttttaactcctctggatttaaaaacatatcccaaggaatgggaaactcttgcagaacagtaaagctggcagaacaaggaagaccacgaacacaacttacactatgcatagtcatagtatcacaatctggcaacagcgggtggtcttcagtcatagaagctcgggtttcattttcctcacatcgtggtaattgggctctggtgtaagggtgatgtctggcgcatgatgtggagcgtgcgcgcaaccttgtcataatggagttgcttcctgacattctcgtattttgtatagcaaaacgctgccctggcacaacacactcttcttcgtcttctatcctgccgcttagtgtgttccgtctgataattcaagtacagccacactcttaagttggtcaaaagaatgctggcttcagttgtaatcaaaactccatcatatttaattgttctaaggaaatcatccacggtagcatatgcaaatcccaaccaagcaatgcaactggattgcgtttcaagcagcagaggagagggaagagacggaagaatcatgttaatttttattccaaacgatctcgcagtacttcaaattgtagatcgcgcagatggcatctatcgcccccactgtgttggtgaaaaagcacagctaaatcaaaagaaatgcgattttcaaggtgctcaacggtggcttccaacaaagcctccacgcgcacatccaaaaacaaaagaataccaaaagaaggagcattttctaactcctcaaacatcatattacattcctgcaccattcccagataattttcagctttccagccttgaattattcgtgtcagttcttgtggtaaatccaaaccacacattacaaacaggtcccggagggcgccctccaccaccattcttaaacacaccctcataatgacaaaatatcttgctcctgtgtcacctgtagcaaattaagaatggcatcatcaattgacatgcccttggctctaagttcttctctaagttctagttgtagatactctctcatattatcaccaaactgcttagccagaagccccccgggaacaatagcaggggacgctacagtgcagtacaagcgcagacctccccaattggctccagcaaaaacaagattagaataagcatactgggaaccaccagtaatatcatcaaagttgctggaaatataatcaggcagagtttcttgtaaaaattgaataaaagaaaaattttccaaagaaacattcaaaaccgttgggatgcaaatacaataggttaccgcgctgcgctccaacattgttagttttgaattagtctgcaaaataaaagaaacaagcgtcatatcatagtagcctgtcgaacaggtggaaaaatcagtctttccatcacaagacaagccacagggtctccagctcgaccctcgtaaaacctgtcattgtgattaaacaacagcaccgaaagttcctcgcggtggccagcatgaataattcttgatgaagcatacaatccagacatgttagcatcagttaaagagaaaaaacagccaacatagcctctgggtataattatgcttaattttaagtatagcaaagccacccctcgcggatacaaagtaaaaggcacaggagaataaaaaatataattatttctctgctgctgttcaggcaacgttgctcccggtccctctaaatagacatacaaagcctcatcagccatggcttaccaggcaaagtacagcgggcgcacaaagcacaagctctaaagaagctctaaaaacactctccaacctctccacaatatatacacaagccctaaactgacgtaatgggagtaaagtgaaaaaaaaataccgccaagcccaacacacaccccgaaactgcgtcagcaggaaaaagtacagtttcacttccgcattcccaacaagcgtaacttcctctttctcatggtacgtcacatccgattaacttgcaacgtcattttcccacggtcgcgccgccccttttagccgttaaccccgcagccaatcaccacacagcgcgcacttttttaaattacctcatttacatgttggcaccattccatctataaggtatattatatagatag

SEQ ID NO: 209 - DNA, 35938 bp, Human adenovirus
  misc_feature 1..35938: note = Reference Ad5 Genome Sequence: GenBank accession no. AC_000008 (SEQ ID NO: 209); Human adenovirus 5
  source 1..35938: mol_type = genomic DNA
catcatcaataatataccttattttggattgaagccaatatgataatgagggggtggagtttgtgacgtggcgcggggcgtgggaacggggcgggtgacgtagtagtgtggcggaagtgtgatgttgcaagtgtggcggaacacatgtaagcgacggatgtggcaaaagtgacgtttttggtgtgcgccggtgtacacaggaagtgacaattttcgcgcggttttaggcggatgttgtagtaaatttgggcgtaaccgagtaagatttggccattttcgcgggaaaactgaataagaggaagtgaaatctgaataattttgtgttactcatagcgcgtaatatttgtctagggccgcggggactttgaccgtttacgtggagactcgcccaggtgtttttctcaggtgttttccgcgttccgggtcaaagttggcgttttattattatagtcagctgacgtgtagtgtatttatacccggtgagttcctcaagaggccactcttgagtgccagcgagtagagttttctcctccgagccgctccgacaccgggactgaaaatgagacatattatctgccacggaggtgttattaccgaagaaatggccgccagtcttttggaccagctgatcgaagaggtactggctgataatcttccacctcctagccattttgaaccacctacccttcacgaactgtatgatttagacgtgacggcccccgaagatcccaacgaggaggcggtttcgcagatttttcccgactctgtaatgttggcggtgcaggaagggattgacttactcacttttccgccggcgcccggttctccggagccgcctcacctttcccggcagcccgagcagccggagcagagagccttgggtccggtttctatgccaaaccttgtaccggaggtgatcgatcttacctgccacgaggctggctttccacccagtgacgacgaggatgaagagggtgaggagtttgtgttagattatgtggagcaccccgggcacggttgcaggtcttgtcattatcaccggaggaatacgggggacccagatattatgtgttcgctttgctatatgaggacctgtggcatgtttgtctacagtaagtgaaaattatgggcagtgggtgatagagtggtgggtttggtgtggtaattttttttttaatttttacagttttgtggtttaaagaattttgtattgtgatttttttaaaaggtcctgtgtctgaacctgagcctgagcccgagccagaaccggagcctgcaagacctacccgccgtcctaaaatggcgcctgctatcctgagacgcccgacatcacctgtgtctagagaatgcaatagtagtacggatagctgtgactccggtccttctaacacacctcctgagatacacccggtggtcccgctgtgccccattaaaccagttgccgtgagagttggtgggcgtcgccaggctgtggaatgtatcgaggacttgcttaacgagcctgggcaacctttggacttgagctgtaaacgccccaggccataaggtgtaaacctgtgattgcgtgtgtggttaacgcctttgtttgctgaatgagttgatgtaagtttaataaagggtgagataatgtttaacttgcatggcgtgttaaatggggcggggcttaaagggtatataatgcgccgtgggctaatcttggttacatctgacctcatggaggcttgggagtgtttggaagatttttctgctgtgcgtaacttgctggaacagagctctaacagtacctcttggttttggaggtttctgtggggctcatcccaggcaaagttagtctgcagaattaaggaggattacaagtgggaatttgaagagcttttgaaatcctgtggtgagctgtttgattctttgaatctgggtcaccaggcgcttttccaagagaaggtcatcaagactttggatttttccacaccggggcgcgctgcggctgctgttgcttttttgagttttataaaggataaatggagcgaagaaacccatctgagcggggggtacctgctggattttctggccatgcatctgtggagagcggttgtgagacacaagaatcgcctgctactgttgtcttccgtccgcccggcgataataccgacggaggagcagcagcagcagcaggaggaagccaggcggcggcggcaggagcagagcccatggaacccgagagccggcctggaccctcgggaatgaatgttgtacaggtggctgaactgtatccagaactgagacgcattttgacaattacagaggatgggcaggggctaaagggggtaaagagggagcggggggcttgtgaggctacagaggaggctaggaatctagcttttagcttaatgaccagacaccgtcctgagtgtattacttttcaacagatcaaggataattgcgctaatgagcttgatctgctggcgcagaagtattccatagagcagctgaccacttactggctgcagccaggggatgattttgaggaggctattagggtatatgcaaaggtggcacttaggccagattgcaagtacaagatcagcaaacttgtaaatatcaggaattgttgctacatttctgggaacggggccgaggtggagatagatacggaggatagggtggcctttagatgtagcatgataaatatgtggccgggggtgcttggcatggacggggtggttattatgaatgtaaggtttactggccccaattttagcggtacggttttcctggccaataccaaccttatcctacacggtgtaagcttctatgggtttaacaatacctgtgtggaagcctggaccgatgtaagggttcggggctgtgccttttactgctgctggaagggggtggtgtgtcgccccaaaagcagggcttcaattaagaaatgcctctttgaaaggtgtaccttgggtatcctgtctgagggtaactccagggtgcgccacaatgtggcctccgactgtggttgcttcatgctagtgaaaagcgtggctgtgattaagcataacatggtatgtggcaactgcgaggacagggcctctcagatgctgacctgctcggacggcaactgtcacctgctgaagaccattcacgtagccagccactctcgcaaggcctggccagtgtttgagcataacatactgacccgctgttccttgcatttgggtaacaggaggggggtgttcctaccttaccaatgcaatttgagtcacactaagatattgcttgagcccgagagcatgtccaaggtgaacctgaacggggtgtttgacatgaccatgaagatctggaaggtgctgaggtacgatgagacccgcaccaggtgcagaccctgcgagtgtggcggtaaacatattaggaaccagcctgtgatgctggatgtgaccgaggagctgaggcccgatcacttggtgctggcctgcacccgcgctgagtttggctctagcgatgaagatacagattgaggtactgaaatgtgtgggcgtggcttaagggtgggaaagaatatataaggtgggggtcttatgtagttttgtatctgttttgcagcagccgccgccgccatgagcaccaactcgtttgatggaagcattgtgagctcatatttgacaacgcgcatgcccccatgggccggggtgcgtcagaatgtgatgggctccagcattgatggtcgccccgtcctgcccgcaaactctactaccttgacctacgagaccgtgtctggaacgccgttggagactgcagcctccgccgccgcttcagccgctgcagccaccgcccgcgggattgtgactgactttgctttcctgagcccgcttgcaagcagtgcagcttcccgttcatccgcccgcgatgacaagttgacggctcttttggcacaattggattctttgacccgggaacttaatgtcgtttctcagcagctgttggatctgcgccagcaggtttctgccctgaaggcttcctcccctcccaatgcggtttaaaacataaataaaaaaccagactctgtttggatttggatcaagcaagtgtcttgctgtctttatttaggggttttgcgcgcgcggtaggcccgggaccagcggtctcggtcgttgagggtcctgtgtattttttccaggacgtggtaaaggtgactctggatgttcagatacatgggcataagcccgtctctggggtggaggtagcaccactgcagagcttcatgctgcggggtggtgttgtagatgatccagtcgtagcaggagcgctgggcgtggtgcctaaaaatgtctttcagtagcaagctgattgccaggggcaggcccttggtgtaagtgtttacaaagcggttaagctgggatgggtgcatacgtggggatatgagatgcatcttggactgtatttttaggttggctatgttcccagccatatccctccggggattcatgttgtgcagaaccaccagcacagtgtatccggtgcacttgggaaatttgtcatgtagcttagaaggaaatgcgtggaagaacttggagacgcccttgtgacctccaagattttccatgcattcgtccataatgatggcaatgggcccacgggcggcggcctgggcgaagatatttctgggatcactaacgtcatagttgtgttccaggatgagatcgtcataggccatttttacaaagcgcgggcggagggtgccagactgcggtataatggttccatccggcccaggggcgtagttaccctcacagatttgcatttcccacgctttgagttcagatggggggatcatgtctacctgcggggcgatgaagaaaacggtttccggggtaggggagatcagctgggaagaaagcaggttcctgagcagctgcgacttaccgcagccggtgggcccgtaaatcacacctattaccgggtgcaactggtagttaagagagctgcagctgccgtcatccctgagcaggggggccacttcgttaagcatgtccctgactcgcatgttttccctgaccaaatccgccagaaggcgctcgccgcccagcgatagcagttcttgcaaggaagcaaagtttttcaacggtttgagaccgtccgccgtaggcatgcttttgagcgtttgaccaagcagttccaggcggtcccacagctcggtcacctgctctacggcatctcgatccagcatatctcctcgtttcgcgggttggggcggctttcgctgtacggcagtagtcggtgctcgtccagacgggccagggtcatgtctttccacgggcgcagggtcctcgtcagcgtagtctgggtcacggtgaaggggtgcgctccgggctgcgcgctggccagggtgcgcttgaggctggtcctgctggtgctgaagcgctgccggtcttcgccctgcgcgtcggccaggtagcatttgaccatggtgtcatagtccagcccctccgcggcgtggcccttggcgcgcagcttgcccttggaggaggcgccgcacgaggggcagtgcagacttttgagggcgtagagcttgggcgcgagaaataccgattccggggagtaggcatccgcgccgcaggccccgcagacggtctcgcattccacgagccaggtgagctctggccgttcggggtcaaaaaccaggtttcccccatgctttttgatgcgtttcttacctctggtttccatgagccggtgtccacgctcggtgacgaaaaggctgtccgtgtccccgtatacagacttgagaggcctgtcctcgagcggtgttccgcggtcctcctcgtatagaaactcggaccactctgagacaaaggctcgcgtccaggccagcacgaaggaggctaagtgggaggggtagcggtcgttgtccactagggggtccactcgctccagggtgtgaagacacatgtcgccctcttcggcatcaaggaaggtgattggtttgtaggtgtaggccacgtgaccgggtgttcctgaaggggggctataaaagggggtgggggcgcgttcgtcctcactctcttccgcatcgctgtctgcgagggccagctgttggggtgagtactccctctgaaaagcgggcatgacttctgcgctaagattgtcagtttccaaaaacgaggaggatttgatattcacctggcccgcggtgatgcctttgagggtggccgcatccatctggtcagaaaagacaatctttttgttgtcaagcttggtggcaaacgacccgtagagggcgttggacagcaacttggcgatggagcgcagggtttggtttttgtcgcgatcggcgcgctccttggccgcgatgtttagctgcacgtattcgcgcgcaacgcaccgccattcgggaaagacggtggtgcgctcgtcgggcaccaggtgcacgcgccaaccgcggttgtgcagggtgacaaggtcaacgctggtggctacctctccgcgtaggcgctcgttggtccagcagaggcggccgcccttgcgcgagcagaatggcggtagggggtctagctgcgtctcgtccggggggtctgcgtccacggtaaagaccccgggcagcaggcgcgcgtcgaagtagtctatcttgcatccttgcaagtctagcgcctgctgccatgcgcgggcggcaagcgcgcgctcgtatgggttgagtgggggaccccatggcatggggtgggtgagcgcggaggcgtacatgccgcaaatgtcgtaaacgtagaggggctctctgagtattccaagatatgtagggtagcatcttccaccgcggatgctggcgcgcacgtaatcgtatagttcgtgcgagggagcgaggaggtcgggaccgaggttgctacgggcgggctgctctgctcggaagactatctgcctgaagatggcatgtgagttggatgatatggttggacgctggaagacgttgaagctggcgtctgtgagacctaccgcgtcacgcacgaaggaggcgtaggagtcgcgcagcttgttgaccagctcggcggtgacctgcacgtctagggcgcagtagtccagggtttccttgatgatgtcatacttatcctgtcccttttttttccacagctcgcggttgaggacaaactcttcgcggtctttccagtactcttggatcggaaacccgtcggcctccgaacggtaagagcctagcatgtagaactggttgacggcctggtaggcgcagcatcccttttctacgggtagcgcgtatgcctgcgcggccttccggagcgaggtgtgggtgagcgcaaaggtgtccctgaccatgactttgaggtactggtatttgaagtcagtgtcgtcgcatccgccctgctcccagagcaaaaagtccgtgcgctttttggaacgcggatttggcagggcgaaggtgacatcgttgaagagtatctttcccgcgcgaggcataaagttgcgtgtgatgcggaagggtcccggcacctcggaacggttgttaattacctgggcggcgagcacgatctcgtcaaagccgttgatgttgtggcccacaatgtaaagttccaagaagcgcgggatgcccttgatggaaggcaattttttaagttcctcgtaggtgagctcttcaggggagctgagcccgtgctctgaaagggcccagtctgcaagatgagggttggaagcgacgaatgagctccacaggtcacgggccattagcatttgcaggtggtcgcgaaaggtcctaaactggcgacctatggccattttttctggggtgatgcagtagaaggtaagcgggtcttgttcccagcggtcccatccaaggttcgcggctaggtctcgcgcggcagtcactagaggctcatctccgccgaacttcatgaccagcatgaagggcacgagctgcttcccaaaggcccccatccaagtataggtctctacatcgtaggtgacaaagagacgctcggtgcgaggatgcgagccgatcgggaagaactggatctcccgccaccaattggaggagtggctattgatgtggtgaaagtagaagtccctgcgacgggccgaacactcgtgctggcttttgtaaaaacgtgcgcagtactggcagcggtgcacgggctgtacatcctgcacgaggttgacctgacgaccgcgcacaaggaagcagagtgggaatttgagcccctcgcctggcgggtttggctggtggtcttctacttcggctgcttgtccttgaccgtctggctgctcgaggggagttacggtggatcggaccaccacgccgcgcgagcccaaagtccagatgtccgcgcgcggcggtcggagcttgatgacaacatcgcgcagatgggagctgtccatggtctggagctcccgcggcgtcaggtcaggcgggagctcctgcaggtttacctcgcatagacgggtcagggcgcgggctagatccaggtgatacctaatttccaggggctggttggtggcggcgtcgatggcttgcaagaggccgcatccccgcggcgcgactacggtaccgcgcggcgggcggtgggccgcgggggtgtccttggatgatgcatctaaaagcggtgacgcgggcgagcccccggaggtagggggggctccggacccgccgggagagggggcaggggcacgtcggcgccgcgcgcgggcaggagctggtgctgcgcgcgtaggttgctggcgaacgcgacgacgcggcggttgatctcctgaatctggcgcctctgcgtgaagacgacgggcccggtgagcttgagcctgaaagagagttcgacagaatcaatttcggtgtcgttgacggcggcctggcgcaaaatctcctgcacgtctcctgagttgtcttgataggcgatctcggccatgaactgctcgatctcttcctcctggagatctccgcgtccggctcgctccacggtggcggcgaggtcgttggaaatgcgggccatgagctgcgagaaggcgttgaggcctccctcgttccagacgcggctgtagaccacgcccccttcggcatcgcgggcgcgcatgaccacctgcgcgagattgagctccacgtgccgggcgaagacggcgtagtttcgcaggcgctgaaagaggtagttgagggtggtggcggtgtgttctgccacgaagaagtacataacccagcgtcgcaacgtggattcgttgatatcccccaaggcctcaaggcgctccatggcctcgtagaagtccacggcgaagttgaaaaactgggagttgcgcgccgacacggttaactcctcctccagaagacggatgagctcggcgacagtgtcgcgcacctcgcgctcaaaggctacaggggcctcttcttcttcttcaatctcctcttccataagggcctccccttcttcttcttctggcggcggtgggggaggggggacacggcggcgacgacggcgcaccgggaggcggtcgacaaagcgctcgatcatctccccgcggcgacggcgcatggtctcggtgacggcgcggccgttctcgcgggggcgcagttggaagacgccgcccgtcatgtcccggttatgggttggcggggggctgccatgcggcagggatacggcgctaacgatgcatctcaacaattgttgtgtaggtactccgccgccgagggacctgagcgagtccgcatcgaccggatcggaaaacctctcgagaaaggcgtctaaccagtcacagtcgcaaggtaggctgagcaccgtggcgggcggcagcgggcggcggtcggggttgtttctggcggaggtgctgctgatgatgtaattaaagtaggcggtcttgagacggcggatggtcgacagaagcaccatgtccttgggtccggcctgctgaatgcgcaggcggtcggccatgccccaggcttcgttttgacatcggcgcaggtctttgtagtagtcttgcatgagcctttctaccggcacttcttcttctccttcctcttgtcctgcatctcttgcatctatcgctgcggcggcggcggagtttggccgtaggtggcgccctcttcctcccatgcgtgtgaccccgaagcccctcatcggctgaagcagggctaggtcggcgacaacgcgctcggctaatatggcctgctgcacctgcgtgagggtagactggaagtcatccatgtccacaaagcggtggtatgcgcccgtgttgatggtgtaagtgcagttggccataacggaccagttaacggtctggtgacccggctgcgagagctcggtgtacctgagacgcgagtaagccctcgagtcaaatacgtagtcgttgcaagtccgcaccaggtactggtatcccaccaaaaagtgcggcggcggctggcggtagaggggccagcgtagggtggccggggctccgggggcgagatcttccaacataaggcgatgatatccgtagatgtacctggacatccaggtgatgccggcggcggtggtggaggcgcgcggaaagtcgcggacgcggttccagatgttgcgcagcggcaaaaagtgctccatggtcgggacgctctggccggtcaggcgcgcgcaatcgttgacgctctagaccgtgcaaaaggagagcctgtaagcgggcactcttccgtggtctggtggataaattcgcaagggtatcatggcggacgaccggggttcgagccccgtatccggccgtccgccgtgatccatgcggttaccgcccgcgtgtcgaacccaggtgtgcgacgtcagacaacgggggagtgctccttttggcttccttccaggcgcggcggctgctgcgctagcttttttggccactggccgcgcgcagcgtaagcggttaggctggaaagcgaaagcattaagtggctcgctccctgtagccggagggttattttccaagggttgagtcgcgggacccccggttcgagtctcggaccggccggactgcggcgaacgggggtttgcctccccgtcatgcaagaccccgcttgcaaattcctccggaaacagggacgagccccttttttgcttttcccagatgcatccggtgctgcggcagatgcgcccccctcctcagcagcggcaagagcaagagcagcggcagacatgcagggcaccctcccctcctcctaccgcgtcaggaggggcgacatccgcggttgacgcggcagcagatggtgattacgaacccccgcggcgccgggcccggcactacctggacttggaggagggcgagggcctggcgcggctaggagcgccctctcctgagcggtacccaagggtgcagctgaagcgtgatacgcgtgaggcgtacgtgccgcggcagaacctgtttcgcgaccgcgagggagaggagcccgaggagatgcgggatcgaaagttccacgcagggcgcgagctgcggcatggcctgaatcgcgagcggttgctgcgcgaggaggactttgagcccgacgcgcgaaccgggattagtcccgcgcgcgcacacgtggcggccgccgacctggtaaccgcatacgagcagacggtgaaccaggagattaactttcaaaaaagctttaacaaccacgtgcgtacgcttgtggcgcgcgaggaggtggctataggactgatgcatctgtgggactttgtaagcgcgctggagcaaaacccaaatagcaagccgctcatggcgcagctgttccttatagtgcagcacagcagggacaacgaggcattcagggatgcgctgctaaacatagtagagcccgagggccgctggctgctcgatttgataaacatcctgcagagcatagtggtgcaggagcgcagcttgagcctggctgacaaggtggccgccatcaactattccatgcttagcctgggcaagttttacgcccgcaagatataccataccccttacgttcccatagacaaggaggtaaagatcgaggggttctacatgcgcatggcgctgaaggtgcttaccttgagcgacgacctgggcgtttatcgcaacgagcgcatccacaaggccgtgagcgtgagccggcggcgcgagctcagcgaccgcgagctgatgcacagcctgcaaagggccctggctggcacgggcagcggcgatagagaggccgagtcctactttgacgcgggcgctgacctgcgctgggccccaagccgacgcgccctggaggcagctggggccggacctgggctggcggtggcacccgcgcgcgctggcaacgtcggcggcgtggaggaatatgacgaggacgatgagtacgagccagaggacggcgagtactaagcggtgatgtttctgatcagatgatgcaagacgcaacggacccggcggtgcgggcggcgctgcagagccagccgtccggccttaactccacggacgactggcgccaggtcatggaccgcatcatgtcgctgactgcgcgcaatcctgacgcgttccggcagcagccgcaggccaaccggctctccgcaattctggaagcggtggtcccggcgcgcgcaaaccccacgcacgagaaggtgctggcgatcgtaaacgcgctggccgaaaacagggccatccggcccgacgaggccggcctggtctacgacgcgctgcttcagcgcgtggctcgttacaacagcggcaacgtgcagaccaacctggaccggctggtgggggatgtgcgcgaggccgtggcgcagcgtgagcgcgcgcagcagcagggcaacctgggctccatggttgcactaaacgccttcctgagtacacagcccgccaacgtgccgcggggacaggaggactacaccaactttgtgagcgcactgcggctaatggtgactgagacaccgcaaagtgaggtgtaccagtctgggccagactattttttccagaccagtagacaaggcctgcagaccgtaaacctgagccaggctttcaaaaacttgcaggggctgtggggggtgcgggctcccacaggcgaccgcgcgaccgtgtctagcttgctgacgcccaactcgcgcctgttgctgctgctaatagcgcccttcacggacagtggcagcgtgtcccgggacacatacctaggtcacttgctgacactgtaccgcgaggccataggtcaggcgcatgtggacgagcatactttccaggagattacaagtgtcagccgcgcgctggggcaggaggacacgggcagcctggaggcaaccctaaactacctgctgaccaaccggcggcagaagatcccctcgttgcacagtttaaacagcgaggaggagcgcattttgcgctacgtgcagcagagcgtgagccttaacctgatgcgcgacggggtaacgcccagcgtggcgctggacatgaccgcgcgcaacatggaaccgggcatgtatgcctcaaaccggccgtttatcaaccgcctaatggactacttgcatcgcgcggccgccgtgaaccccgagtatttcaccaatgccatcttgaacccgcactggctaccgccccctggtttctacaccgggggattcgaggtgcccgagggtaacgatggattcctctgggacgacatagacgacagcgtgttttccccgcaaccgcagaccctgctagagttgcaacagcgcgagcaggcagaggcggcgctgcgaaaggaaagcttccgcaggccaagcagcttgtccgatctaggcgctgcggccccgcggtcagatgctagtagcccatttccaagcttgatagggtctcttaccagcactcgcaccacccgcccgcgcctgctgggcgaggaggagtacctaaacaactcgctgctgcagccgcagcgcgaaaaaaacctgcctccggcatttcccaacaacgggatagagagcctagtggacaagatgagtagatggaagacgtacgcgcaggagcacagggacgtgccaggcccgcgcccgcccacccgtcgtcaaaggcacgaccgtcagcggggtctggtgtgggaggacgatgactcggcagacgacagcagcgtcctggatttgggagggagtggcaacccgtttgcgcaccttcgccccaggctggggagaatgttttaaaaaaaaaaaagcatgatgcaaaataaaaaactcaccaaggccatggcaccgagcgttggttttcttgtattccccttagtatgcggcgcgcggcgatgtatgaggaaggtcctcctccctcctacgagagtgtggtgagcgcggcgccagtggcggcggcgctgggttctcccttcgatgctcccctggacccgccgtttgtgcctccgcggtacctgcggcctaccggggggagaaacagcatccgttactctgagttggcacccctattcgacaccacccgtgtgtacctggtggacaacaagtcaacggatgtggcatccctgaactaccagaacgaccacagcaactttctgaccacggtcattcaaaacaatgactacagcccgggggaggcaagcacacagaccatcaatcttgacgaccggtcgcactggggcggcgacctgaaaaccatcctgcataccaacatgccaaatgtgaacgagttcatgtttaccaataagtttaaggcgcgggtgatggtgtcgcgcttgcctactaaggacaatcaggtggagctgaaatacgagtgggtggagttcacgctgcccgagggcaactactccgagaccatgaccatagaccttatgaacaacgcgatcgtggagcactacttgaaagtgggcagacagaacggggttctggaaagcgacatcggggtaaagtttgacacccgcaacttcagactggggtttgaccccgtcactggtcttgtcatgcctggggtatatacaaacgaagccttccatccagacatcattttgctgccaggatgcggggtggacttcacccacagccgcctgagcaacttgttgggcatccgcaagcggcaacccttccaggagggctttaggatcacctacgatgatctggagggtggtaacattcccgcactgttggatgtggacgcctaccaggcgagcttgaaagatgacaccgaacagggcgggggtggcgcaggcggcagcaacagcagtggcagcggcgcggaagagaactccaacgcggcagccgcggcaatgcagccggtggaggacatgaacgatcatgccattcgcggcgacacctttgccacacgggctgaggagaagcgcgctgaggccgaagcagcggccgaagctgccgcccccgctgcgcaacccgaggtcgagaagcctcagaagaaaccggtgatcaaacccctgacagaggacagcaagaaacgcagttacaacctaataagcaatgacagcaccttcacccagtaccgcagctggtaccttgcatacaactacggcgaccctcagaccggaatccgctcatggaccctgctttgcactcctgacgtaacctgcggctcggagcaggtctactggtcgttgccagacatgatgcaagaccccgtgaccttccgctccacgcgccagatcagcaactttccggtggtgggcgccgagctgttgcccgtgcactccaagagcttctacaacgaccaggccgtctactcccaactcatccgccagtttacctctctgacccacgtgttcaatcgctttcccgagaaccagattttggcgcgcccgccagcccccaccatcaccaccgtcagtgaaaacgttcctgctctcacagatcacgggacgctaccgctgcgcaacagcatcggaggagtccagcgagtgaccattactgacgccagacgccgcacctgcccctacgtttacaaggccctgggcatagtctcgccgcgcgtcctatcgagccgcactttttgagcaagcatgtccatccttatatcgcccagcaataacacaggctggggcctgcgcttcccaagcaagatgtttggcggggccaagaagcgctccgaccaacacccagtgcgcgtgcgcgggcactaccgcgcgccctggggcgcgcacaaacgcggccgcactgggcgcaccaccgtcgatgacgccatcgacgcggtggtggaggaggcgcgcaactacacgcccacgccgccaccagtgtccacagtggacgcggccattcagaccgtggtgcgcggagcccggcgctatgctaaaatgaagagacggcggaggcgcgtagcacgtcgccaccgccgccgacccggcactgccgcccaacgcgcggcggcggccctgcttaaccgcgcacgtcgcaccggccgacgggcggccatgcgggccgctcgaaggctggccgcgggtattgtcactgtgccccccaggtccaggcgacgagcggccgccgcagcagccgcggccattagtgctatgactcagggtcgcaggggcaacgtgtattgggtgcgcgactcggttagcggcctgcgcgtgcccgtgcgcacccgccccccgcgcaactagattgcaagaaaaaactacttagactcgtactgttgtatgtatccagcggcggcggcgcgcaacgaagctatgtccaagcgcaaaatcaaagaagagatgctccaggtcatcgcgccggagatctatggccccccgaagaaggaagagcaggattacaagccccgaaagctaaagcgggtcaaaaagaaaaagaaagatgatgatgatgaacttgacgacgaggtggaactgctgcacgctaccgcgcccaggcgacgggtacagtggaaaggtcgacgcgtaaaacgtgttttgcgacccggcaccaccgtagtctttacgcccggtgagcgctccacccgcacctacaagcgcgtgtatgatgaggtgtacggcgacgaggacctgcttgagcaggccaacgagcgcctcggggagtttgcctacggaaagcggcataaggacatgctggcgttgccgctggacgagggcaacccaacacctagcctaaagcccgtaacactgcagcaggtgctgcccgcgcttgcaccgtccgaagaaaagcgcggcctaaagcgcgagtctggtgacttggcacccaccgtgcagctgatggtacccaagcgccagcgactggaagatgtcttggaaaaaatgaccgtggaacctgggctggagcccgaggtccgcgtgcggccaatcaagcaggtggcgccgggactgggcgtgcagaccgtggacgttcagatacccactaccagtagcaccagtattgccaccgccacagagggcatggagacacaaacgtccccggttgcctcagcggtggcggatgccgcggtgcaggcggtcgctgcggccgcgtccaagacctctacggaggtgcaaacggacccgtggatgtttcgcgtttcagccccccggcgcccgcgcggttcgaggaagtacggcgccgccagcgcgctactgcccgaatatgccctacatccttccattgcgcctacccccggctatcgtggctacacctaccgccccagaagacgagcaactacccgacgccgaaccaccactggaacccgccgccgccgtcgccgtcgccagcccgtgctggccccgatttccgtgcgcagggtggctcgcgaaggaggcaggaccctggtgctgccaacagcgcgctaccaccccagcatcgtttaaaagccggtctttgtggttcttgcagatatggccctcacctgccgcctccgtttcccggtgccgggattccgaggaagaatgcaccgtaggaggggcatggccggccacggcctgacgggcggcatgcgtcgtgcgcaccaccggcggcggcgcgcgtcgcaccgtcgcatgcgcggcggtatcctgcccctccttattccactgatcgccgcggcgattggcgccgtgcccggaattgcatccgtggccttgcaggcgcagagacactgattaaaaacaagttgcatgtggaaaaatcaaaataaaaagtctggactctcacgctcgcttggtcctgtaactattttgtagaatggaagacatcaactttgcgtctctggccccgcgacacggctcgcgcccgttcatgggaaactggcaagatatcggcaccagcaatatgagcggtggcgccttcagctggggctcgctgtggagcggcattaaaaatttcggttccaccgttaagaactatggcagcaaggcctggaacagcagcacaggccagatgctgagggataagttgaaagagcaaaatttccaacaaaaggtggtagatggcctggcctctggcattagcggggtggtggacctggccaaccaggcagtgcaaaataagattaacagtaagcttgatccccgccctcccgtagaggagcctccaccggccgtggagacagtgtctccagaggggcgtggcgaaaagcgtccgcgccccgacagggaagaaactctggtgacgcaaatagacgagcctccctcgtacgaggaggcactaaagcaaggcctgcccaccacccgtcccatcgcgcccatggctaccggagtgctgggccagcacacacccgtaacgctggacctgcctccccccgccgacacccagcagaaacctgtgctgccaggcccgaccgccgttgttgtaacccgtcctagccgcgcgtccctgcgccgcgccgccagcggtccgcgatcgttgcggcccgtagccagtggcaactggcaaagcacactgaacagcatcgtgggtctgggggtgcaatccctgaagcgccgacgatgcttctgaatagctaacgtgtcgtatgtgtgtcatgtatgcgtccatgtcgccgccagaggagctgctgagccgccgcgcgcccgctttccaagatggctaccccttcgatgatgccgcagtggtcttacatgcacatctcgggccaggacgcctcggagtacctgagccccgggctggtgcagtttgcccgcgccaccgagacgtacttcagcctgaataacaagtttagaaaccccacggtggcgcctacgcacgacgtgaccacagaccggtcccagcgtttgacgctgcggttcatccctgtggaccgtgaggatactgcgtactcgtacaaggcgcggttcaccctagctgtgggtgataaccgtgtgctggacatggcttccacgtactttgacatccgcggcgtgctggacaggggccctacttttaagccctactctggcactgcctacaacgccctggctcccaagggtgccccaaatccttgcgaatgggatgaagctgctactgctcttgaaataaacctagaagaagaggacgatgacaacgaagacgaagtagacgagcaagctgagcagcaaaaaactcacgtatttgggcaggcgccttattctggtataaatattacaaaggagggtattcaaataggtgtcgaaggtcaaacacctaaatatgccgataaaacatttcaacctgaacctcaaataggagaatctcagtggtacgaaactgaaattaatcatgcagctgggagagtccttaaaaagactaccccaatgaaaccatgttacggttcatatgcaaaacccacaaatgaaaatggagggcaaggcattcttgtaaagcaacaaaatggaaagctagaaagtcaagtggaaatgcaatttttctcaactactgaggcgaccgcaggcaatggtgataacttgactcctaaagtggtattgtacagtgaagatgtagatatagaaaccccagacactcatatttcttacatgcccactattaaggaaggtaactcacgagaactaatgggccaacaatctatgcccaacaggcctaattacattgcttttagggacaattttattggtctaatgtattacaacagcacgggtaatatgggtgttctggcgggccaagcatcgcagttgaatgctgttgtagatttgcaagacagaaacacagagctttcataccagcttttgcttgattccattggtgatagaaccaggtacttttctatgtggaatcaggctgttgacagctatgatccagatgttagaattattgaaaatcatggaactgaagatgaacttccaaattactgctttccactgggaggtgtgattaatacagagactcttaccaaggtaaaacctaaaacaggtcaggaaaatggatgggaaaaagatgctacagaattttcagataaaaatgaaataagagttggaaataattttgccatggaaatcaatctaaatgccaacctgtggagaaatttcctgtactccaacatagcgctgtatttgcccgacaagctaaagtacagtccttccaacgtaaaaatttctgataacccaaacacctacgactacatgaacaagcgagtggtggctcccgggttagtggactgctacattaaccttggagcacgctggtcccttgactatatggacaacgtcaacccatttaaccaccaccgcaatgctggcctgcgctaccgctcaatgttgctgggcaatggtcgctatgtgcccttccacatccaggtgcctcagaagttctttgccattaaaaacctccttctcctgccgggctcatacacctacgagtggaacttcaggaaggatgttaacatggttctgcagagctccctaggaaatgacctaagggttgacggagccagcattaagtttgatagcatttgcctttacgccaccttcttccccatggcccacaacaccgcctccacgcttgaggccatgcttagaaacgacaccaacgaccagtcctttaacgactatctctccgccgccaacatgctctaccctatacccgccaacgctaccaacgtgcccatatccatcccctcccgcaactgggcggctttccgcggctgggccttcacgcgccttaagactaaggaaaccccatcactgggctcgggctacgacccttattacacctactctggctctataccctacctagatggaaccttttacctcaaccacacctttaagaaggtggccattacctttgactcttctgtcagctggcctggcaatgaccgcctgcttacccccaacgagtttgaaattaagcgctcagttgacggggagggttacaacgttgcccagtgtaacatgaccaaagactggttcctggtacaaatgctagctaactacaacattggctaccagggcttctatatcccagagagctacaaggaccgcatgtactccttctttagaaacttccagcccatgagccgtcaggtggtggatgatactaaatacaaggactaccaacaggtgggcatcctacaccaacacaacaactctggatttgttggctaccttgcccccaccatgcgcgaaggacaggcctaccctgctaacttcccctatccgcttataggcaagaccgcagttgacagcattacccagaaaaagtttctttgcgatcgcaccctttggcgcatcccattctccagtaactttatgtccatgggcgcactcacagacctgggccaaaaccttctctacgccaactccgcccacgcgctagacatgacttttgaggtggatcccatggacgagcccacccttctttatgttttgtttgaagtctttgacgtggtccgtgtgcaccggccgcaccgcggcgtcatcgaaaccgtgtacctgcgcacgcccttctcggccggcaacgccacaacataaagaagcaagcaacatcaacaacagctgccgccatgggctccagtgagcaggaactgaaagccattgtcaaagatcttggttgtgggccatattttttgggcacctatgacaagcgctttccaggctttgtttctccacacaagctcgcctgcgccatagtcaatacggccggtcgcgagactgggggcgtacactggatggcctttgcctggaacccgcactcaaaaacatgctacctctttgagccctttggcttttctgaccagcgactcaagcaggtttaccagtttgagtacgagtcactcctgcgccgtagcgccattgcttcttcccccgaccgctgtataacgctggaaaagtccacccaaagcgtacaggggcccaactcggccgcctgtggactattctgctgcatgtttctccacgcctttgccaactggccccaaactcccatggatcacaaccccaccatgaaccttattaccggggtacccaactccatgctcaacagtccccaggtacagcccaccctgcgtcgcaaccaggaacagctctacagcttcctggagcgccactcgccctacttccgcagccacagtgcgcagattaggagcgccacttctttttgtcacttgaaaaacatgtaaaaataatgtactagagacactttcaataaaggcaaatgcttttatttgtacactctcgggtgattatttacccccacccttgccgtctgcgccgtttaaaaatcaaaggggttctgccgcgcatcgctatgcgccactggcagggacacgttgcgatactggtgtttagtgctccacttaaactcaggcacaaccatccgcggcagctcggtgaagttttcactccacaggctgcgcaccatcaccaacgcgtttagcaggtcgggcgccgatatcttgaagtcgcagttggggcctccgccctgcgcgcgcgagttgcgatacacagggttgcagcactggaacactatcagcgccgggtggtgcacgctggccagcacgctcttgtcggagatcagatccgcgtccaggtcctccgcgttgctcagggcgaacggagtcaactttggtagctgccttcccaaaaagggcgcgtgcccaggctttgagttgcactcgcaccgtagtggcatcaaaaggtgaccgtgcccggtctgggcgttaggatacagcgcctgcataaaagccttgatctgcttaaaagccacctgagcctttgcgccttcagagaagaacatgccgcaagacttgccggaaaactgattggccggacaggccgcgtcgtgcacgcagcaccttgcgtcggtgttggagatctgcaccacatttcggccccaccggttcttcacgatcttggccttgctagactgctccttcagcgcgcgctgcccgttttcgctcgtcacatccatttcaatcacgtgctccttatttatcataatgcttccgtgtagacacttaagctcgccttcgatctcagcgcagcggtgcagccacaacgcgcagcccgtgggctcgtgatgcttgtaggtcacctctgcaaacgactgcaggtacgcctgcaggaatcgccccatcatcgtcacaaaggtcttgttgctggtgaaggtcagctgcaacccgcggtgctcctcgttcagccaggtcttgcatacggccgccagagcttccacttggtcaggcagtagtttgaagttcgcctttagatcgttatccacgtggtacttgtccatcagcgcgcgcgcagcctccatgcccttctcccacgcagacacgatcggcacactcagcgggttcatcaccgtaatttcactttccgcttcgctgggctcttcctcttcctcttgcgtccgcataccacgcgccactgggtcgtcttcattcagccgccgcactgtgcgcttacctcctttgccatgcttgattagcaccggtgggttgctgaaacccaccatttgtagcgccacatcttctctttcttcctcgctgtccacgattacctctggtgatggcgggcgctcgggcttgggagaagggcgcttctttttcttcttgggcgcaatggccaaatccgccgccgaggtcgatggccgcgggctgggtgtgcgcggcaccagcgcgtcttgtgatgagtcttcctcgtcctcggactcgatacgccgcctcatccgcttttttgggggcgcccggggaggcggcggcgacggggacggggacgacacgtcctccatggttgggggacgtcgcgccgcaccgcgtccgcgctcgggggtggtttcgcgctgctcctcttcccgactggccatttccttctcctataggcagaaaaagatcatggagtcagtcgagaagaaggacagcctaaccgccccctctgagttcgccaccaccgcctccaccgatgccgccaacgcgcctaccaccttccccgtcgaggcacccccgcttgaggaggaggaagtgattatcgagcaggacccaggttttgtaagcgaagacgacgaggaccgctcagtaccaacagaggataaaaagcaagaccaggacaacgcagaggcaaacgaggaacaagtcgggcggggggacgaaaggcatggcgactacctagatgtgggagacgacgtgctgttgaagcatctgcagcgccagtgcgccattatctgcgacgcgttgcaagagcgcagcgatgtgcccctcgccatagcggatgtcagccttgcctacgaacgccacctattctcaccgcgcgtaccccccaaacgccaagaaaacggcacatgcgagcccaacccgcgcctcaacttctaccccgtatttgccgtgccagaggtgcttgccacctatcacatctttttccaaaactgcaagatacccctatcctgccgtgccaaccgcagccgagcggacaagcagctggccttgcggcagggcgctgtcatacctgatatcgcctcgctcaacgaagtgccaaaaatctttgagggtcttggacgcgacgagaagcgcgcggcaaacgctctgcaacaggaaaacagcgaaaatgaaagtcactctggagtgttggtggaactcgagggtgacaacgcgcgcctagccgtactaaaacgcagcatcgaggtcacccactttgcctacccggcacttaacctaccccccaaggtcatgagcacagtcatgagtgagctgatcgtgcgccgtgcgcagcccctggagagggatgcaaatttgcaagaacaaacagaggagggcctacccgcagttggcgacgagcagctagcgcgctggcttcaaacgcgcgagcctgccgacttggaggagcgacgcaaactaatgatggccgcagtgctcgttaccgtggagcttgagtgcatgcagcggttctttgctgacccggagatgcagcgcaagctagaggaaacattgcactacacctttcgacagggctacgtacgccaggcctgcaagatctccaacgtggagctctgcaacctggtctcctaccttggaattttgcacgaaaaccgccttgggcaaaacgtgcttcattccacgctcaagggcgaggcgcgccgcgactacgtccgcgactgcgtttacttatttctatgctacacctggcagacggccatgggcgtttggcagcagtgcttggaggagtgcaacctcaaggagctgcagaaactgctaaagcaaaacttgaaggacctatggacggccttcaacgagcgctccgtggccgcgcacctggcggacatcattttccccgaacgcctgcttaaaaccctgcaacagggtctgccagacttcaccagtcaaagcatgttgcagaactttaggaactttatcctagagcgctcaggaatcttgcccgccacctgctgtgcacttcctagcgactttgtgcccattaagtaccgcgaatgccctccgccgctttggggccactgctaccttctgcagctagccaactaccttgcctaccactctgacataatggaagacgtgagcggtgacggtctactggagtgtcactgtcgctgcaacctatgcaccccgcaccgctccctggtttgcaattcgcagctgcttaacgaaagtcaaattatcggtacctttgagctgcagggtccctcgcctgacgaaaagtccgcggctccggggttgaaactcactccggggctgtggacgtcggcttaccttcgcaaatttgtacctgaggactaccacgcccacgagattaggttctacgaagaccaatcccgcccgccaaatgcggagcttaccgcctgcgtcattacccagggccacattcttggccaattgcaagccatcaacaaagcccgccaagagtttctgctacgaaagggacggggggtttacttggacccccagtccggcgaggagctcaacccaatccccccgccgccgcagccctatcagcagcagccgcgggcccttgcttcccaggatggcacccaaaaagaagctgcagctgccgccgccacccacggacgaggaggaatactgggacagtcaggcagaggaggttttggacgaggaggaggaggacatgatggaagactgggagagcctagacgaggaagcttccgaggtcgaagaggtgtcagacgaaacaccgtcaccctcggtcgcattcccctcgccggcgccccagaaatcggcaaccggttccagcatggctacaacctccgctcctcaggcgccgccggcactgcccgttcgccgacccaaccgtagatgggacaccactggaaccagggccggtaagtccaagcagccgccgccgttagcccaagagcaacaacagcgccaaggctaccgctcatggcgcgggcacaagaacgccatagttgcttgcttgcaagactgtgggggcaacatctccttcgcccgccgctttcttctctaccatcacggcgtggccttcccccgtaacatcctgcattactaccgtcatctctacagcccatactgcaccggcggcagcggcagcggcagcaacagcagcggccacacagaagcaaaggcgaccggatagcaagactctgacaaagcccaagaaatccacagcggcggcagcagcaggaggaggagcgctgcgtctggcgcccaacgaacccgtatcgacccgcgagcttagaaacaggatttttcccactctgtatgctatatttcaacagagcaggggccaagaacaagagctgaaaataaaaaacaggtctctgcgatccctcacccgcagctgcctgtatcacaaaagcgaagatcagcttcggcgcacgctggaagacgcggaggctctcttcagtaaatactgcgcgctgactcttaaggactagtttcgcgccctttctcaaatttaagcgcgaaaactacgtcatctccagcggccacacccggcgccagcacctgtcgtcagcgccattatgagcaaggaaattcccacgccctacatgtggagttaccagccacaaatgggacttgcggctggagctgcccaagactactcaacccgaataaactacatgagcgcgggaccccacatgatatcccgggtcaacggaatccgcgcccaccgaaaccgaattctcttggaacaggcggctattaccaccacacctcgtaataaccttaatccccgtagttggcccgctgccctggtgtaccaggaaagtcccgctcccaccactgtggtacttcccagagacgcccaggccgaagttcagatgactaactcaggggcgcagcttgcgggcggctttcgtcacagggtgcggtcgcccgggcagggtataactcacctgacaatcagagggcgaggtattcagctcaacgacgagtcggtgagctcctcgcttggtctccgtccggacgggacatttcagatcggcggcgccggccgtccttcattcacgcctcgtcaggcaatcctaactctgcagacctcgtcctctgagccgcgctctggaggcattggaactctgcaatttattgaggagtttgtgccatcggtctactttaaccccttctcgggacctcccggccactatccggatcaatttattcctaactttgacgcggtaaaggactcggcggacggctacgactgaatgttaagtggagaggcagagcaactgcgcctgaaacacctggtccactgtcgccgccacaagtgctttgcccgcgactccggtgagttttgctactttgaattgcccgaggatcatatcgagggcccggcgcacggcgtccggcttaccgcccagggagagcttgcccgtagcctgattcgggagtttacccagcgccccctgctagttgagcgggacaggggaccctgtgttctcactgtgatttgcaactgtcctaaccttggattacatcaagatctttgttgccatctctgtgctgagtataataaatacagaaattaaaatatactggggctcctatcgccatcctgtaaacgccaccgtcttcacccgcccaagcaaaccaaggcgaaccttacctggtacttttaacatctctccctctgtgatttacaacagtttcaacccagacggagtgagtctacgagagaacctctccgagctcagctactccatcagaaaaaacaccaccctccttacctgccgggaacgtacgagtgcgtcaccggccgctgcaccacacctaccgcctgaccgtaaaccagactttttccggacagacctcaataactctgtttaccagaacaggaggtgagcttagaaaacccttagggtattaggccaaaggcgcagctactgtggggtttatgaacaattcaagcaactctacgggctattctaattcaggtttctctagaatcggggttggggttattctctgtcttgtgattctctttattcttatactaacgcttctctgcctaaggctcgccgcctgctgtgtgcacatttgcatttattgtcagctttttaaacgctggggtcgccacccaagatgattaggtacataatcctaggtttactcacccttgcgtcagcccacggtaccacccaaaaggtggattttaaggagccagcctgtaatgttacattcgcagctgaagctaatgagtgcaccactcttataaaatgcaccacagaacatgaaaagctgcttattcgccacaaaaacaaaattggcaagtatgctgtttatgctatttggcagccaggtgacactacagagtataatgttacagttttccagggtaaaagtcataaaacttttatgtatacttttccattttatgaaatgtgcgacattaccatgtacatgagcaaacagtataagttgtggcccccacaaaattgtgtggaaaacactggcactttctgctgcactgctatgctaattacagtgctcgctttggtctgtaccctactctatattaaatacaaaagcagacgcagctttattgaggaaaagaaaatgccttaatttactaagttacaaagctaatgtcaccactaactgctttactcgctgcttgcaaaacaaattcaaaaagttagcattataattagaataggatttaaaccccccggtcatttcctgctcaataccattcccctgaacaattgactctatgtgggatatgctccagcgctacaaccttgaagtcaggcttcctggatgtcagcatctgactttggccagcacctgtcccgcggatttgttccagtccaactacagcgacccaccctaacagagatgaccaacacaaccaacgcggccgccgctaccggacttacatctaccacaaatacaccccaagtttctgcctttgtcaataactgggataacttgggcatgtggtggttctccatagcgcttatgtttgtatgccttattattatgtggctcatctgctgcctaaagcgcaaacgcgcccgaccacccatctatagtcccatcattgtgctacacccaaacaatgatggaatccatagattggacggactgaaacacatgttcttttctcttacagtatgattaaatgagacatgattcctcgagtttttatattactgacccttgttgcgcttttttgtgcgtgctccacattggctgcggtttctcacatcgaagtagactgcattccagccttcacagtctatttgctttacggatttgtcaccctcacgctcatctgcagcctcatcactgtggtcatcgcctttatccagtgcattgactgggtctgtgtgcgctttgcatatctcagacaccatccccagtacagggacaggactatagctgagcttcttagaattctttaattatgaaatttactgtgacttttctgctgattatttgcaccctatctgcgttttgttccccgacctccaagcctcaaagacatatatcatgcagattcactcgtatatggaatattccaagttgctacaatgaaaaaagcgatctttccgaagcctggttatatgcaatcatctctgttatggtgttctgcagtaccatcttagccctagctatatatccctaccttgacattggctggaaacgaatagatgccatgaaccacccaactttccccgcgcccgctatgcttccactgcaacaagttgttgccggcggctttgtcccagccaatcagcctcgccccacttctcccacccccactgaaatcagctactttaatctaacaggaggagatgactgacaccctagatctagaaatggacggaattattacagagcagcgcctgctagaaagacgcagggcagcggccgagcaacagcgcatgaatcaagagctccaagacatggttaacttgcaccagtgcaaaaggggtatcttttgtctggtaaagcaggccaaagtcacctacgacagtaataccaccggacaccgccttagctacaagttgccaaccaagcgtcagaaattggtggtcatggtgggagaaaagcccattaccataactcagcactcggtagaaaccgaaggctgcattcactcaccttgtcaaggacctgaggatctctgcacccttattaagaccctgtgcggtctcaaagatcttattccctttaactaataaaaaaaaataataaagcatcacttacttaaaatcagttagcaaatttctgtccagtttattcagcagcacctccttgccctcctcccagctctggtattgcagcttcctcctggctgcaaactttctccacaatctaaatggaatgtcagtttcctcctgttcctgtccatccgcacccactatcttcatgttgttgcagatgaagcgcgcaagaccgtctgaagataccttcaaccccgtgtatccatatgacacggaaaccggtcctccaactgtgccttttcttactcctccctttgtatcccccaatgggtttcaagagagtccccctggggtactctctttgcgcctatccgaacctctagttacctccaatggcatgcttgcgctcaaaatgggcaacggcctctctctggacgaggccggcaaccttacctcccaaaatgtaaccactgtgagcccacctctcaaaaaaaccaagtcaaacataaacctggaaatatctgcacccctcacagttacctcagaagccctaactgtggctgccgccgcacctctaatggtcgcgggcaacacactcaccatgcaatcacaggccccgctaaccgtgcacgactccaaacttagcattgccacccaaggacccctcacagtgtcagaaggaaagctagccctgcaaacatcaggccccctcaccaccaccgatagcagtacccttactatcactgcctcaccccctctaactactgccactggtagcttgggcattgacttgaaagagcccatttatacacaaaatggaaaactaggactaaagtacggggctcctttgcatgtaacagacgacctaaacactttgaccgtagcaactggtccaggtgtgactattaataatacttccttgcaaactaaagttactggagccttgggttttgattcacaaggcaatatgcaacttaatgtagcaggaggactaaggattgattctcaaaacagacgccttatacttgatgttagttatccgtttgatgctcaaaaccaactaaatctaagactaggacagggccctctttttataaactcagcccacaacttggatattaactacaacaaaggcctttacttgtttacagcttcaaacaattccaaaaagcttgaggttaacctaagcactgccaaggggttgatgtttgacgctacagccatagccattaatgcaggagatgggcttgaatttggttcacctaatgcaccaaacacaaatcccctcaaaacaaaaattggccatggcctagaatttgattcaaacaaggctatggttcctaaactaggaactggccttagttttgacagcacaggtgccattacagtaggaaacaaaaataatgataagctaactttgtggaccacaccagctccatctcctaactgtagactaaatgcagagaaagatgctaaactcactttggtcttaacaaaatgtggcagtcaaatacttgctacagtttcagttttggctgttaaaggcagtttggctccaatatctggaacagttcaaagtgctcatcttattataagatttgacgaaaatggagtgctactaaacaattccttcctggacccagaatattggaactttagaaatggagatcttactgaaggcacagcctatacaaacgctgttggatttatgcctaacctatcagcttatccaaaatctcacggtaaaactgccaaaagtaacattgtcagtcaagtttacttaaacggagacaaaactaaacctgtaacactaaccattacactaaacggtacacaggaaacaggagacacaactccaagtgcatactctatgtcattttcatgggactggtctggccacaactacattaatgaaatatttgccacatcctcttacactttttcatacattgcccaagaataaagaatcgtttgtgttatgtttcaacgtgtttatttttcaattgcagaaaatttcaagtcatttttcattcagtagtatagccccaccaccacatagcttatacagatcaccgtaccttaatcaaactcacagaaccctagtattcaacctgccacctccctcccaacacacagagtacacagtcctttctccccggctggccttaaaaagcatcatatcatgggtaacagacatattcttaggtgttatattccacacggtttcctgtcgagccaaacgctcatcagtgatattaataaactccccgggcagctcacttaagttcatgtcgctgtccagctgctgagccacaggctgctgtccaacttgcggttgcttaacgggcggcgaaggagaagtccacgcctacatgggggtagagtcataatcgtgcatcaggatagggcggtggtgctgcagcagcgcgcgaataaactgctgccgccgccgctccgtcctgcaggaatacaacatggcagtggtctcctcagcgatgattcgcaccgcccgcagcataaggcgccttgtcctccgggcacagcagcgcaccctgatctcacttaaatcagcacagtaactgcagcacagcaccacaatattgttcaaaatcccacagtgcaaggcgctgtatccaaagctcatggcggggaccacagaacccacgtggccatcataccacaagcgcaggtagattaagtggcgacccctcataaacacgctggacataaacattacctcttttggcatgttgtaattcaccacctcccggtaccatataaacctctgattaaacatggcgccatccaccaccatcctaaaccagctggccaaaacctgcccgccggctatacactgcagggaaccgggactggaacaatgacagtggagagcccaggactcgtaaccatggatcatcatgctcgtcatgatatcaatgttggcacaacacaggcacacgtgcatacacttcctcaggattacaagctcctcccgcgttagaaccatatcccagggaacaacccattcctgaatcagcgtaaatcccacactgcagggaagacctcgcacgtaactcacgttgtgcattgtcaaagtgttacattcgggcagcagcggatgatcctccagtatggtagcgcgggtttctgtctcaaaaggaggtagacgatccctactgtacggagtgcgccgagacaaccgagatcgtgttggtcgtagtgtcatgccaaatggaacgccggacgtagtcatatttcctgaagcaaaaccaggtgcgggcgtgacaaacagatctgcgtctccggtctcgccgcttagatcgctctgtgtagtagttgtagtatatccactctctcaaagcatccaggcgccccctggcttcgggttctatgtaaactccttcatgcgccgctgccctgataacatccaccaccgcagaataagccacacccagccaacctacacattcgttctgcgagtcacacacgggaggagcgggaagagctggaagaaccatgtttttttttttattccaaaagattatccaaaacctcaaaatgaagatctattaagtgaacgcgctcccctccggtggcgtggtcaaactctacagccaaagaacagataatggcatttgtaagatgttgcacaatggcttccaaaaggcaaacggccctcacgtccaagtggacgtaaaggctaaacccttcagggtgaatctcctctataaacattccagcaccttcaaccatgcccaaataattctcatctcgccaccttctcaatatatctctaagcaaatcccgaatattaagtccggccattgtaaaaatctgctccagagcgccctccaccttcagcctcaagcagcgaatcatgattgcaaaaattcaggttcctcacagacctgtataagattcaaaagcggaacattaacaaaaataccgcgatcccgtaggtcccttcgcagggccagctgaacataatcgtgcaggtctgcacggaccagcgcggccacttccccgccaggaaccatgacaaaagaacccacactgattatgacacgcatactcggagctatgctaaccagcgtagccccgatgtaagcttgttgcatgggcggcgatataaaatgcaaggtgctgctcaaaaaatcaggcaaagcctcgcgcaaaaaagaaagcacatcgtagtcatgctcatgcagataaaggcaggtaagctccggaaccaccacagaaaaagacaccatttttctctcaaacatgtctgcgggtttctgcataaacacaaaataaaataacaaaaaaacatttaaacattagaagcctgtcttacaacaggaaaaacaacccttataagcataagacggactacggccatgccggcgtgaccgtaaaaaaactggtcaccgtgattaaaaagcaccaccgacagctcctcggtcatgtccggagtcataatgtaagactcggtaaacacatcaggttgattcacatcggtcagtgctaaaaagcgaccgaaatagcccgggggaatacatacccgcaggcgtagagacaacattacagcccccataggaggtataacaaaattaataggagagaaaaacacataaacacctgaaaaaccctcctgcctaggcaaaatagcaccctcccgctccagaacaacatacagcgcttccacagcggcagccataacagtcagccttaccagtaaaaaagaaaacctattaaaaaaacaccactcgacacggcaccagctcaatcagtcacagtgtaaaaaagggccaagtgcagagcgagtatatataggactaaaaaatgacgtaacggttaaagtccacaaaaaacacccagaaaaccgcacgcgaacctacgcccagaaacgaaagccaaaaaacccacaacttcctcaaatcgtcacttccgttttcccacgttacgtaacttcccattttaagaaaactacaattcccaacacatacaagttactccgccctaaaacctacgtcacccgccccgttcccacgccccgcgccacgtcacaaactccaccccctcattatcatattggcttcaatccaaaataaggtatattattgatgatg

SEQ ID NO: 210 - DNA, 35514 bp, Human adenovirus
  misc_feature 1..35514: note = Reference Ad7 Genome Sequence: GenBank accession no. AC_000018 (SEQ ID NO: 210); Human adenovirus 7
  source 1..35514: mol_type = genomic DNA
ctctctatttaatataccttatagatggaatggtgccaatatgtaaatgaggtaatttaaaaaagtgcgcgctgtgtggtgattggctgtggggttaacggctaaaatgggcggggcggccgtgggaaaatgacgtgacttatgtgggaggagctatgttgcaagttattgcggtaaatgtgacgtaaaacgaggtgtggtttgaacacggaagtagacagttttcccacgcttactgacaggatatgaggtagttttgggcggatgcaagtaaaaattctccattttcgcgcgaaaactgaatgaggaagtgaatttctgagtcatttcgcggttatgacagggtggagtatttgccgagggccgagtagactttgaccgtttacgtggaggtttcgattaccgtgtttttcacctaaatttccgcgtacggtgtcaaagtcctgtgtttttacgtaggtgtcagctgatcgctagggtatttaaacctgacgagttccgtcaagaggccactcttgagtgccagcgagaagagttttctccttcgcgccgcaagtcagttctgcgctttgaaaatgagacacctgcgtttcctgccacaggagattatcttcagtgagaccgggatcgaaatactggagtttgtggtaaataccctaatgggagacgacccggaaccgccagtgcagcctttcgatccacctacgctgcacgatctgtatgatttagaggtagacgggcctcaggatcccaatgaggaagctgtgaatgggttttttactgattctatgctgctagctgccgatgaaggattggacataaaccctcctcctgagacccttgttaccccaggggtggttgtggaaagcggcagaggtgggaaaaaattgcctgatctgggagcagctgaaatggacttgcgttgttatgaagagggttttcctccgagtgatgatgaagatggggaaactgagcagtccatccataccgcagtgaatgagggagtaaaagctgccagcgatgtttttaagttggactgtccggagctgcctggacatggctgtaagtcttgtgaatttcacaggaataacactggaatgaaagaactattgtgctcgctttgctatatgagaatgcactgccactttatttacagtaagtgtatttaagtgaaatttaaaggaatagtgtagctgtttaataactgttgaatggtagatttatgttttttacttgtgattttttgtaggtcctgtgtctgatgatgagtcaccttctcctgattcaactacctcacctcctgaaattcaggcgcccgcacctgcaaacgtatgcaagcccattcctgtaaagcctaagcctgggaaacgccctgctgtggataagcttgaggacttgttggagggtggggatggacctttggaccttagtacccggaaactgccaaggcaataagtgccctgcagctgtgtttatttaatgtgacgtcatgtaataaaattatgtcagctgctgagtgttttattacttcttgggtggggacttggatatataagtaggagcagatctgtgtggttagctcacagcaacctgctgccatccatggaggtttgggctatcttggaagacctcagacagactaggctactgctagaaaacgcctcggacggagtctctggcctttggagattctggttcggtggtgatctagctaggctagtgtttaggataaaacaggactacagcgtagaatttgaaaagttattggacgacagtccaggactttttgaagctcttaacttgggtcatcaggctcattttaaggagaaggttttatcagttttagatttttctactcctggtagaactgctgctgctgtagcttttcttacttttatattggataaatggatccgccaaactcacttcagcaagggatacgttttggatttcatagcagcagctttgtggagaacatggaaggctcgcaggatgaggacaatcttagattactggccagtgcagcctctaggagtagcagggatactgagacacccaccgaccatgccagcggttctgcaggaggagcagcaggaggacaatccgagagccggcctggaccctccggtggaggagtagctgacctgtttcctgaactgcgacgggtgcttactaggtctacgaccagtggacagaacagaggcattaagagggagaggaatcctagtgggaataattcaagaaccgagttggctttaagtttaatgagccgcaggcgtcctgaaactgtttggtggcatgaggttcagagcgaaggcagggatgaagtttcaatattgcaggagaaatattcactagaacaacttaagacctgttggttggaacctgaggatgattgggaggtggccattaggaattatgctaagatatctctgaggcctgataaacaatatagaattactaagaagattaatattagaaatgcatgctacatatcagggaatggggcagaggttataatagatacacaagataaagcagcttttagatgttgtatgatgggtatgtggccaggggttgtcggcatggaagcagtaacacttatgaatattaggtttagaggggatgggtataatggcattgtatttatggctaacactaagctgattctacatggttgtagcttttttgggtttaataatacgtgtgtagaagcttgggggcaagttagtgtgaggggttgtagtttttatgcatgctggattgcaacatcaggtagggtcaagagtcagttgtctgtgaagaaatgcatgtttgagagatgtaatcttggcatactgaatgaaggtgaagcaaggatccgccactgcgcagctacagaaactggctgcttcattctaataaagggaaatgccagtgtgaagcataatatgatctgtggacattcggatgagaggccttatcagatgctgacctgcgctggtggacattgcaatattcttgctactgtgcatatcgtttcacatgcacgcaagaaatggcctgtatttgaacataatgtgattaccaagtgcaccatgcacataggtggtcgcaggggaatgtttatgccttaccagtgtaacatgaatcatgtgaaggtaatgttggaaccagatgccttttccagagtgagcttaacaggaatctttgatatgaatattcaactatggaagatcctgagatatgatgacactaaaccgagggtgcgcgcatgcgaatgcggaggcaagcatgctagattccagccggtgtgcgtggatgtgactgaagacctgagacccgatcatttggtgcttgcctgcactggagcggagttcggttccagtggtgaagaaactgactaaagtgagtagtgggggcaagatgtggatggggactttcaggttggtaaggtggacagattgggtaaattttgttaatttctgtcttgcagctgccatgagtggaagcgcttcttttgaggggggagtatttagcccttatctgacgggcaggctcccaccatgggcaggagttcgtcagaatgtcatgggatccactgtggatgggagacccgtccagcccgccaattcctcaacgctgacctatgccactttgagttcgtcaccattggatgcagctgcagccgccgccgctactgctgccgccaacactatccttggaatgggctattacggaagcatcgttgccaattccagttcctctaataacccttcaaccctggctgaggacaagctacttgttctgttggctcagctcgaggccttaacccaacgcttaggcgaactgtctaagcaggtggcccagttgcgtgagcaaactgagtctgctgttgctacagcaaagtctaaataaagatctcaaatcaataaataaagaaatacttgttataaaaacaaatgaatgtttatttgatttttcgcgcgcggtatgccctggaccatcggtctcgatcattgagaactcggtggatcttttccagtaccctgtaaaggtgggattgaatgtttagatacataggcattagtccgtctcgggggtggagatagctccattgaagagcctcttgctccggggtagtgttataaatcacccagtcatagcaaggtcggagtgcatggtgttgcacaatatcttttaggagcagactaattgcaacggggaggcccttagtgtaggtgtttacaaatctattgagctgggacgggtacatccggggtgaaattatatgcattttggactggatcttgaggttggcaatgttgccgcctagatcccgtctcgggttcatattgtgcaggaccactaagacagtgtatccggtgcacttgggaaatttatcatgcagcttagagggaaaagcatgaaaaaatttggagacgcctttgtgaccccccagattctccatgcactcatccataatgatagcgatggggccgtgggcagcggcacgggcgaacacgttccgggggtctgaaacatcatagttatgctcctgagtcaggtcatcataagccattttaataaactttgggcggagggtgccagattgggggatgaaagttccctctggcccgggagcatagttcccctcacatatttgcatttcccaggctttcagttcagagggggggatcatgtccacctgcggggctataaaaaataccgtttctggagccggggtgattaactgggatgagagcaaattcctaagcagctgagacttgccgcacccagtgggaccgtaaatgaccccaattacgggttgcagatggtagtttagggagcgacagctgccgtcctcccggagtaggggggccacttcgttcatcatttcccttacatggatattttcccgcaccaagtccgttaggaggcgctctcccccaagggatagaagctcctggagcgaggagaagtttttcagcggcttcagcccgtcagccatgggcattttggaaagagtctgttgcaagagctcgagccggtcccagagctcggtgatgtgctctatggcatctcgatccagcagacctcctcgtttcgcgggttgggacggctcctggagtagggaatcagacgatgggcgtccagcgctgccagggtccgatccttccatggtcgcagcgtccgagtcagggttgtttccgtcacggtgaatgggtgcgcgcctggttgggcgcttgcgagggtgcgcttcagactcatcctgctggtcgagaaccgctgccgatcggcgccctgcatgtcggccaggtagcagtttaccatgagttcgtagttgagcgcctcggccgcgtggcctttggcacggagcttacctttggaagttttatggcaggcggggcagtagatacatttgagggcatacagcttgggcgcgaggaaaatggattcgggggagtatgcatccgcaccgcaggaggcgcagacggtttcgcactccacgagccaggtcagatccggctcatcggggtcaaaaacaagttttccgccatgttttttgatgcgtttcttacctttggtttccatgaggtcgtgtccccgctgggtgacaaagaggctgtccgtgtccccgtagaccgactttatgggcctgtcctcgagcggagtgcctcggtcctcttcgtagaggaacccagcccactctgatacaaaagcgcgtgtccaggccagcacaaaggaggccacgtgggaggggtagcggtcgttgtcaaccagggggtccaccttctctacggtatgtaaacacatgtccccctcctccacatccaagaatgtgattggcttgtaagtgtaggccacgtgaccaggggtccccgccgggggggtataaaagggggcgggcctctgttcgtcctcactgtcttccggatcgctgtccaggagcgccagctgttggggtaggtattccctctcgaaggcgggcatgacctctgcactcaggttgtcagtttctaggaacgaggaggatttgatattgacagtaccagcagagatgcctttcataagactctcgtccatctggtcagaaaacacaatcttcttgttgtccagcttggtagcaaatgatccatagagggcattggatagaagcttggcgatggagcgcatggtttggttcttttccttgtccgcgcgctccttggcggcgatgttaagctggacgtactcgcgcgccacacatttccattcagggaagatggttgtcagttcatccggaactattctgactcgccatcccctattgtgcagggttatcagatccacactggtggccacctcgcctcggaggggctcattggtccagcagagtcgacctccttttcttgaacagaaaggggggagggggtctagcatgagctcatcaggggggtccgcatctatggtaaatattcccggtagcaaatctttgtcaaaatagctgatggtggtgggatcatccaaggtcatctgccattctcgaactgccagcgcgcgctcataggggttaagaggggtgccccagggcatggggtgggtgagcgcggaggcatacatgccacagatatcgtatacatagaggggctcttcgaggatgccgatgtaagtgggataacagcgcccccctctgatgcttgctcgcacatagtcatagagttcatgtgagggggcgagaagacccgggcccagattggtgcggttgggtttttccgccctgtaaacgatctggcgaaagatggcatgggaatttgaagagatagtaggtctctggaatatgttaaaatgggcatgaggtaggcctacagagtcccttatgaagtgggcatatgactcttgcagcttggctaccagctcggcggtgacgagtacatccagggcacagtagtcgagagtttcctggatgatgtcataacgcggttggcttttcttttcccacagctcgcggttgagaaggtattcttcgcgatccttccagtactcttcgaggggaaacccgtctttttctgcacggtaagagcccaacatgtagaactgattgactgccttgtagggacagcatcccttctccactgggagagagtatgcttgggctgcattgcgcagcgaggtatgagtgagggcaaaagtgtccctgaccatgactttgaggaattgatacttgaagtccatgtcatcacaggccccctgttcccagagttggaagtccacccgcttcttgtaggcggggttgggcaaagcgaaagtaacatcattgaagaggatcttgccggccctgggcatgaaatttcgggtgattctgaaaggctgagggacctctgctcggttattgataacctgagcggccaagacgatctcatcaaagccattgatgttgtgccccactatgtacagttctaagaatcgaggggtgcccctgacatgaggcagcttcttgagttcttcaaaagtgagatctgtagggtcagtgagagcatagtgttcgagggcccattcgtgcacgtgagggttcgctttgaggaaggaggaccagaggtccactgcgagtgctgtttgtaactggtcccggtattgacgaaaatgctgcccgactgccattttttctggggtgacgcaatagaaggtttgggggtcctgccgccagcgatcccacttaagtttcatggcgaggtcataggcgatgttgacgagccgctggtctccagagagtttcatgaccagcatgaaggggattagctgcttgccaaaggaccccatccaggtgtaggtttccacatcgtaggtgaggaagagcctttctgtgcgaggatgagagccaatcgggaagaactggatctcctgccaccagttggaggaatggctgttgatgtgatggaagtagaactccctgcgacgcgccgagcattcatgcttgtgcttgtacagacggccgcagtactcgcagcgattcacgggatgcacctcatgaatgagttgtacctgacttcctttgacgagaaatttcagtggaaaattgaggcctggcgtttgtacctggcgctctactatgttgtctgcatcggcatgaccatcttctgtctcgatggtggtcatgctgacgagccctcgcgggaggcaagtccagacctcggcgcggcaggggcggagctcgaggacgagagcgcgcaggccggagctgtccagggtcctgagacgctgcggagtcaggttagtaggcagtgtcaggagattgacttgcatgatcttttcgagggcgtgagggaggttcagatggtacttgatctccacgggtccgttggtggagatgtcaatggcttgcagggttccgtgccccttgggcgctaccaccgtgcccttgtttttccttttgggcggcggtggctctgttgcttcttgcatgtttaggagcggtgtcgagggcgcgcaccgggcggcaggggcggctcgggacccggcggcatggctggcagtggtacgtcggcgccgcgcgcgggtaggttctggtactgcgccctgagaagactcgcatgtgcgacgacgcggcggttgacatcctggatctgacgcctctgggtgaaagctaccggccccgtgagcttgaacctgaaagagagttcaacagaatcaatctcggtatcgttgacggcggcttgcctaaggatttcttgcacgtcgccagagttatcctggtaggcgatctcggccatgaactgctggatctcttcctcttgaagatctccgcggcccgctctctcgacggtggccgctaggtcgttggagatgcgcccaatgagttgagagaatgcattcatgcccgcctcgttccagacgcggctgtagaccacagcccccacgggatctctcgcgcgcataaccacctgggcgaggttaagctctacgtggcgggtgaagaccgcatagttgcataggcgctggaaaaggtagttgagtgtggtggcgatgtgctcggtgacgaagaaatacatgatccatcgtctcagcggcatctcgctgacatcgcccagcgcttccaagcgctccatggcctcgtagaagtccacggcaaagttgaaaaactgggagttacgcgcggacacggtcaactcctcttccagaagacggatgagttcggcaatggtggtgcgcacctcgcgctcgaaatcccccgggatttcttcctcaatctcttcttcttccactaacatctcttcctcttcaggtggggctgcaggaggagggggaacgcggcgacgccggcggcgcacgggcagacggtcgatgaatctttcaatgacctctccgcggcggcggcgcatggtctcggtgacggcacgaccgttctccctgggtctcagagtgaagacgcctccgcgcatctccctgaagtggtgactgggaggctctccgttgggcagggacaccgcgctgattatgcattttatcaattgccccgtaggtactccgcgcaaggacctgatcgtctcaagatccacgggatctgaaaacctttcgacgaaagcgtctaaccagtcgcaatcgcaaggtaggctgagcactgtttcttgcgggcgggggcggctagacgctcggtcggggttctctctttcttttccttcctcctcttgggaggatgagacgatgctgctggtgatgaaattaaaataggcagttttgagacggcggatggtggcgaggagcaccaggtctttgggtccggcttgttggatgcgcaggcgatgggccattccccaagcattatcctgacatctggccagatctttatagtagtcttgcatgagtcgttccacgggcacttcttcttcgcccgctctgccatgcatgcgagtgatcccgaacccgcgcatgggctggacaagtgccaggtccgctacaaccctttcggcgaggatggcttgctgcacctgggtgagggtggcttggaagtcgtcaaagtccacaaagcggtggtaggccccggtgttgattgtgtaggagcagttggccatgactgaccagttgactgtctggtgcccagggcgcacgagctcggtgtacttgaggcgcgagtatgcgcgggtgtcaaagatgtaatcgttgcaggtgcgcaccaggtactggtagccgatgagaaagtgtggcggtggctggcggtacaggggccatcgctctgtagccggggctccgggggcaaggtcttccagcatgaggcggtggtaaccgtagatgtacctggacatccaggtgataccggaggcggtggtggatgcccgcgggaactcgcgtacgcggttccagatgttgcgcagcggcatgaagtagttcatggtaggcacggtttggcccgtgagacgtgcacagtcgttgatgctctagacatacgggcaaaaacgaaagcggtcagcggctcgtctccgtggcctggaggctaagcgaacgggttgggctgcgcgtgtaccccggttcgaatctcggatcaggctggagccgcagctaacgtggtactggcactcccgtctcgacccaggcctgcacaaaacctccaggatacggaggcgggtcgtttttttgctttttcctggatgggagccagtgctgcgtcaagctttagaacactcagttctcggggctgggagtggctcgcgcccgtagtctggagaattaatcgccagggttgcgttgcggtgtgccccggttcgagtcttagcgcgccggatcggccggtttccgcgacgtttctaagaccccgccagccgacttctccagtttacgggagcgagccctcttttttttttttgttttttgttgcccagatgcatcccgtgctgcgacagatgcgcccccagcaacagcccccttctcagcagcagctacaacaacagccacaaaaggctcttcctgctcctgtaactactgcggctgcagccgtcagcggcgcgggacagcccgcctatgatctggaattggaagagggcgagggactggcgcgcctgggcgcaccatcgcccgagcggcacccgcccagccgacttctccagtttacgggagcgagccctcttttttttttttgttttttgttgcccagatgcatcccgtgctgcgacagatgcgcccccagcaacagcccccttctcagcagcagctacaacaacagccacaaaaggctcttcctgctcctgtaactactgcggctgcagccgtcagcggcgcgggacagcccgcctatgatctggaattggaagagggcgagggactggcgcgcctgggcgcaccatcgcccgagcggcacccgcgggtgcaactgaaaaaggactctcgcgaggcgtacgtgccccagcagaacctgttcagggacaggagcggtgaggagccagaggagatgcgagcatctcgatttaacgcgggtcgcgagctgcgccacggtctggatcgaagacgggtgctgcaagacgaggattttgaggtcgatgaagtgacagggatcagcccagctagggcacatgtggccgcggccaacctagtctcagcctacgagcagaccgtgaaggaggagcgcaacttccaaaaatcttttaacaaccatgtgcgcaccctgatcgcccgcgaggaagtgaccctgggtctgatgcatctgtgggacctgatggaggctatcacccagaaccccactagcaaaccactgacagctcagctgtttctggtggttcaacatagcagggacaacgaggcattcagggaggcgttgttgaacatcaccgagcctgatgggagatggctgtatgatctgatcaacatcctgcaaagtattatagtgcaggaacgtagcctgggtttggctgagaaagtggcagctatcaactactcggtcttgagcctgggcaaatactacgctcgcaagatctacaagaccccctacgtacccatagataaggaggtaaagatagatgggttttacatgcgcatgactctgaaggtgctgactctgagcgacgatctgggggtgtatcgcaatgacaggatgcaccgcgcggtgagcgccagcaggaggcgcgagctgagcgacagagaacttatgcacagcttgcaaagagctctaacgggggccgggactgatggggagaactactttgacatgggagcggacttgcaatggcaacccagtcgcagggccatggaggctgcagggtgtgagcttccttacatagaagaggtggatgaagtcgaggacgaggagggcgagtacttggaagactgatggcgcgacccgtatttttgctagatggaacagcagcaggcaccggaccccgcaatgcgggcggcgctgcagagccagccgtccggcattaactcttcggacgattggacccaggccatgcaacgcataatggcgctgacgacccgcaaccccgaagcctttagacagcaaccccaggccaaccgcctttcggccatactggaggccgtagtgccctcccgctccaaccccacccacgagaaggtcctggctatcgtgaacgcgctggtggagaacaaggccatccgtcccgatgaggccgggctggtatacaatgctctcttggagcgcgtggcccgttacaacagcagcaacgtgcaaaccaacctggacaggatggtgaccgatgtgcgcgaggccgtgtctcagcgcgagcggttccagcgcggcgccaacttggggtcgttggtagcgctaaacgctttcctcagcacccagcccgccaacgtgccccgtggtcagcaagactatacaaactttttgagtgcattgagactcatggtagctgaggtgccccagagcgaggtgtaccagtccgggccagattacttcttccagaccagcagacagggcttgcagacagtgaacctgactcaggctttcaagaacctgaagggtctgtggggagtgcacgccccagtaggagatcgcgcgaccgtgtctagcttgctgactcccaactcccgcctgctgctgctgctggtatccccctttactgacagcggtagcatcgaccgcaactcgtacttgggctacctgcttaacctgtatcgcgaggccatagggcagagccaggtggacgagcagacctatcaagaaatcacccaagtgagccgcgccctgggtcaggaagacacgggcagtttggaagccaccctgaacttcttgctaaccaaccggtcgcagaagatccctcctcagtatgcgcttaccgctgaggaggagcggatcctcagatacgtgcaacagagcgttggactgtttctgatgcaggagggggcgacacctaccgccgcgctggacatgacagctcgaaacatggagcccagcatgtatgctagtaacaggcctttcattaacaaactgctggactacctgcacagggcggccgccatgaactctgattatttcaccaatgctatcctgaacccacactggctgcccccacctggtttctacactggcgagtacgacatgcccgaccccaatgacgggttcctgtgggacgatgtggacagcagcatattctccccgcctcccggttatacagtttggaagaaggaagggggcgatagaagacactcttccgtgtcgctgtccggaacggctggtgctgccgcgaccgtgcccgaagctgcaagtcctttccctagcttgcccttttcactaaacagcgttcgcagcagtgaactggggagaataacccgcccgcgcttgatgggcgaggatgagtacttgaatgactctttgctgaggccagagagggaaaagaacttccccaacaatggaatagagagtctggtggataagatgagtagatggaagacctatgcgcaggatcacagagacgagcccaggatattgggggctacaagcagaccgacccgtagacgccagcgccacgacagacagatgggtcttgtgtgggacgatgaggactctgccgatgatagcagcgtgttggacttgggtggaagaggagggggcaacccgttcgctcatctgcgtcccagattcgggcgcatgttgtaaaagtgaaagtaaaataaaaatgcaactcaccaaggccatggcgaccgagcgtgcgttcgttcttttttgttatctgtgtctagtacgatgaggagacgagccgtgctaggcggagcggtggtgtatccggagggtcctcctccttcttacgagagcgtgatgcagcaacaggcggcgatgatacagcccccactggaggttcccttcgtacccccgcggtacctggcgcctacggaagggagaaacagcattcgttactcggagctgtcgcccctgtacgataccaccaagttgtatctggttgacaacaagtcggcggacatcgcctccctgaactatcagaacgaccacagcaacttcctgaccacggtggtgcagaacaatgactttacccccacggaggctagcacccagaccatcaactttgacgaacggtcgcgatggggcggtcatctgaagaccatcatgcacaccaacatgcccaacgtgaacgagtacatgttcagcaacaagttcaaggcgagggtgatggtgtccagaaaagctcctgaaggtgttacagtaaatgacacctatgatcataaagaggatatcttgaagtatgagtggtttgagttcattttaccagaaggcaacttttcagccaccatgacgatcgacctgatgaacaatgccatcattgacaactacctggaaattggcagacagaatggagtgctggaaagtgacattggtgttaagtttgacactagaaatttcaggctcgggtgggaccccgaaactaagttgattatgccaggagtctacacttatgaggcattccatcctgacattgtattgctgcctggttgcggggtagactttactgaaagccgacttagcaacttgcttggcatcaggaagagacatccattccaggagggtttcaaaatcatgtatgaagatcttgaagggggtaatattcctgcccttttggatgtcactgcctatgaggaaagcaaaaaggataccactactgaaacaaccacactggctgttgcagaggaaactagtgaagatgataatataactagaggagatacctatataacagaaaaacacaaacgtgaagctgcagctgctgaagttaaaaaagagttaaagatccaacctctagaaaaagacagcaagagtagaagctacaatgtcttggaagacaaaatcaacacggcctaccgcagttggtacctgtcctacaattacggtaaccctaagaaaggaataaggtcttggacactgctcaccacttcagatgtcacctgtggggcagagcaggtttactggtcgctccctgacatgatgcaagacccagtcacgttccgctccacaagacaagtcaacaactacccagtggtgggtgcagagcttatgcccgtcttctcaaagagtttctacaatgagcaagccgtgtactctcagcagctccgacaggccacttcgctcacgcacgtcttcaaccgcttccctgagaaccagatcctcatccgcccgccggcgcccacaattaccaccgtcagtgaaaacgttcctgctctcacagatcacgggaccctgccgttacgcagcagtatccggggagtccagcgcgtgaccgttactgacgccagacgccgcacctgtccctacgtttacaaggccctgggcatagtcgcgccgcgcgttctttcaagccgcactttctaaaaaaaaaaaatgtccattctcatctcgcccagtaataataccggttggggactgtatgcgcccaccaagatgtatggaggcgcccgcaaacgctctacccagcaccctgtgcgcgttcgcggtcatttccgcgctccctggggcgcactcaagggtcgtacccgcactcggaccacggtcgatgatgtgatcgaccaggtggtcgccgatgctcgtaattatactcctactgcgcctacatctactgtggatgcagttattgacagtgtggtggcagacgcccgcgcctatgctcgccggaagagccgaaggaggcgcatcgccaggcgccacagggctactcccgccatgcgagctgcaaaagctattctgcggagggccaaacgtgtggggcgaagagccatgcttagagcggccagacgcgcggcttcaggtgccagcagcggcaggtcccgcaggcgcgcggccacggcggcagcagcggccattgccaacatggcccaaccgcgaagaggcaatgtgtactgggtgcgtgatgccactaccggccagcgcgtgcccgtgcgcactcgcccccctcgcacttagaagatactgagcagtctccgatgttgtgtcccagcggcaagtatgtccaagcgcaaatacaaggaagagatgctccaggtcatcgcgcctgaaatctacggtccaccggtgaaggatgaaaaaaagccccgcaaaatcaagcgggtcaaaaataacaaaaaggaagaagatgacgatgatgggctggtggagtttgtgcgcgagttcgccccaagacggcgcgtgcagtggcgcgggcgcaaagtgcgtcaagtgctcagacccgggaccactgtggtttttacacccggcgagcgttccagcactacttttaaacggtcctatgatgaggtgtacggggatgacaatattcttgagcaggcggcagaccgccttgacgagtttgcttatggcaagcgcactagatccagtcccaaagaggaggcggtgtccattcctttggatcatggaaatcccacccccagcctcaaaccagtcaccctgcagcaagtgctgcccgtgcctgcgcggagaggcgtaaagcgcgagggtgaggacctgtatcccaccatgcagctaatggtgcccaagcgccagaggctagaagacgtactggagaaaatgaaagtggatgccgatatccagcctgaggtcaaagtaagacctatcaaggaagtggcgccaggtttgggagtacaaaccttcgacatcaagattcccaccgagtccatggaagtgcagaccgaacctgcaaaacccacaaccacctcaattgaggtgcaaacggaaccctggatgcccgcgcccgttgccgcccccagcaccactcgaagatcacgacgaaagtacggcccagcaagtctgctaatgcccaactatgctctgcacccatccatcattcccactccgggttacagaggcactcgctactatcgaaaccggagcaacacctctcgccgccgcaaaccacctgcaagtcgcactcgccgtcgccgccgccgcaacactgccagcaaattgactcccgccgccctggtgcggagagtgtaccgcgatggtcgcgctgaacctctgacgctgccgcgcgcgcgctaccatccaagcatcaccacttaatgactgttgacgctgcctccttgcagatatggccctcacttgccgccttcgcgtccccattactggctaccgaggaagaaactcgcgccgtagaaggatgttggggcgagggatgcgccgccacagacgaaggcgcgctatcagcagacgattagggggtggctttttgccagctcttatacccatcatcgccgcagcgatcggggcgataccaggcatagcttccgtggcggttcaggcctcgcagcgccactaacattggaaaaacttataaataaaaaatagaatggactctgacgctcctggtcctgtgactatgtttttgtagagatggaagacatcaatttttcatccctggctccgcgacacggcacgaggccgtacatgggcacctggagcgacatcggcacgagccaactgaacgggggcgccttcaattggagcagtatctggagcgggcttaaaaattttggctcgaccgtaaaaacctatgggaacaaagcttggaacagcagcacagggcaggctctgagaaataagcttaaggaacaaaacttccaacagaaggtggtcgatgggatcgcctctggtattaacggcgtagtggatctggccaaccaggctgtacaaaaacagataaacagccgcctggacccgccgcccgcaacccctggtgaaatggaagtggaggaagaacttcctccgctggaaaagcggggcgacaagcgtccgcgacccgagctagagcacacgctggtgacgcgcgcagacgagcccccttcatacgaggaggcagtaaagctcggaatgcccactaccaggcccgtagctcacatggctaccggggtgatgaaaccttctgagttacatcgacccgccaccttggacttgcctcctccccctgcttctgcggcgcctgttcccaaacctgtcgctaccagaaagcccaccgccgtacagcccgttgccgtagccagaccgcgtcctgggggcacaccgcgcccgaaagcaaactggcaaagtactctgaacagcatcgtgggtctgggcgtgcagagtgtaaagcgccgtcgctgctattaattaaatatggagtagcgcttaacttgcttgtctgtgtgtatgtatcatcaccacgccgccgcagcagaggagaaaggaagaggtcgcgcgccgaggctgagttgctttcaagatggccaccccatcgatgatgccccaatgggcatacatgcacatcgccggacaggatgcttcggagtacctgagtccgggtctggtgcagttcgcccgtgcaacagacacctacttcagtatggggaacaagtttagaaaccccacagtggcgcccacccacgatgtgaccaccgaccgtagccagcgactgatgctgcgcttcgtgcccgttgaccgggaggacaatacatactcttacaaagtgcggtacaccctcgccgtgggcgacaacagagtgcttgacatggccagcacattctttgacattaggggggtgcttgatagaggtcctagcttcaagccatattccggcacagcttacaattcactggctcctaagggcgcgcctaacacatctcagtggatagttacaacgggagaagacaatgccaccacatacacatttggcattgcttccacgaagggagacaatattactaaggaaggtttagaaattgggaaagacattactgcagacaacaagcccatttatgccgataaaacatatcagccagagcctcaagttggagaagaatcatggactgatattgatggaacaaatgaaaaatttggaggtagagctcttaaaccagctactaaaatgaagccatgctacgggtcttttgcaagacctacaaacataaaagggggccaagctaaaaacagaaaagtaacaccaaccgaaggagatgttgaagctgaggagccagatattgatatggaatttttcgatggtagagaagctgctgacgctttttcgcctgaaattgtgctttacacggaaaatgtcaatttggaaactccagacagccatgtggtatacaagccaggaacttctgatggtaactctcatgcaaatttgggtcaacaagccatgcctaacagacccaattacattggcttcagggataactttgtaggtcttatgtactacaacagtactggaaatatgggagttttggccggccaagcatcacaactgaatgcagtggttgacttgcaggacagaaacactgaactgtcatatcagcttttgcttgattctctgggagacagaagcagatacttcagcatgtggaatcaggctgtggacagctatgatcccgatgttcgtattattgaaaatcatggcgtcgaggatgaactgcctaattactgttttcctctggatggcataggaccagggaacaaatatcaaggcattaaacctagagacactgcatgggaaaaagatactaaagtttctacagctaatgaaatagccataggcaacaatctggctatggaaattaatatccaagctaatctttggagaagttttctgtactccaatgtggctttgtaccttccagatgtttacaagtacacgccaactaacattactctgcccgctaacaccaacacctatgagtacatgaacgggcgagtggtttccccatctctggtcgattcatacatcaacattggcgccaggtggtctcttgacccaatggacaatgtgaatccatttaaccaccaccgcaatgctggcctacgctaccggtccatgcttctgggcaatggccgttatgtgcctttccacatacaagtgcctcaaaaattctttgctgtcaagaacctacttcttctacctggctcctacacctatgagtggaacttcagaaaggatgtgaacatggtcctgcaaagttcccttggaaatgacctcagaacagatggtgctaacataagtttcaccagcatcaacctctatgccaccttcttccccatggctcacaacaccgcttcaactcttgaagccatgctgcgcaacgataccaatgatcagtcattcaacgactacctctctgcagctaacatgctttaccccatccctgccaatgcaaccaacattccaatttccatcccatctcgcaactgggcagccttcaggggctggtccttcaccagactcaaaaccaaggagactccatctcttggatcagggttcgatccctacttcgtttattctggatctattccctacctggatggcactttttaccttaaccacactttcaagaaggtctccatcatgtttgactcctcagtcagctggcctggcaatgacaggctgttgtctccaaatgagtttgaaatcaagcgcactgtggatggggaaggatacaatgtggcccaatgcaacatgaccaaagactggttcctggttcagatgcttgccaactacaacattggctaccagggcttttacatccctgagggatacaaggatcgcatgtactcctttttcagaaacttccagcctatgagcaggcaggtggttgatgaggttaattacactgactacaaagccgtcaccttaccatatcaacacaacaactctggctttgtaggataccttgcgcctactatgagacaaggggaaccttacccagccaattatccatacccgctcatcggaactactgccgttaaaagtgttacccaaaaaaagttcctgtgcgacaggaccatgtggcgcataccgttctccagcaacttcatgtccatgggagcccttacggacctgggacagaacctgctctatgccaactcggcccatgcgctggacatgacttttgaggtggatcccatggatgagcccaccctgctttatcttcttttcgaagtcttcgacgtggtcagagtgcaccagccacaccgcggcgtcatcgaggccgtctacctgcgcacaccgttctcggccggcaacgccaccacataagaagcctcttgcttcttgcaagcagcagctgcagccatgtcatgcgggtccggaaacggctccagcgagcaagagctcaaagccatcgtccgagacctgggttgcggaccctatttcctgggaacctttgacaagcgtttcccggggttcatggcccccgacaagctcgcctgcgccatagtcaacactgccggacgcgagacggggggagagcactggctggcttttggttggaacccgcgctccaacacctgctacctttttgatccttttgggttctcggatgagcgactcaaacagatttaccagtttgagtacgaggggctcctgcgccgcagtgcccttgctaccaaagaccgctgcatcaccctggaaaagtccacccagagcgtgcagggcccacgctcagccgcctgtggacttttttgctgtatgttccttcatgcctttgtgcactggcccgaccgccccatgaacggaaaccccaccatgaagttgctgactggggtgcccaacagcatgctccaatctccccaagtgcagcccaccctgcgccgcaaccaggaggcgctatatcgcttcctaaacacccactcatcttactttcgttctcaccgcgcacgcatcgaaagggccaccgcgtttgaccgtatggatatgcaataagtcatgtaaaaccgtgttcaataaaaagcactttatttttacatgcactaaggctctcgttttttactcattcgttttcattattcactcagaaatcaaatgggttctggcgggagtcaaagtgacccgcgggcagggatacgttgcggaactgtaacctgttctgccacttgaactcggggatcaccaacttgggaactggaatctcgggaaaggtgtcttgccacaactttctggtcagctgcagggcgccaagtaggtcaggagcagagatcttgaaatcacagttgggaccggcattctggacacgggagttgcggtacactgggttgcaacactggaacaccatcaaggctgggtgtctcacgcttgccagcacggtcgggtcactgatggtagtcacatccaagtcttcagcattggccatcccaaagggggtcatcttacaggtctgcctgcccatcacgggagcgcagcctggcttgtggttgcaatcgcaatgaatggggatcagcatcatcctggcttggtcgggggttatccctgggtacacggccttcatgaaggcttcgtactgcttgaaagcttcctgagccttacttccctcggtatagaacatcccacaggacttgctggaaaattgattagtagcacagttggcatcatttacacagcagcgggcatcgttgttggccaactggaccacatttctgccccagcggttctgggtgatcttggctctgtctgggttctccttcatagcgcgctgtccgttctcgctcgccacatccatctcgataatgtggtccttctgaatcatgatagtgccatgcaggcatttcaccttgccttcataatcggtgcatccatgagcccacagagcgcacccggtgcactcccaactattgtgggcgatctcagaataagaatgtaccaatccctgcatgaatcttcccatcatcgctgtcagggtcttcatgctactaaatgtcagcgggatgccacggtgctcctcgttcacatactggtggcagatacgcttgtactgctcgtgctgctctggcatcagcttgaaagaggttctcaggtcattatccagcctgtacctctccattagcacagccatcacttccatgcccttctcccaggcagataccaggggcaagctcaaaggattcctaacagcaatagaagtagctcctttagctatagggtcattcttgtcgatcttctcaacacttctcttgccatccttctcaatgatgcgcaccggggggtagctgaagcccacggccaccaactgagcctgttctctttcttcttcgctgtcgtggccgatgtcttgcagagggacatgcttggtctttctgggcttcttcttgggagggatcgggggaggactgttgctccgttccggagacagggatgaccgcgaagtttcgcttaccagtaccacctggctctcgatagaagaatcggaccccacgcgacggtaggtgttcctcttcgggggcagaggtggaggcgactgagatgggctgcggtctggccttggaagcggatggctggcagagcccattccgcgttcgggggtgtgctcccgttggcggtcgcttgactgatttcctccgcggctggccattgtgttctcctaggcagagaaacaacagacatggaaactcagccatcactgccaacatcgctgcaagcgccatcacacctcgcccccagcagcgacgaggaggagagcttaaccaccccaccacccagtccagctaccaccacctctaccctcgatgatgaggaggaggaggtcgacgcagcccaggagatgcaggcgcaggataatgtgaaagcggaagagattgaggcagatgtcgagcaggacccgggctatgtgacaccggcggagcacgaggaggagctgaaacgttttatagacagagaggatgacgaccgcccagagcatcaagcagatggcgatcaccaggaggctggcatcggggatcaagttgccgactacctcaccgggcttgggggggaagacgtgctcctcaaacatctagcaaggcagtcgaacatagttaaagacgcactactcgacctcaccgaagtgcccatcagtgtggaagagcttagccgcgcctacgagctgaacctcttttcgcctcacataccccccaagcggcagccaaacggcacctgcgaggccaaccctcgactgaacttctatccagcttttactgtccccgaagtgctggccacctaccacatcttttttaagaaccaaaagattccagtctcctgccgcgccaaccgcacccgcgccgatgcccttctcaacttgggtccgggagctcgcttacctgatatagcttccttggaagaggttccaaaaatctttgagggtctgggaagtgatgagactcgggccgcaaatgctctgcaacagggagagaatggcatggatgaacatcacagcgctttagtggaactggagggtgacaatgcccggcttgcagtgctcaagcgcagtatcgtggtcacccattttgcctaccccgctgttaacctgccccccaaagttatgagcgctgttatggaccatctgctcatcaaacgagcaggtccactttcagaaaaccagaacatgcaggatccagacgcctcggacgagggcaagccggtagtcagtgacgagcagctatctcgctggctgggtaccaactccccccgagatttggaagagaggcgcaagcttatgatggctgtagtgctagtaactgtggagctggagtgtttgcgccgctttttcaccgaccccgagaccctgcgcaagctagaggagaacctgcactacacctttagacatggcttcgtgcggcaggcatgcaagatctccaacgtggagcttaccaacctggtttcttacatgggcattttgcatgagaaccggctagggcagagcgtcctgcacaccacccttaaaggggaggcccgccgtgactacatccgagactgtgtctacctctacctctgccatacctggcagactggcatgggtgtgtggcaacagtgtttggaagagcagaacctaaaagagctggacaagctcttgcagagatccctcaaagccctgtggacaggttttgatgagcgcaccgtcgcctcggacctggcagacatcatcttccccgagcgtctcagggttactctgcgaaacggcctgccagactttatgagccagagcatgcttaacaactttcgctctttcatcctggaacgctccggtatcctgcctgccacctgctgtgcgctgccctccgactttgtgcctctcacctaccgcgagtgcccaccgccgctatggagccactgctacctgttccgcctggccaactacctctcctaccactcggatgttatagaggatgtgagcggagacggtctgctggaatgccactgccgctgcaatctttgcacaccccaccgctcccttgcctgcaacccccagttgctgagcgagacccagatcatcggcaccttcgagttgcagggtcccagcagtgaaggcgaggggtcttctccggggcagagtctgaaactgacaccggggctgtggacctccgcctacctgcgcaagtttcatcccgaggattaccacccctatgagatcaggttctatgaggaccagtcacatcctcccaaagtcgagctctcagcctgcgtcatcacccagggagcaattctggcccaattgcaagccatccaaaaatcccgccaagaatttctactgaaaaagggaagcggggtctaccttgacccccagaccggtgaggagctcaacacaaggttcccccaggatgtcccatcgccgaggaagcaagaagctgaaggtgcagctgacgcccccagaggatatggaggaagactgggacagtcaggcagaggaggagatggaagattgggacagccaggcagaggaggtggacagcctggaggaagacagtttggaggaggaagacgaggaggcagaggaggtggaagaagcaaccgccgccaaacagttgtcatcggcggcggagacaagcaagtccccagacagcagcacggctaccatctccgctccgggtcggggggtccagcggcggcccaacagtagatgggacgagaccgggcgattcccaaacccgaccaccgcttccaagaccggtaagaaggagcgacagggatacaagtcctggcgtggacataaaaacgctatcatctcctgcttgcatgaatgcgggggcaacatatccttcacccggcgatacctgctcttccaccacggtgtgaacttcccccgcaatatcttgcattactaccgtcacctccacagcccctactgcagtcagcaagtcccggcaaccccgacagaaaaagacagcagcgacaacggtgaccagaaaaccagcagttagaaaatctacaacaagtgcagcaggaggaggactgaggatcacagcgaacgagccagcgcagaccagagagctgaggaaccggatctttccaaccctctatgccatcttccagcagagtcgggggcaagagcaggaactgaaagtaaaaaaccgatctctgcgctcgctcaccagaagttgtttgtatcacaagagcgaagaccaacttcagcgcactctcgaggacgccgaggctctcttcaacaagtactgcgcgctgactcttaaagagtagcccttgcccgcgcttattcgaaaacggcgggaatcacgtcacccttggcacctgtcctttgccctagtcatgagtaaagagattcccacgccttacatgtggagctatcagccccaaatggggttggcagcaggcgcctcccaggactactccacccgcatgaattggcttagcgccgggccctcaatgatatcacgggttaatgatatacgagcttatcgaaaccagttactcctagaacagtcagctctcaccaccacaccccgccaacaccttaatccccgaaattggcccgccgccctggtgtaccaggaaactcccgctcccaccaccgtactacttcctcgagacgcccaggccgaagttcagatgactaacgcaggtgtacagctggcgggcggttccgccctatgtcgtcaccgacctcaacagagtataaaacgcctggtgatcagaggccgaggtatccagctcaacgacgagtcggttagctcttcgcttggtctgcgaccagacggagtcttccagatcgccggctgtgggagatcttccttcacccctcgtcaggctgtactgactttggagagttcgtcctcgcagccccgctcgggcggcatcggaactctccagttcgtggaggagtttactccctctgtctacttcaaccccttctccggctctcctggccagtacccagacgagttcataccgaacttcgacgcaatcagcgagtcagtggatggctatgattgatgtctaatggtggcgcggctgagctagctcgactgcgacacctagaccactgccgccgctttcgctgcttcgcccgggaactcaccgagttcatctacttcgaactccccgaggagcaccctcagggtccggcccacggagtgcggattaccatcgaagggggaatagactctcgcctgcatcgaatcttctcccagcgacccgtgctgattgagcgcgaccagggaaatacaaccatctccatttactgcatctgtaaccaccccggattgcatgaaagcctttgctgtcttgtttgtgctgagtttaataaaaactgagttaagaccctcctacggactaccgcttcttcaatcaggactttacaacaccaaccagatcttccagaagacccagacccttcctcctctgatccaggactctaactctaccttaccagcaccatccactactaaccttcccgaaactaacaagcttggatctcatctgcaacaccgcctttcacgaagccttctttctgccaatactaccactcccaaaaccggaggtgagctccgcggtctccctactgacgacccctgggtggtagcgggttttgtaacgttaggagtagttgcgggtgggcttgtgctaatcctttgctacctatacataccttgctgtgcatatttagtcatattgcgctgttggtttaaaaaatgggggccatattagtcgtgcttgctttactttcgcttttgggtctgggctctgctaatctcaatcctcttgatcacgatccatgtctagacttcgacccagaaaactgcacacttacttttgcacccgacacaagccgtctctgtggagttcttattaagtgcggatgggactgcaggtccgttgaaattacacataataataaaacatggaacaataccttatccaccacatgggagccaggagttcccgagtggtatactgtctctgtccgaggtcctgacggttccatccgcattagtaacaacacttttattttttctgaaatgtgcgatctggccatgttcatgagcagacagtatgacctatggcctcccagcaaagagaacattgtggcattttccattgcttattgcttggtaacatgcatcatcactgctatcatttgtgtgtgcatacacttgcttatagttattcgccctagacaaagcaataaggaaaaagagaaaatgccttaacctttttactcataccttttctttacagcatggcttttgttacagctctaattattgccaacattgtcactgtcgctcacgggcaaacaattatccatattaccttaggacataatcacacccttgtagggcccccaattacttcagaggttatttggaccaaacttggaagtgttgattattttgatataatttgcaacaaaactaaaccaatatttgtaatctgtaacagacaaaatctcacgttaattaatgttagcaaaatttataacggttactattatggttatgacagatccagtagtcaatataaaaattacttagttcgcataactcagcccaaattaacagtgcccactatgacaataattaaaatggctaataaagcattagaaaattttacatcaccaacaacgcccaatgaaaaaaacattccaaattcaatgattgcaattattgcggcggtggcattgggaatggcactaataataatatgcatgttcctatatgcttgttgctataaaaagtttcaacataaacaggatccactactaaattttaacatttaattttttatacagatgttttccactacaatttttatcattactagccttgcagctgtaacttatggccgttcacacctaactctacctgttggctcaacatgtacactacaaggaccccaacaaggctatgtcacttggtggagaatatatgataatggagggttcgctagaccatgtgatcagcctggtacaaaattttcatgcaacggaagagacttgaccataattaacataacatcaaatgagcaaggcttctattatggaaccaactataaagatagtttagattacaacattattgtagtgccagccaccacttctgctccccgcaaaaccactttctctagcagcagtgccaaagcaagcacaattcctaaaacagcttctgctatgttaaagcttcaaaaaatcgctttaaataattccacagccgctcccaatacaattcctaaatcaacaattggcatcattactgccgtggtagtgggattaattattatatttttgtgcataatgtactatgcctgctgctatagaaaacatgaacaaaaaggtgatgcattactaaattttgacatttaattttttatagaattatgatattgtttcaatcaaataccactaacactatcaatgtgcagactactttaaatcatgacatggaaaaccacactacctcctatgcatacacaaacattcagcctaaatacgctatgcaatagaaattctaaaagacgtcccatctattctcctatgattagtcgtccccatatggctttgaatgaaatctaagatcttttttttttttctcttacagtatggtgaacaccaatcatgatccctagaaatttcttcttcaccatactcatctgtgctttcaatgtctgtgctactttcacagcagtagccactgcaagcccagactgtataggaccatttgcttcctatgcactttttgccttcgttacttgcatctgcgtgtgtagcatagtctgcctggttattaattttttccaactggtagactggatctttgtacgaattgcctacctacgtcaccatcccgaataccgcaatcaaaatgttgcggcacttcttaggcttatttaaaaccatgcaggctatgctaccagtcattttaattctgctactaccctgcattgccctagcttccaccgccactcgcgctacacctgaacaacttagaaaatgcaaatttcaacaaccatggtcatttcttgattgctaccatgaaaaatctgatttccccacatactggatagtgattgttggaataattaacatactttcatgtacctttttctcaatcacaatataccccacatttaattttgggtggaattctcccaatgcactgggttacccacaagaaccagatgaacatatcccactacaacacatacaacaaccactagcactggtagagtatgaaaatgagccacaaccttcactacctcctgccattagttacttcaacctaaccggcggagatgactgaaatactcaccacctccaattccgccgaggatctgcttgatatggacggccgcgtctcagaacagcgactcgcccaactacgcatccgccagcagcaggaacgcgtgaccaaagagctcagagatgtcatccaaattcaccaatgcaaaaaaggcatattttgcttggtaaaacaagccaagatatcctacgagatcaccgctactgaccatcgcctctcttacgaacttggcccccaacgacaaaaatttacatgcatggtgggaatcacccctatagttatcactcagcaaagtggagatactaaggggtgcattcactgctcttgcgattccatcgagtgcacctacaccctgctaaagaccctatgcggcctaagagacctgctacccatgaattaaaaattaataaaaaatcacttacttgaaatcagcaataaggtctctgttgaaattttctcccagcagcacctcacttccctcttcccaactctggtattctaaaccccgttcagcggcatactttctccatactttaaaggggatgtcaaattttaactcctgtcctgtacccacaatcttcatgtctttcttcccagatgaccaagagagtccggctcagtgattccttcaaccctgtctacccctatgaagatgaaagcacctcccaacacccctttataaacccagggtttatttccccaaatggctttacacaaagcccagacggagttcttactttaaaatgtttaaccccactaacaaccacaggcgggtctctacagttaaaagtgggagggggtcttacaatagatgacaccgacggttttttgaaagaaaacataagtgccaccacaccactcgttaagactggtcactctataggtttgtcgctaggacccggattaggaacaaatgaaaacaaactttgtgccaaattgggagaaggacttacattcaattccaacaacatttgcattaatgacaatattaacaccctatggacaggagttaaccccaccagagccaactgtcaaataatggcctccagtgaatctaatgattgcaaattaattctaacactagttaaaactggagccctcgtcactgcatttgtttatgttataggagtatctaacgattttaatatgctaactacacataaaaatataaatttcactgcagagctgttttttgattctactggtaatttattaactagcctttcatccctaaaaactccacttaatcataaatcagggcaaaacatggctactggtgcccttactaatgctaaaggtttcatgcccagcacaactgcctatcctttcaatgttaattccagagaaaaagaaaactacatttacggaacttgttactacacagctagtgatcacactgcttttcccattgacatatctgtcatgcttaaccaaagagcattaaataatgagacatcatattgtattcgtgtaacttggtcctggaatacaggagttgccccagaagtgcaaacctctgctactaccctagtcacctctccatttaccttttactacattagagaagacgactgacaaataaagtttaacttgtttatttaaaatcaattcataaaattcgagtagttattttgcctcccccttcccatttaacagaatacaccaatctctccccacgcacagctttaaacatttggataccattacagatagacatagttttagattccacattccaaacagtttcaaagcgagccaatctggggtcagtgatacataaaaatgcatcgggatagtcttttaaagcgctttcacagtccaactgctgcggatgcgactccggagtctggatcacggtcatctggaagaagaacgatgggaatcataatccgaaaacggaatcgggcgattgtgtctcatcaaacccacaagcagccgctgtctgcgtcgctccgtgcgactgctgtttataggatcgggatccacagtgtcctgaagcatgattttaatagcccttaacattaactttctggtgcggtgcgcgcagcaacgcattctgatttcacttagattactacagtaggtacagcacattatcacaatattgtttaataaaccataattaaaagcgctccagccaaaactcatatcagatataatcgcccctgcatgaccatcataccaaattttaatataaattaaatgtcgttccctcaaaaacacactacccacatacataatctcttttggcatgtgcatattaacaatctgtctgtaccatggacaacgttggttaatcatgcaacccaatataaccttccgaaaccacactgccaacaccgctcccccagccatgcattgaagtgaaccctgccgattacaatgacaatgaagaacccaattctctcgaccatgaatcacttgagaataaaaaatatctatagtagcacaacaaagacataaatgcatgcatcttctcataattcttaactcctcgggatttagaaacatatcccaaggaatgggaaactcttgcagaacagtaaagctggcagaacaaggaagaccacgaacacaacttacactatgcatagtcatagtatcacaatctggcaacagcgggtggtcttcagtcatagaagctcgggtttcattttcctcacatcgtggtaactgggctctggtgtaagggtgatgtctggcgcatgatgtcgagcgtgcgcgcaaccttgtcataatggagttgcttcctgacattctcgtattttgtatagcaaaacgcggccctggcacaacacactcttcttcgtcttctatcctgccgcttagtgtgttccgtctgataattcaagtacagccacactcttaagttggtcaaaagaatgctggcttcagttgtaatcaaaactccatcatatttaattgttctaaggaaatcatccacggtagcatatgcaaatcccaaccaagcaatgcaactggattgcgtttcaagcagcagaggagagggaagagacggaagaatcatgttaatttttattccaaacgatctcgcagtacttcaaattgtagatcgcgcagatggcatctatcgcccccactgtgttggtgaaaaagcacagctaaatcaaaagaaatgcgattttcaaggtgctcaacggtggcttccaacaaagcctccacgcgcacatccaaaaacaaaagaataccaaaagaaggagcattttctaactcctcaaacatcatattacattcctgcaccattcccagataattttcagctttccagccttgaattattcgtgtcagttcttgtggtaaatccaaaccacacattacaaacaggtcccggagggcgccctccaccaccattcttaaacacaccctcataatgtcaaaatatcttgctcctgtgtcacctgtagcaaattaagaatggcatcatcaattgacatgcccttggctctaagttcttctctaagttctagttgtaaatactctttcatattatcaccaaactgcttagccagaagccccccgggaacaatagcaggggacgctacagtgcagtacaagcgcagacctccccaattggctccagcaaaaacaagattagaataagcatactgggaaccaccagtaatatcatcaaagttgctggaaatataatcaggcagagtttcttgtaaaaattgaataaaagaaaaattttccaaagaaacattcaaaacctctgggatgcaaatgcaataggttaccgcgctgcgctccaacattattagttttgaattagtctgtaaaataaaagaaacaagcgtcatatcatagtagcctgtcgaacaggtggataaatcagtctttccattacaagacaagccacagggtctccagctcgaccctcgtaaaacctgtcatcgtgattaaacaacagcaccgaaagttcctcgcggtggccagcatgaataattcttgatgaagcatataatccagacatgttagcatcagttaaagaaaaaaaacagccaacatagcctctgggtataattatgcttaatcttaagtatagcaaagccacccctcgcggatacaaagtaaaaggcacaggagaataaaaaatataattatttctctgctgctgttcaggcaacgttgcccccggtccctctaaatacacatacaaagcctcatcagccatggcttaccagacaaagtatagcgggcgcacaaagcacaagctctaaagaagctctaaagacgctctccaacctctccacaatatatacacaagccctaaactgacgtaatgggagtaaagtgtaaaaaatcccgccaagcccaacacacaccccgaaactgcgtcagcagggaaaagtacagtttcacttccgcaaacccaacaagcgtagcttcctctttctcacggtacgtcacatccgattaacttgcaacgtcattttcccacggccgccccgcccattttagccgttaaccccacagccaatcaccacacagcgcgcacttttttaaattacctcatttacatattggcaccattccatctataaggtatattatatagagag

SEQ ID NO: 211 - DNA, 34794 bp, Human adenovirus
  misc_feature 1..34794: note = Reference Ad11 Genome Sequence: GenBank accession no. NC_011202 (SEQ ID NO: 211); Human adenovirus 11
  source 1..34794: mol_type = genomic DNA
catcatcaataatataccttatagatggaatggtgccaatatgtaaatgaggtgattttaaaaagtgtggatcgtgtggtgattggctgtggggttaacggctaaaaggggcggtgcgaccgtgggaaaatgacgttttgtgggggtggagtttttttgcaagttgtcgcgggaaatgtgacgcataaaaaggcttttttctcacggaactacttagttttcccacggtatttaacaggaaatgaggtagttttgaccggatgcaagtgaaaattgttgattttcgcgcgaaaactgaatgaggaagtgtttttctgaataatgtggtatttatggcagggtggagtatttgttcagggccaggtagactttgacccattacgtggaggtttcgattaccgtgttttttacctgaatttccgcgtaccgtgtcaaagtcttctgtttttacgtaggtgtcagctgatcgctagggtatttatacctcagggtttgtgtcaagaggccactcttgagtgccagcgagaagagttttctcctctgcgccggcagtttaataataaaaaaatgagagatttgcgatttctgcctcaggaaataatctctgctgagactggaaatgaaatattggagcttgtggtgcacgccctgatgggagacgatccggagccacctgtgcagctttttgagcctcctacgcttcaggaactgtatgatttagaggtagagggatcggaggattctaatgaggaagctgtaaatggcttttttaccgattctatgcttttagctgctaatgaagggttagaattagatccgcctttggacacttttgatactccaggggtaattgtggaaagcggtacaggtgtaagaaaattacctgatttgagttccgtggactgtgatttgcactgctatgaagacgggtttcctccgagtgatgaggaggaccatgaaaaggagcagtccatgcagactgcagcgggtgagggagtgaaggctgccaatgttggttttcagttggattgcccggagcttcctggacatggctgtaagtcttgtgaatttcacaggaaaaatactggagtaaaggaactgttatgttcgctttgttatatgagaacgcactgccactttatttacagtaagtgtgtttaagttaaaatttaaaggaatatgctgtttttcacatgtatattgagtgtgagttttgtgcttcttattataggtcctgtgtctgatgctgatgaatcaccatctcctgattctactacctcacctcctgagattcaagcacctgttcctgtggacgtgcgcaagcccattcctgtgaagcttaagcctgggaaacgtccagcagtggaaaaacttgaggacttgttacagggtggggacggacctttggacttgagtacacggaaacgtccaagacaataagtgttccatatccgtgtttacttaaggtgacgtcaatatttgtgtgacagtgcaatgtaataaaaatatgttaactgttcactggtttttattgctttttgggcggggactcaggtatataagtagaagcagacctgtgtggttagctcataggagctggctttcatccatggaggtttgggccattttggaagaccttaggaagactaggcaactgttagagaacgcttcggacggagtctccggtttttggagattctggttcgctagtgaattagctagggtagtttttaggataaaacaggactataaccaagaatttgaaaagttgttggtagattgcccaggactttttgaagctcttaatttgggccatcaggttcactttaaagaaaaagttttatcagttttagacttttcaaccccaggtagaactgctgctgctgtggcttttcttacttttatattagataaatggatcccgcagactcatttcagcaggggatacgttttggatttcatagccacagcattgtggagaacatggaaggttcgcaagatgaggacaatcttaggttactggccagtgcagcctttgggtgtagcgggaatcctgaggcatccaccggtcatgccagcggttctggaggaggaacagcaagaggacaacccgagagccggcctggaccctccagtggaggaggcggagtagctgacttgtctcctgaactgcaacgggtgcttactggatctacgtccactggacgggataggggcgttaagagggagagggcatctagtggtactgatgctagatctgagttggctttaagtttaatgagtcgcagacgtcctgaaaccatttggtggcatgaggttcagaaagagggaagggatgaagtttctgtattgcaggagaaatattcactggaacaggtgaaaacatgttggttggagcctgaggatgattgggaggtggccattaaaaattatgccaagatagctttgaggcctgataaacagtataagattactagacggattaatatccggaatgcttgttacatatctggaaatggggctgaggtggtaatagatactcaagacaaggcagttattagatgctgcatgatggatatgtggcctggggtagtcggtatggaagcagtaacttttgtaaatgttaagtttaggggagatggttataatggaatagtgtttatggccaataccaaacttatattgcatggttgtagcttttttggtttcaacaatacctgtgtagatgcctggggacaggttagtgtacggggatgtagtttctatgcgtgttggattgccacagctggcagaaccaagagtcaattgtctctgaagaaatgcatatttcaaagatgtaacctgggcattctgaatgaaggcgaagcaagggtccgccactgcgcttctacagatactggatgttttattttgattaagggaaatgccagcgtaaagcataacatgatttgcggtgcttccgatgagaggccttatcaaatgctcacttgtgctggtgggcattgtaatatgctggctactgtgcatattgtttcccatcaacgcaaaaaatggcctgtttttgatcacaatgtgatgacgaagtgtaccatgcatgcaggtgggcgtagaggaatgtttatgccttaccagtgtaacatgaatcatgtgaaagtgttgttggaaccagatgccttttccagaatgagcctaacaggaatttttgacatgaacatgcaaatctggaagatcctgaggtatgatgatacgagatcgagggtacgcgcatgcgaatgcggaggcaagcatgccaggttccagccggtgtgtgtagatgtgactgaagatctcagaccggatcatttggttattgcccgcactggagcagagttcggatccagtggagaagaaactgactaaggtgagtattgggaaaactttggggtgggattttcagatggacagattgagtaaaaatttgttttttctgtcttgcagctgtcatgagtggaaacgcttcttttaaggggggagtcttcagcccttatctgacagggcgtctcccatcctgggcaggagttcgtcagaatgttatgggatctactgtggatggaagacccgtccaacccgccaattcttcaacgctgacctatgctactttaagttcttcacctttggacgcagctgcagctgccgccgccgcttctgttgccgctaacactgtgcttggaatgggttactatggaagcatcatggctaattccacttcctctaataacccttctaccctgactcaggacaagttacttgtccttttggcccagctggaggctttgacccaacgtctgggtgaactttctcagcaggtggtcgagttgcgagtacaaactgagtctgctgtcggcacggcaaagtctaaataaaaaaatcccagaatcaatgaataaataaacaagcttgttgttgatttaaaatcaagtgtttttatttcatttttcgcgcacggtatgccctagaccaccgatctctatcattgagaactcggtggattttttccaggatcctatagaggtgggattgaatgtttagatacatgggcattaggccgtctttggggtggagatagctccattgaagggattcatgctccggggtagtgttgtaaatcacccagtcataacaaggtcgcagtgcatggtgttgcacaatatcttttagaagtaggctgattgccacagataagcccttggtgtaggtgtttacaaaccggttgagctgggatgggtgcattcggggtgaaattatgtgcattttggattggatttttaagttggcaatattgccgccaagatcccgtcttgggttcatgttatgaaggaccaccaagacggtgtatccggtacatttaggaaatttatcgtgcagcttggatggaaaagcgtggaaaaatttggagacacccttgtgtcctccaagattttccatgcactcatccatgataatagcaatggggccgtgggcagcggcgcgggcaaacacgttccgtgggtctgacacatcatagttatgttcctgagttaaatcatcataagccattttaatgaatttggggcggagagtaccagattggggtatgaatgttccttcgggccccggagcatagttcccctcacagatttgcatttcccaagctttcagttccgagggtggaatcatgtccacctggggggctatgaaaaacaccgtttctggggcgggggtgattaattgtgatgatagcaaatttctgagcaattgagatttgccacatccggtggggccataaatgattccgattacgggttgcaggtggtagtttagggaacggcaactgccgtcttctcgaagcaagggggccacctcgttcatcatttcccttacatgcatattttcccgcaccaaatccattaggaggcgctctcctcctagtgatagaagttcttgtagtgaggaaaagtttttcagcggtttcagaccgtcagccatgggcattttggagagagtttgctgcaaaagttctagtctgttccacagttcagtgatgtgttctatggcatctcgatccagcagacctcctcgtttcgcgggtttggacggctcctggaatagggtatgagacgatgggcgtccagcgctgccagggttcggtccttccagggtctcagtgttcgagtcagggttgtttccgtcacagtgaaggggtgtgcgcctgcttgggcgcttgccagggtgcgcttcagactcatcctgctggtcgaaaacttctgtcgcttggcgccctgtatgtcggccaagtagcagtttaccatgagttcgtagttgagcgcctcggctgcgtggcctttggcgcggagcttacctttggaagttttcttgcataccgggcagtataggcatttcagcgcatacaacttgggcgcaaggaaaacggattctggggagtatgcatctgcgccgcaggaggcgcaaacagtttcacattccaccagccaggttaaatccggttcattggggtcaaaaacaagttttccgccatattttttgatgcgtttcttacctttggtctccatgagttcgtgtcctcgttgagtgacaaacaggctgtccgtgtccccgtagactgattttacaggcctcttctccagtggagtgcctcggtcttcttcgtacaggaactctgaccactctgatacaaaggcgcgcgtccaggccagcacaaaggaggctatgtgggaggggtagcgatcgttgtcaaccagggggtccaccttttccaaagtatgcaaacacatgtcaccctcttcaacatccaggaatgtgattggcttgtaggtgtatttcacgtgacctggggtccccgctgggggggtataaaagggggcggttctttgctcttcctcactgtcttccggatcgctgtccaggaacgtcagctgttggggtaggtattccctctcgaaggcgggcatgacctctgcactcaggttgtcagtttctaagaacgaggaggatttgatattgacagtgccggttgagatgcctttcatgaggttttcgtccatttggtcagaaaacacaatttttttattgtcaagtttggtggcaaatgatccatacagggcgttggataaaagtttggcaatggatcgcatggtttggttcttttccttgtccgcgcgctctttggcggcgatgttgagttggacatactcgcgtgccaggcacttccattcggggaagatagttgttaattcatctggcacgattctcacttgccaccctcgattatgcaaggtaattaaatccacactggtggccacctcgcctcgaaggggttcattggtccaacagagcctacctcctttcctagaacagaaagggggaagtgggtctagcataagttcatcgggagggtctgcatccatggtaaagattcccggaagtaaatccttatcaaaatagctgatgggagtggggtcatctaaggccatttgccattctcgagctgccagtgcgcgctcatatgggttaaggggactgccccatggcatgggatgggtgagtgcagaggcatacatgccacagatgtcatagacgtagatgggatcctcaaagatgcctatgtaggttggatagcatcgcccccctctgatacttgctcgcacatagtcatatagttcatgtgatggcgctagcagccccggacccaagttggtgcgattgggtttttctgttctgtagacgatctggcgaaagatggcgtgagaattggaagagatggtgggtctttgaaaaatgttgaaatgggcatgaggtagacctacagagtctctgacaaagtgggcataagattcttgaagcttggttaccagttcggcggtgacaagtacgtctagggcgcagtagtcaagtgtttcttgaatgatgtcataacctggttggtttttcttttcccacagttcgcggttgagaaggtattcttcgcgatccttccagtactcttctagcggaaacccgtctttgtctgcacggtaagatcctagcatgtagaactgattaactgccttgtaagggcagcagcccttctctacgggtagagagtatgcttgagcagcttttcgtagcgaagcgtgagtaagggcaaaggtgtctctgaccatgactttgagaaattggtatttgaagtcgatgtcgtcacaggctccctgttcccagagttggaagtctacccgtttcttgtaggcggggttgggcaaagcgaaagtaacatcattgaagagaatcttaccggctctgggcataaaattgcgagtgatgcgaaaaggctgtggtacttccgctcgattgttgatcacctgggcagctaggacgatctcgtcgaaaccgttgatgttgtgtcctacgatgtataattctatgaaacgcggcgtgcctctgacgtgaggtagcttactgagctcatcaaaggttaggtctgtggggtcagataaggcgtagtgttcgagagcccattcgtgcaggtgaggatttgcatgtaggaatgatgaccaaagatctaccgccagtgctgtttgtaactggtcccgatactgacgaaaatgccggccaattgccattttttctggagtgacacagtagaaggttctggggtcttgttgccatcgatcccacttgagtttaatggctagatcgtgggccatgttgacgagacgctcttctcctgagagtttcatgaccagcatgaaaggaactagttgtttgccaaaggatcccatccaggtgtaagtttccacatcgtaggtcaggaagagtctttctgtgcgaggatgagagccgatcgggaagaactggatttcctgccaccagttggaggattggctgttgatgtgatggaagtagaagtttctgcggcgcgccgagcattcgtgtttgtgcttgtacagacggccgcagtagtcgcagcgttgcacgggttgtatctcgtgaatgagttgtacctggcttcccttgacgagaaatttcagtgggaagccgaggcctggcgattgtatctcgtgctcttctatattcgctgtatcggcctgttcatcttctgtttcgatggtggtcatgctgacgagcccccgcgggaggcaagtccagacctcggcgcgggaggggcggagctgaaggacgagagcgcgcaggctggagctgtccagagtcctgagacgctgcggactcaggttagtaggtagggacagaagattaacttgcatgatcttttccagggcgtgcgggaggttcagatggtacttgatttccacaggttcgtttgtagagacgtcaatggcttgcagggttccgtgtcctttgggcgccactaccgtacctttgttttttcttttgatcggtggtggctctcttgcttcttgcatgctcagaagcggtgacggggacgcgcgccgggcggcagcggttgttccggacccgagggcatggctggtagtggcacgtcggcgccgcgcacgggcaggttctggtactgcgctctgagaagacttgcgtgcgccaccacgcgtcgattgacgtcttgtatctgacgtctctgggtgaaagctaccggccccgtgagcttgaacctgaaagagagttcaacagaatcaatttcggtatcgttaacggcagcttgtctcagtatttcttgtacgtcaccagagttgtcctggtaggcgatctccgccatgaactgctcgatttcttcctcctgaagatctccgcgacccgctctttcgacggtggccgcgaggtcattggagatacggcccatgagttgggagaatgcattcatgcccgcctcgttccagacgcggctgtaaaccacggccccctcggagtctcttgcgcgcatcaccacctgagcgaggttaagctccacgtgtctggtgaagaccgcatagttgcataggcgctgaaaaaggtagttgagtgtggtggcaatgtgttcggcgacgaagaaatacatgatccatcgtctcagcggcatttcgctaacatcgcccagagcttccaagcgctccatggcctcgtagaagtccacggcaaaattaaaaaactgggagtttcgcgcggacacggtcaattcctcctcgagaagacggatgagttcggctatggtggcccgtacttcgcgttcgaaggctcccgggatctcttcttcctcttctatctcttcttccactaacatctcttcttcgtcttcaggcgggggcggagggggcacgcggcgacgtcgacggcgcacgggcaaacggtcgatgaatcgttcaatgacctctccgcggcggcggcgcatggtttcagtgacggcgcggccgttctcgcgcggtcgcagagtaaaaacaccgccgcgcatctccttaaagtggtgactgggaggttctccgtttgggagggagagggcgctgattatacattttattaattggcccgtagggactgcacgcagagatctgatcgtgtcaagatccacgggatctgaaaacctttcgacgaaagcgtctaaccagtcacagtcacaaggtaggctgagtacggcttcttgtgggcgggggtggttatgtgttcggtctgggtcttctgtttcttcttcatctcgggaaggtgagacgatgctgctggtgatgaaattaaagtaggcagttctaagacggcggatggtggcgaggagcaccaggtctttgggtccggcttgctggatacgcaggcgattggccattccccaagcattatcctgacatctagcaagatctttgtagtagtcttgcatgagccgttctacgggcacttcttcctcacccgttctgccatgcatacgtgtgagtccaaatccgcgcattggttgtaccagtgccaagtcagctacgactctttcggcgaggatggcttgctgtacttgggtaagggtggcttgaaagtcatcaaaatccacaaagcggtggtaagctcctgtattaatggtgtaagcacagttggccatgactgaccagttaactgtctggtgaccagggcgcacgagctcggtgtatttaaggcgcgaataggcgcgggtgtcaaagatgtaatcgttgcaggtgcgcaccagatactggtaccctataagaaaatgcggcggtggttggcggtagagaggccatcgttctgtagctggagcgccaggggcgaggtcttccaacataaggcggtgatagccgtagatgtacctggacatccaggtgattcctgcggcggtagtagaagcccgaggaaactcgcgtacgcggttccaaatgttgcgtagcggcatgaagtagttcattgtaggcacggtttgaccagtgaggcgcgcgcagtcattgatgctctatagacacggagaaaatgaaagcgttcagcgactcgactccgtagcctggaggaacgtgaacgggttgggtcgcggtgtaccccggttcgagacttgtactcgagccggccggagccgcggctaacgtggtattggcactcccgtctcgacccagcctacaaaaatccaggatacggaatcgagtcgttttgctggtttccgaatggcagggaagtgagtcctattttttttttttgccgctcagatgcatcccgtgctgcgacagatgcgcccccaacaacagcccccctcgcagcagcagcagcagcaatcacaaaaggctgtccctgcaactactgcaactgccgccgtgagcggtgcgggacagcccgcctatgatctggacttggaagagggcgaaggactggcacgtctaggtgcgccttcacccgagcggcatccgcgagttcaactgaaaaaagattctcgcgaggcgtatgtgccccaacagaacctatttagagacagaagcggcgaggagccggaggagatgcgagcttcccgctttaacgcgggtcgtgagctgcgtcacggtttggaccgaagacgagtgttgcgggacgaggatttcgaagttgatgaaatgacagggatcagtcctgccagggcacacgtggctgcagccaaccttgtatcggcttacgagcagacagtaaaggaagagcgtaacttccaaaagtcttttaataatcatgtgcgaaccctgattgcccgcgaagaagttacccttggtttgatgcatttgtgggatttgatggaagctatcattcagaaccctactagcaaacctctgaccgcccagctgtttctggtggtgcaacacagcagagacaatgaggctttcagagaggcgctgctgaacatcaccgaacccgaggggagatggttgtatgatcttatcaacattctacagagtatcatagtgcaggagcggagcctgggcctggccgagaaggtggctgccatcaattactcggttttgagcttgggaaaatattacgctcgcaaaatctacaagactccatacgttcccatagacaaggaggtgaagatagatgggttctacatgcgcatgacgctcaaggtcttgaccctgagcgatgatcttggggtgtatcgcaatgacagaatgcatcgcgcggttagcgccagcaggaggcgcgagttaagcgacagggaactgatgcacagtttgcaaagagctctgactggagctggaaccgagggtgagaattacttcgacatgggagctgacttgcagtggcagcctagtcgcagggctctgagcgccgcgacggcaggatgtgagcttccttacatagaagaggcggatgaaggcgaggaggaagagggcgagtacttggaagactgatggcacaacccgtgttttttgctagatggaacagcaagcaccggatcccgcaatgcgggcggcgctgcagagccagccgtccggcattaactcctcggacgattggacccaggccatgcaacgtatcatggcgttgacgactcgcaaccccgaagcctttagacagcaaccccaggccaaccgtctatcggccatcatggaagctgtagtgccttcccgctctaatcccactcatgagaaggtcctggccatcgtgaacgcgttggtggagaacaaagctattcgtccagatgaggccggactggtatacaacgctctcttagaacgcgtggctcgctacaacagtagcaatgtgcaaaccaatttggaccgtatgataacagatgtacgcgaagccgtgtctcagcgcgaaaggttccagcgtgatgccaacctgggttcgctggtggcgttaaatgctttcttgagtactcagcctgctaatgtgccgcgtggtcaacaggattatactaactttttaagcgctttgagactgatggtatcagaagtacctcagagcgaagtgtatcagtccggtcctgattacttctttcagactagcagacagggcttgcagacggtaaatctgagccaagcttttaaaaaccttaaaggtttgtggggagtgcatgccccggtaggagaaagagcaaccgtgtctagcttgttaactccgaactcccgcctattattactgttggtagctcctttcaccgacagcggtagcatcgaccgtaattcctatttgggttacctactaaacctgtatcgcgaagccatagggcaaagtcaggtggacgagcagacctatcaagaaattacccaagtcagtcgcgctttgggacaggaagacactggcagtttggaagccactctgaacttcttgcttaccaatcggtctcaaaagatccctcctcaatatgctcttactgcggaggaggagaggatccttagatatgtgcagcagagcgtgggattgtttctgatgcaagagggggcaactccgactgcagcactggacatgacagcgcgaaatatggagcccagcatgtatgccagtaaccgacctttcattaacaaactgctggactacttgcacagagctgccgctatgaactctgattatttcaccaatgccatcttaaacccgcactggctgcccccacctggtttctacacgggcgaatatgacatgcccgaccctaatgacggatttctgtgggacgacgtggacagcgatgttttttcacctctttctgatcatcgcacgtggaaaaaggaaggcggcgatagaatgcattcttctgcatcgctgtccggggtcatgggtgctaccgcggctgagcccgagtctgcaagtccttttcctagtctacccttttctctacacagtgtacgtagcagcgaagtgggtagaataagtcgcccgagtttaatgggcgaagaggagtatctaaacgattccttgctcagaccggcaagagaaaaaaatttcccaaacaatggaatagaaagtttggtggataaaatgagtagatggaagacttatgctcaggatcacagagacgagcctgggatcatggggattacaagtagagcgagccgtagacgccagcgccatgacagacagaggggtcttgtgtgggacgatgaggattcggccgatgatagcagcgtgctggacttgggtgggagaggaaggggcaacccgtttgctcatttgcgccctcgcttgggtggtatgttgtaaaaaaaaataaaaaaaaaactcaccaaggccatggcgacgagcgtacgttcgttcttctttattatctgtgtctagtataatgaggcgagtcgtgctaggcggagcggtggtgtatccggagggtcctcctccttcgtacgagagcgtgatgcagcagcagcaggcgacggcggtgatgcaatccccactggaggctccctttgtgcctccgcgatacctggcacctacggagggcagaaacagcattcgttattcggaactggcacctcagtacgataccaccaggttgtatctggtggacaacaagtcggcggacattgcttctctgaactatcagaatgaccacagcaacttcttgaccacggtggtgcaaaacaatgactttacccctacggaagccagcacccagaccattaactttgatgaacgatcgcggtggggcggtcagctaaagaccatcatgcatactaacatgccaaacgtgaacgagtatatgtttagtaacaagttcaaagcgcgtgtgatggtgtccagaaaacctcccgacggtgctgcagttggggatacttatgatcacaagcaggatattttgaaatatgagtggttcgagtttactttgccagaaggcaacttttcagttactatgactattgatttgatgaacaatgccatcatagataattacttgaaagtgggtagacagaatggagtgcttgaaagtgacattggtgttaagttcgacaccaggaacttcaagctgggatgggatcccgaaaccaagttgatcatgcctggagtgtatacgtatgaagccttccatcctgacattgtcttactgcctggctgcggagtggattttaccgagagtcgtttgagcaaccttcttggtatcagaaaaaaacagccatttcaagagggttttaagattttgtatgaagatttagaaggtggtaatattccggccctcttggatgtagatgcctatgagaacagtaagaaagaacaaaaagccaaaatagaagctgctacagctgctgcagaagctaaggcaaacatagttgccagcgactctacaagggttgctaacgctggagaggtcagaggagacaattttgcgccaacacctgttccgactgcagaatcattattggccgatgtgtctgaaggaacggacgtgaaactcactattcaacctgtagaaaaagatagtaagaatagaagctataatgtgttggaagacaaaatcaacacagcctatcgcagttggtatctttcgtacaattatggcgatcccgaaaaaggagtgcgttcctggacattgctcaccacctcagatgtcacctgcggagcagagcaggtctactggtcgcttccagacatgatgaaggatcctgtcactttccgctccactagacaagtcagtaactaccctgtggtgggtgcagagcttatgcccgtcttctcaaagagcttctacaacgaacaagctgtgtactcccagcagctccgccagtccacctcgcttacgcacgtcttcaaccgctttcctgagaaccagattttaatccgtccgccggcgcccaccattaccaccgtcagtgaaaacgttcctgctctcacagatcacgggaccctgccgttgcgcagcagtatccggggagtccaacgtgtgaccgttactgacgccagacgccgcacctgtccctacgtgtacaaggcactgggcatagtcgcaccgcgcgtcctttcaagccgcactttctaaaaaaaaaaaaaatgtccattcttatctcgcccagtaataacaccggttggggtctgcgcgctccaagcaagatgtacggaggcgcacgcaaacgttctacccaacatcctgtccgtgttcgcggacattttcgcgctccatggggcgccctcaagggccgcactcgcgttcgaaccaccgtcgatgatgtaatcgatcaggtggttgccgacgcccgtaattatactcctactgcgcctacatctactgtggatgcagttattgacagtgtagtggctgacgctcgcaactatgctcgacgtaagagccggcgaaggcgcattgccagacgccaccgagctaccactgccatgcgagccgcaagagctctgctacgaagagctagacgcgtggggcgaagagccatgcttagggcggccagacgtgcagcttcgggcgccagcgccggcaggtcccgcaggcaagcagccgctgtcgcagcggcgactattgccgacatggcccaatcgcgaagaggcaatgtatactgggtgcgtgacgctgccaccggtcaacgtgtacccgtgcgcacccgtccccctcgcacttagaagatactgagcagtctccgatgttgtgtcccagcggcgaggatgtccaagcgcaaatacaaggaagaaatgctgcaggttatcgcacctgaagtctacggccaaccgttgaaggatgaaaaaaaaccccgcaaaatcaagcgggttaaaaaggacaaaaaagaagaggaagatggcgatgatgggctggcggagtttgtgcgcgagtttgccccacggcgacgcgtgcaatggcgtgggcgcaaagttcgacatgtgttgagacctggaacttcggtggtctttacacccggcgagcgttcaagcgctacttttaagcgttcctatgatgaggtgtacggggatgatgatattcttgagcaggcggctgaccgattaggcgagtttgcttatggcaagcgtagtagaataacttccaaggatgagacagtgtcgatacccttggatcatggaaatcccacccctagtcttaaaccggtcactttgcagcaagtgttacccgtaactccgcgaacaggtgttaaacgcgaaggtgaagatttgtatcccactatgcaactgatggtacccaaacgccagaagttggaggacgttttggagaaagtaaaagtggatccagatattcaacctgaggttaaagtgagacccattaagcaggtagcgcctggtctgggggtacaaactgtagacattaagattcccactgaaagtatggaagtgcaaactgaacccgcaaagcctactgccacctccactgaagtgcaaacggatccatggatgcccatgcctattacaactgacgccgccggtcccactcgaagatcccgacgaaagtacggtccagcaagtctgttgatgcccaattatgttgtacacccatctattattcctactcctggttaccgaggcactcgctactatcgcagccgaaacagtacctcccgccgtcgccgcaagacacctgcaaatcgcagtcgtcgccgtagacgcacaagcaaaccgactcccggcgccctggtgcggcaagtgtaccgcaatggtagtgcggaacctttgacactgccgcgtgcgcgttaccatccgagtatcatcacttaatcaatgttgccgctgcctccttgcagatatggccctcacttgtcgccttcgcgttcccatcactggttaccgaggaagaaactcgcgccgtagaagagggatgttgggacgcggaatgcgacgctacaggcgacggcgtgctatccgcaagcaattgcggggtggttttttaccagccttaattccaattatcgctgctgcaattggcgcgataccaggcatagcttccgtggcggttcaggcctcgcaacgacattgacattggaaaaaaacgtataaataaaaaaaaaaaaatacaatggactctgacactcctggtcctgtgactatgttttcttagagatggaagacatcaatttttcatccttggctccgcgacacggcacgaagccgtacatgggcacctggagcgacatcggcacgagccaactgaacgggggcgccttcaattggagcagtatctggagcgggcttaaaaattttggctcaaccataaaaacatacgggaacaaagcttggaacagcagtacaggacaggcgcttagaaataaacttaaagaccagaacttccaacaaaaagtagtcgatgggatagcttccggcatcaatggagtggtagatttggctaaccaggctgtgcagaaaaagataaacagtcgtttggacccgccgccagcaaccccaggtgaaatgcaagtggaggaagaaattcctccgccagaaaaacgaggcgacaagcgtccgcgtcccgatttggaagagacgctggtgacgcgcgtagatgaaccgccttcttatgaggaagcaacgaagcttggaatgcccaccactagaccgatagccccaatggccaccggggtgatgaaaccttctcagttgcatcgacccgtcaccttggatttgccccctccccctgctgctactgctgtacccgcttctaagcctgtcgctgccccgaaaccagtcgccgtagccaggtcacgtcccgggggcgctcctcgtccaaatgcgcactggcaaaatactctgaacagcatcgtgggtctaggcgtgcaaagtgtaaaacgccgtcgctgcttttaattaaatatggagtagcgcttaacttgcctatctgtgtatatgtgtcattacacgccgtcacagcagcagaggaaaaaaggaagaggtcgtgcgtcgacgctgagttactttcaagatggccaccccatcgatgctgccccaatgggcatacatgcacatcgccggacaggatgcttcggagtacctgagtccgggtctggtgcagttcgcccgcgccacagacacctacttcaatctgggaaataagtttagaaatcccaccgtagcgccgacccacgatgtgaccaccgaccgtagccagcggctcatgttgcgcttcgtgcccgttgaccgggaggacaatacatactcttacaaagtgcggtacaccctggccgtgggcgacaacagagtgctggatatggccagcacgttctttgacattaggggtgtgttggacagaggtcccagtttcaaaccctattctggtacggcttacaactccctggctcctaaaggcgctccaaatacatctcagtggattgcagaaggtgtaaaaaatacaactggtgaggaacacgtaacagaagaggaaaccaatactactacttacacttttggcaatgctcctgtaaaagctgaagctgaaattacaaaagaaggactcccagtaggtttggaagtttcagatgaagaaagtaaaccgatttatgctgataaaacatatcagccagaacctcagctgggagatgaaacttggactgaccttgatggaaaaaccgaaaagtatggaggcagggctctcaaacccgatactaagatgaaaccatgctacgggtcctttgccaaacctactaatgtgaaaggcggtcaggcaaaacaaaaaacaacggagcagccaaatcagaaagtcgaatatgatatcgacatggagttttttgatgcggcatcgcagaaaacaaacttaagtcctaaaattgtcatgtatgcagaaaatgtaaatttggaaactccagacactcatgtagtgtacaaacctggaacagaagacacaagttccgaagctaatttgggacaacaatctatgcccaacagacccaactacattggcttcagagataactttattggacttatgtactataacagtactggtaacatgggggtgctggctggtcaagcgtctcagttaaatgcagtggttgacttgcaggacagaaacacagaactttcttaccaactcttgcttgactctctgggcgacagaaccagatactttagcatgtggaatcaggctgtggacagttatgatcctgatgtacgtgttattgaaaatcatggtgtggaagatgaacttcccaactactgttttccactggacggcataggtgttccaacaaccagttacaaatcaatagttccaaatggagacaatgcgcctaattggaaggaacctgaagtaaatggaacaagtgagatcggacagggtaatttgtttgccatggaaattaaccttcaagccaatctatggcgaagtttcctttattccaatgtggctctatatctcccagactcgtacaaatacaccccgtccaatgtcactcttccagaaaacaaaaacacctacgactacatgaacgggcgggtggtgccgccatctctagtagacacctatgtgaacattggtgccaggtggtctctggatgccatggacaatgtcaacccattcaaccaccaccgtaacgctggcttgcgttaccgatccatgcttctgggtaacggacgttatgtgcctttccacatacaagtgcctcaaaaattcttcgctgttaaaaacctgctgcttctcccaggctcctacacttatgagtggaactttaggaaggatgtgaacatggttctacagagttccctcggtaacgacctgcgggtagatggcgccagcatcagtttcacgagcatcaacctctatgctacttttttccccatggctcacaacaccgcttccacccttgaagccatgctgcggaatgacaccaatgatcagtcattcaacgactacctatctgcagctaacatgctctaccccattcctgccaatgcaaccaatattcccatttccattccttctcgcaactgggcggctttcagaggctggtcatttaccagactgaaaaccaaagaaactccctctttggggtctggatttgacccctactttgtctattctggttctattccctacctggatggtaccttctacctgaaccacacttttaagaaggtttccatcatgtttgactcttcagtgagctggcctggaaatgacaggttactatctcctaacgaatttgaaataaagcgcactgtggatggcgaaggctacaacgtagcccaatgcaacatgaccaaagactggttcttggtacagatgctcgccaactacaacatcggctatcagggcttctacattccagaaggatacaaagatcgcatgtattcatttttcagaaacttccagcccatgagcaggcaggtggttgatgaggtcaattacaaagacttcaaggccgtcgccataccctaccaacacaacaactctggctttgtgggttacatggctccgaccatgcgccaaggtcaaccctatcccgctaactatccctatccactcattggaacaactgccgtaaatagtgttacgcagaaaaagttcttgtgtgacagaaccatgtggcgcataccgttctcgagcaacttcatgtctatgggggcccttacagacttgggacagaatatgctctatgccaactcagctcatgctctggacatgacctttgaggtggatcccatggatgagcccaccctgctttatcttctcttcgaagttttcgacgtggtcagagtgcatcagccacaccgcggcatcatcgaggcagtctacctgcgtacaccgttctcggccggtaacgctaccacgtaagaagcttcttgcttcttgcaaatagcagctgcaaccatggcctgcggatcccaaaacggctccagcgagcaagagctcagagccattgtccaagacctgggttgcggaccctattttttgggaacctacgataagcgcttcccggggttcatggcccccgataagctcgcctgtgccattgtaaatacggccggacgtgagacggggggagagcactggttggctttcggttggaacccacgttctaacacctgctacctttttgatccttttggattctcggatgatcgtctcaaacagatttaccagtttgaatatgagggtctcctgcgccgcagcgctcttgctaccaaggaccgctgtattacgctggaaaaatctacccagaccgtgcagggtccccgttctgccgcctgcggacttttctgctgcatgttccttcacgcctttgtgcactggcctgaccgtcccatggacggaaaccccaccatgaaattgctaactggagtgccaaacaacatgcttcattctcctaaagtccagcccaccctgtgtgacaatcaaaaagcactctaccattttcttaatacccattcgccttattttcgctcccatcgtacacacatcgaaagggccactgcgttcgaccgtatggatgttcaataatgactcatgtaaacaacgtgttcaataaacatcactttatttttttacatgtatcaaggctctgcattacttatttatttacaagtcgaatgggttctgacgagaatcagaatgacccgcaggcagtgatacgttgcggaactgatacttgggttgccacttgaattcgggaatcaccaacttgggaaccggtatatcgggcaggatgtcactccacagctttctggtcagctgcaaagctccaagcaggtcaggagccgaaatcttgaaatcacaattaggaccagtgctttgagcgcgagagttgcggtacaccggattgcagcactgaaacaccatcagcgacggatgtctcacgcttgccagcacggtgggatctgcaatcatgcccacatccagatcttcagcattggcaatgctgaacggggtcatcttgcaggtctgcctacccatggcgggcacccaattaggcttgtggttgcaatcgcagtgcagggggatcagtatcatcttggcctgatcctgtctgattcctggatacacggctctcatgaaagcatcatattgcttgaaagcctgctgggctttactaccctcggtataaaacatcccgcaggacctgctcgaaaactggttagctgcacagccggcatcattcacacagcagcgggcgtcattgttagctatttgcaccacacttctgccccagcggttttgggtgattttggttcgctcgggattctcctttaaggctcgttgtccgttctcgctggccacatccatctcgataatctgctccttctgaatcataatattgccatgcaggcacttcagcttgccctcataatcattgcagccatgaggccacaacgcacagcctgtacattcccaattatggtgggcgatctgagaaaaagaatgtatcattccctgcagaaatcttcccatcatcgtgctcagtgtcttgtgactagtgaaagttaactggatgcctcggtgctcctcgtttacgtactggtgacagatgcgcttgtattgttcgtgttgctcaggcattagtttaaaagaggttctaagttcgttatccagcctgtacttctccatcagcagacacatcacttccatgcctttctcccaagcagacaccaggggcaagctaatcggattcttaacagtgcaggcagcagctcctttagccagagggtcatctttagcgatcttctcaatgcttcttttgccatccttctcaacgatgcgcacgggcgggtagctgaaacccactgctacaagttgcgcctcttctctttcttcttcgctgtcttgactgatgtcttgcatggggatatgtttggtcttccttggcttctttttggggggtatcggaggaggaggactgtcgctccgttccggagacagggaggattgtgacgtttcgctcaccattaccaactgactgtcggtagaagaacctgaccccacacggcgacaggtgtttctcttcgggggcagaggtggaggcgattgcgaagggctgcggtccgacctggaaggcggatgactggcagaaccccttccgcgttcgggggtgtgctccctgtggcggtcgcttaactgatttccttcgcggctggccattgtgttctcctaggcagagaaacaacagacatggaaactcagccattgctgtcaacatcgccacgagtgccatcacatctcgtcctcagcgacgaggaaaaggagcagagcttaagcattccaccgcccagtcctgccaccacctctaccctagaagataaggaggtcgacgcatctcatgacatgcagaataaaaaagcgaaagagtctgagacagacatcgagcaagacccgggctatgtgacaccggtggaacacgaggaagagttgaaacgctttctagagagagaggatgaaaactgcccaaaacaacgagcagataactatcaccaagatgctggaaatagggatcagaacaccgactacctcatagggcttgacggggaagacgcgctccttaaacatctagcaagacagtcgctcatagtcaaggatgcattattggacagaactgaagtgcccatcagtgtggaagagctcagccgcgcctacgagcttaacctcttttcacctcgtactccccccaaacgtcagccaaacggcacctgcgagccaaatcctcgcttaaacttttatccagcttttgctgtgccagaagtactggctacctatcacatcttttttaaaaatcaaaaaattccagtctcctgccgcgctaatcgcacccgcgccgatgccctactcaatctgggacctggttcacgcttacctgatatagcttccttggaagaggttccaaagatcttcgagggtctgggcaataatgagactcgggccgcaaatgctctgcaaaagggagaaaatggcatggatgagcatcacagcgttctggtggaattggaaggcgataatgccagactcgcagtactcaagcgaagcatcgaggtcacacacttcgcatatcccgctgtcaacctgccccctaaagtcatgacggcggtcatggaccagttactcattaagcgcgcaagtcccctttcagaagacatgcatgacccagatgcctgtgatgagggtaaaccagtggtcagtgatgagcagctaacccgatggctgggcaccgactctcccagggatttggaagagcgtcgcaagcttatgatggccgtggtgctggttaccgtagaactagagtgtctccgacgtttctttaccgattcagaaaccttgcgcaaactcgaagagaatctgcactacacttttagacacggctttgtgcggcaggcatgcaagatatctaacgtggaactcaccaacctggtttcctacatgggtattctgcatgagaatcgcctaggacaaagcgtgctgcacagcaccctgaagggggaagcccgccgtgattacatccgcgattgtgtctatctgtacctgtgccacacgtggcaaaccggcatgggtgtatggcagcaatgtttagaagaacagaacttgaaagagcttgacaagctcttacagaaatctcttaaggttctgtggacagggttcgacgagcgcaccgtcgcttccgacctggcagacctcatcttcccagagcgtctcagggttactttgcgaaacggattgcctgactttatgagccagagcatgcttaacaattttcgctctttcatcctggaacgctccggtatcctgcccgccacctgctgcgcactgccctccgactttgtgcctctcacctaccgcgagtgccccccgccgctatggagtcactgctacctgttccgtctggccaactatctctcctaccactcggatgtgatcgaggatgtgagcggagacggcttgctggagtgtcactgccgctgcaatctgtgcacgccccaccggtccctagcttgcaacccccagttgatgagcgaaacccagataataggcacctttgaattgcaaggccccagcagccaaggcgatgggtcttctcctgggcaaagtttaaaactgaccccgggactgtggacctccgcctacttgcgcaagtttgctccggaagattaccacccctatgaaatcaagttctatgaggaccaatcacagcctccaaaggccgaactttcggcctgcgtcatcacccagggggcaattctggcccaattgcaagccatccaaaaatcccgccaagaatttctactgaaaaagggtaagggggtctaccttgacccccagaccggcgaggaactcaacacaaggttccctcaggatgtcccaacgacgagaaaacaagaagttgaaggtgcagccgccgcccccagaagatatggaggaagattgggacagtcaggcagaggaggcggaggaggacagtctggaggacagtctggaggaagacagtttggaggaggaaaacgaggaggcagaggaggtggaagaagtaaccgccgacaaacagttatcctcggctgcggagacaagcaacagcgctaccatctccgctccgagtcgaggaacccggcggcgtcccagcagtagatgggacgagaccggacgcttcccgaacccaaccagcgcttccaagaccggtaagaaggatcggcagggatacaagtcctggcgggggcataagaatgccatcatctcctgcttgcatgagtgcgggggcaacatatccttcacgcggcgctacttgctattccaccatggggtgaactttccgcgcaatgttttgcattactaccgtcacctccacagcccctactatagccagcaaatcccggcagtctcgacagataaagacagcggcggcgacctccaacagaaaaccagcagcggcagttagaaaatacacaacaagtgcagcaacaggaggattaaagattacagccaacgagccagcgcaaacccgagagttaagaaatcggatctttccaaccctgtatgccatcttccagcagagtcggggtcaagagcaggaactgaaaataaaaaaccgatctctgcgttcgctcaccagaagttgtttgtatcacaagagcgaagatcaacttcagcgcactctcgaggacgccgaggctctcttcaacaagtactgcgcgctgactcttaaagagtaggcagcgaccgcgcttattcaaaaaaggcgggaattacatcatcctcgacatgagtaaagaaattcccacgccttacatgtggagttatcaaccccaaatgggattggcggcaggcgcctcccaggactactccacccgcatgaattggctcagcgccgggccttctatgatttctcgagttaatgatatacgcgcctaccgaaaccaaatacttttggaacagtcagctcttaccaccacgccccgccaacaccttaatcccagaaattggcccgccgccctagtgtaccaggaaagtcccgctcccaccactgtattacttcctcgagacgcccaggccgaagtccaaatgactaatgcaggtgcgcagttagctggcggctccaccctatgtcgtcacaggcctcggcataatataaaacgcctgatgatcagaggccgaggtatccagctcaacgacgagtcggtgagctctccgcttggtctacgaccagacggaatctttcagattgccggctgcgggagatcttccttcacccctcgtcaggctgttctgactttggaaagttcgtcttcgcaaccccgctcgggcggaatcgggaccgttcaatttgtggaggagtttactccctctgtctacttcaaccccttctccggatctcctgggcattacccggacgagttcataccgaacttcgacgcgattagcgagtcagtggacggctacgattgatgtctggtgacgcggctgagctatctcggctgcgacatctagaccactgccgccgctttcgctgctttgcccgggaactcattgagttcatctacttcgaactccccaaggatcaccctcaaggtccggcccacggagtgcggatttctatcgaaggcaaaatagactctcgcctgcaacgaattttctcccagcggcccgtgctgatcgagcgagaccagggaaacaccacggtttccatctactgcatttgtaatcaccccggattgcatgaaagcctttgctgtcttatgtgtactgagtttaataaaaactgaattaagactctcctacggactgccgcttcttcaacccggattttacaaccagaagaacgaaacttttcctgtcgtccaggactctgttaacttcacctttcctactcacaaactagaagctcaacgactacaccgcttttccagaagcattttccctactaatactactttcaaaaccggaggtgagctccaaggtcttcctacagaaaacccttgggtggaagcgggccttgtagtgctaggaattcttgcgggtgggcttgtgattattctttgctacctatacacaccttgcttcactttcttagtggtgttgtggtattggtttaaaaaatggggcccatactagtcttgcttgttttactttcgcttttggaaccgggttctgccaattacgatccatgtctagacttcgacccagaaaactgcacacttacttttgcacccgacacaagccgcatctgtggagttcttattaagtgcggatgggaatgcaggtccgttgaaattacacacaataacaaaacctggaacaataccttatccaccacatgggagccaggagttcccgagtggtacactgtctctgtccgaggtcctgacggttccatccgcattagtaacaacactttcattttttctgaaatgtgcgatctggccatgttcatgagcaaacagtattctctatggcctcctagcaaggacaacatcgtaacgttctccattgcttattgcttgtgcgcttgccttcttactgctttactgtgcgtatgcatacacctgcttgtaaccactcgcatcaaaaacgccaataacaaagaaaaaatgccttaacctctttctgtttacagacatggcttctcttacatctctcatatttgtcagcattgtcactgccgctcatggacaaacagtcgtctctatccctctaggacataattacactctcataggacccccaatcacttcagaggtcatctggaccaaactgggaagcgttgattactttgatataatctgcaacaaaacaaaaccaataatagtaacttgcaacatacaaaatcttacattgattaatgttagcaaagtttacagcggttactattatggttatgacagatacagtagtcaatatagaaattacttggttcgtgttacccagttgaaaaccacgaaaatgccaaatatggcaaagattcgatccgatgacaattctctagaaacttttacatctcccaccacacccgacgaaaaaaacatcccagattcaatgattgcaattgttgcagcggtggcagtggtgatggcactaataataatatgcatgcttttatatgcttgtcgctacaaaaagtttcatcctaaaaaacaagatctcctactaaggcttaacatttaatttctttttatacagccatggtttccactaccacattccttatgcttactagtctcgcaactctgacttctgctcgctcacacctcactgtaactataggctcaaactgcacactaaaaggacctcaaggtggtcatgtcttttggtggagaatatatgacaatggatggtttacaaaaccatgtgaccaacctggtagatttttctgcaacggcagagacctaaccattatcaacgtgacagcaaatgacaaaggcttctattatggaaccgactataaaagtagtttagattataacattattgtactgccatctaccactccagcaccccgcacaactactttctctagcagcagtgtcgctaacaatacaatttccaatccaacctttgccgcgcttttaaaacgcactgtgaataattctacaacttcacatacaacaatttccacttcaacaatcagcattatcgctgcagtgacaattggaatatctattcttgtttttaccataacctactacgcctgctgctatagaaaagacaaacataaaggtgatccattacttagatttgatatttaatttgttctttttttttttatttacagtatggtgaacaccaatcatggtacctagaaatttcttcttcaccatactcatttgtgcatttaatgtttgcgctactttcacagcagtagccacagcaaccccagactgtataggagcatttgcttcctatgcactttttgcttttgttacttgcatctgcgtatgtagcatagtctgcctggttattaattttttccaacttatagactggatccttgtgcgaattgcctacctgcgccaccatcccgaataccgcaaccaaaatatcgcggcacttcttagactcatctaaaaccatgcaggctatactaccaatatttttgcttctattgcttccctacgctgtctcaaccccagctgcctatagtactccaccagaacaccttagaaaatgcaaattccaacaaccgtggtcatttcttgcttgctatcgagaaaaatcagaaattcccccaaatttaataatgattgctggaataattaatataatctgttgcaccataatttcatttttgatataccccctatttgattttggctggaatgctcccaatgcacatgatcatccacaagacccagaggaacacattcccctacaaaacatgcaacatccaatagcgctaatagattacgaaagtgaaccacaacccccactactccctgctattagttacttcaacctaaccggcggagatgactgaaacactcaccacctccaattccgccgaggatctgctcgatatggacggccgcgtctcagaacagcgactcgcccaactacgcatccgccagcagcaggaacgcgcggccaaagagctcagagatgtcatccaaattcaccaatgcaaaaaaggcatattctgtttggtaaaacaagccaagatatcctacgagatcaccgctactgaccatcgcctctcttacgaacttggcccccaacgacaaaaatttacctgcatggtgggaatcaaccccatagttatcacccagcaaagtggagatactaagggttgcattcactgctcctgcgattccatcgagtgcacctacaccctgctgaagaccctatacggcctaagagacctgctaccaatgaattaaaaaatgattaataaaaaatcacttacttgaaatcagcaataaggtctctgttgaaattttctcccagcagcacctcacttccctcttcccaactctggtattctaaaccccgttcagcggcatactttctccatactttaaaggggatgtcaaattttagctcctctcctgtacccacaatcttcatgtctttcttcccagatgaccaagagagtccggctcagtgactccttcaaccctgtctacccctatgaagatgaaagcacctcccaacacccctttataaacccagggtttatttccccaaatggcttcacacaaagcccaaacggagttcttactttaaaatgtttaaccccactaacaaccacaggcggatctctacagctaaaagtgggagggggacttacagtggatgacaccaacggttttttgaaagaaaacataagtgccaccacaccactcgttaagactggtcactctataggtttaccactaggagccggattgggaacgaatgaaaataaactttgtatcaaattaggacaaggacttacattcaattcaaacaacatttgcattgatgacaatattaacaccttatggacaggagtcaaccccaccgaagccaactgtcaaatcatgaactccagtgaatctaatgattgcaaattaattctaacactagttaaaactggagcactagtcactgcatttgtttatgttataggagtatctaacaattttaatatgctaactacacacagaaatataaattttactgcagagctgtttttcgattctactggtaatttactaactagactctcatccctcaaaactccacttaatcataaatcaggacaaaacatggctactggtgccattactaatgctaaaggtttcatgcccagcacgactgcctatcctttcaatgataattctagagaaaaagaaaactacatttacggaacttgttactacacagctagtgatcgcactgcttttcccattgacatatctgtcatgcttaaccgaagagcaataaatgacgagacatcatattgtattcgtataacttggtcctggaacacaggagatgccccagaggtgcaaacctctgctacaaccctagtcacctccccatttaccttttactacatcagagaagacgactgacaaataaagtttaacttgtttatttgaaaatcaattcacaaaatccgagtagttattttgcctcccccttcccatttaacagaatacaccaatctctccccacgcacagctttaaacatttggataccattagatatagacatggttttagattccacattccaaacagtttcagagcgagccaatctggggtcagtgatagataaaaatccatcgggatagtcttttaaagcgctttcacagtccaactgctgcggatgcgactccggagtctggatcacggtcatctggaagaagaacgatgggaatcataatccgaaaacggtatcggacgattgtgtctcatcaaacccacaagcagccgctgtctgcgtcgctccgtgcgactgctgtttatgggatcagggtccacagtgtcctgaagcatgattttaatagcccttaacatcaactttctggtgcgatgcgcgcagcaacgcattctgatttcactcaaatctttgcagtaggtacaacacattattacaatattgtttaataaaccataattaaaagcgctccagccaaaactcatatctgatataatcgcccctgcatgaccatcataccaaagtttaatataaattaaatgacgttccctcaaaaacacactacccacatacatgatctcttttggcatgtgcatattaacaatctgtctgtaccatggacaacgttggttaatcatgcaacccaatataaccttccggaaccacactgccaacaccgctcccccagccatgcattgaagtgaaccctgctgattacaatgacaatgaagaacccaattctctcgaccgtgaatcacttgagaatgaaaaatatctatagtggcacaacatagacataaatgcatgcatcttctcataatttttaactcctcaggatttagaaacatatcccagggaataggaagctcttgcagaacagtaaagctggcagaacaaggaagaccacgaacacaacttacactatgcatagtcatagtatcacaatctggcaacagcgggtggtcttcagtcatagaagctcgggtttcattttcctcacaacgtggtaactgggctctggtgtaagggtgatgtctggcgcatgatgtcgagcgtgcgcgcaaccttgtcataatggagttgcttcctgacattctcgtattttgtatagcaaaacgcggccctggcagaacacactcttcttcgccttctatcctgccgcttagcgtgttccgtgtgatagttcaagtacaaccacactcttaagttggtcaaaagaatgctggcttcagttgtaatcaaaactccatcgcatctaatcgttctgaggaaatcatccacggtagcatatgcaaatcccaaccaagcaatgcaactggattgtgtttcaagcaggagaggagagggaagagacggaagaaccatgttaatttttattccaaacgatctcgcagtacttcaaattgtagatcgcgcagatggcatctctcgcccccactgtgttggtgaaaaagcacagctagatcaaaagaaatgcgattttcaaggtgctcaacggtggcttccagcaaagcctccacgcgcacatccaagaacaaaagaataccaaaagaaggagcattttctaactcctcaatcatcatattacattcctgcaccattcccagataattttcagctttccagccttgaattattcgtgtcagttcttgtggtaaatccaatccacacattacaaacaggtcccggagggcgccctccaccaccattcttaaacacaccctcataatgacaaaatatcttgctcctgtgtcacctgtagcgaattgagaatggcaacatcaattgacatgcccttggctctaagttcttctttaagttctagttgtaaaaactctctcatattatcaccaaactgcttagccagaagccccccgggaacaagagcaggggacgctacagtgcagtacaagcgcagacctccccaattggctccagcaaaaacaagattggaataagcatattgggaaccgccagtaatatcatcgaagttgctggaaatataataaggcagagtttcttgtaaaaattgaataaaagaaaaatttgccaaaaaaacattcaaaacctctgggatgcaaatgcaataggttaccgcgctgcgctccaacattgttagttttgaattagtctgcaaaaataaaaaaaaaaacaagcgtcatatcatagtagcctgacgaacagatggataaatcagtctttccatcacaagacaagccacagggtctccagctcgaccctcgtaaaacctgtcatcatgattaaacaacagcaccgaaagttcctcgcggtgaccagcatgaataattcttgatgaagcatacaatccagacatgttagcatcagttaacgagaaaaaacagccaacatagcctttgggtataattatgcttaatcgtaagtatagcaaagccacccctcgcggatacaaagtaaaaggcacaggagaataaaaaatataattatttctctgctgctgttcaggcaacgtcgcccccggtccctctaaatacacatacaaagcctcatcagccatggcttaccagacaaagtacagcgggcacacaaagcacaagctctaaagtgactctccaacctctccacaatatatatatacacaagccctaaactgacgtaatgggagtaaagtgtaaaaaatcccgccaaacccaacacacaccccgaaactgcgtcaccagggaaaagtacagtttcacttccgcaatcccaacaggcgtaacttcctctttctcacggtacgtgatatcccactaacttgcaacgtcattttcccacggtcgcaccgccccttttagccgttaaccccacagccaatcaccacacgatccacactttttaaaatcacctcatttacatattggcaccattccatctataaggtatattattgatgatg

SEQ ID NO: 212 - DNA, 34764 bp, Human adenovirus
  misc_feature 1..34764: note = Reference Ad14 Genome Sequence: GenBank accession no. AY803294 (SEQ ID NO: 212); Human adenovirus 14
  source 1..34764: mol_type = genomic DNA
catcatcaataatataccttatagatggaatggtgccaatatgtaaatgaggtgattttaaaaagtgtgggctgtgtggtaattggctgtggggttaacggctaaaaggggcggcgcggccgtgggaaaatgacgttttttgggggtggagtgtttttgcaagttgtcgcggtaaatgtgacgcaaacaaaggctttttttttacggaactacttagtgttcccacggtatttaacaggaaatgaggtagttttggccggatgcaagtaaaaattgttcattttcgcgcgaaaactgaatgaggaagtggttttctgaataatgcggtatttatggcagggtggagtatttgttcagggccaggtagactttgacccattacgtggaggtttcgattaccgcggaggtttcgattaccgtgttttttacctaaatttccgcgtaccgtgtgaaagtcttctgtttttacgtaggtgtcagctgatcgctacggtatttatacctcagggtttgtgtcaagaggccactcttgagtgccagcgagaagagttttctcctctgcgccggcagtttaatattaaaaaaaatgagacacttgcgatttatgcctcaggaaataatttctgctgagactggaaacgaaatactggagtttgtggtgcacgccctgatgggagacgatccggagccacctgtgcagctttttgagcctcctacgcttcaggaactgtatgatttagaggtagagggatcggaggattctaatgaggaagctgtgaatggcttttttaccgattctatgcttttagctgctaatgaaggattagaattagatccgcctttggacactttcgatactccaggggtgattgtggaaagcggtacagctgtaagaaaattacctgatttgggttccgtggactgtgatttgcactgctatgaagacgggtttcctttgagtgatgaggaggaccatgaaaaggagcagtctatgcagactgcagcgggtgagggagtgaaggctgccattggttttcagttggattgcccggagcttcctggacatggctgtaagtcttgtgaatttcacaggaaaaatactggagtaaaggaactgttatgttcgctttgttatatgagagcgcactgccactttatttacagtaagtgtgtttaagttaaaatttaaaggaatatgctgtttttcacatgtatattgagtgggaaatttgtgcttcttattataggtcctgtgtctgatgctgatgagtcaccatctcctgattctactacctcacctcctgagattcaagcacctgttcctgtggacgtgcacaagcccattcctgtaaagcttaagcctggaaaacgtccagcagtggaaaaactcgaggacttgttacagggtggggacggacctttggacttgagtacacggaaacggccaagacaataagtgttccatatccgtgtttacttaaggtgacgtcaatatttgtgtgagagtgcaatgtaataaaaatatgttaactgtgtactggtttttattgctttttgggcggggactcaggtatataagtagaagcagacctgtgtggttagctcatagaagctggctttgattcatggaggtttgggccattttggaagaccttagaaagactaggcaactgttagagaacgcttcggacggagtctccggtttttggagattctggttcgctagtgaattagctagggtagtttttaggataaaacaggactataaagaagaatttgaaaagttgttggtagattgtccaggactttttgaagctcttaatttgggccatcaagttcactttaaagaaaaagttttatcagttttagacttttcgaccccaggtagaactgccgctgctgtggcttttcttacttttatattagataaatggatcccgcagactcatttcagcaggggatacgttttggatttcgtagccacagcattgtggagaacatggaaggttcgcaagatgaggacaatcttaggttactggccagtgcagcctttgggtgtagcgggaatcctgaggcatccaccggtcatgccagcggttctggaggaggaacagcaagaggacaacccgagagccggcctggaccctccagtggaggaggcggagtagctgacttgtctcctgaactgcaacgggtgcttactggatctacgtccactggacgggataggggcgttaaaagggagagggcatctagtggtactgatgctagatctgagttggctttaagtttaatgagtcgcagacgtcctgaaaccatttggtggcatgaggtccagaaagagggaagggatgaagtttctgtattgcaggagaaatattcactggaacaggtgaaaacatgttggttggagcctgaggatgattgggaggtggccattaaaaattatgccaagatagctttgaggcctgataaacagtataagattactagacggattaatatccggaatgcttgttacatatctggaaatggggctgaggtggtaatagatactccagacaagacagttattagatgctgcatgatggatatgtggcctggagtagtcggtatggaagcagtaacttttgtaaatgttaagtttaggggagatggttataatggaatagtgtttatggccaataccaaacttatattgcatggttgtagcttttttggttttaacaatacctgtgtagatgcctggggacaggttagtgtacggggatgtagtttctatgcgtgttggattgccacagctggcagaaccaagagtcaattgtctctgaagaaatgcatattccaaagatgtaacctgggcattcttaatgaaggcgaagcaagggtccgccactgcgcttctacagatactggatgttttattttaattaagggcaatgccagcgtaaagcataacatgatttgcggtgcttccgatgagaggccttatcaaatgctcacttgtgccggagggcattgtaacatgctggctactgtgcatattgtttctcatcaacgcaaaaaatggcctgtttttgatcacaatgtgttgaccaagtgtaccatgcatgcaggtgggcgtagaggaatgtttatgccttaccagtgtaacatgaatcatgtaaaagtgttgttggaaccagatgccttttccagaatgagtctaacaggaatgtttgacatgaacatgcaaatctggaagatcctgaggtatgatgatacaagatcgagggtgcgcgcatgcgaatgcggaggcaagcatgccaggttccagccggtgtgtgtagatgtgactgaagatctgagaccggatcatttggttattgcccgcactggagcagagttcggatccagtggagaagaaactgactaaggtgagtattgggaaaactttggggtgggattttcagatggacagattgagtaaaaatttgtttttctgtcttgcagctgtcatgagtggaaacgcttcttttaatgggggagtcttcagcccttatctgacagggcgtctcccatcctgggcaggagttcgtcagaatgttatgggatctactgtggatggaagacccgtccaacccgccaattcttcaacgctgacctatgctactttaagttcttcacctttggacgcagctgcagccgccgctgccgcctctgttgccgctaacactgtgcttggaatgggttactatggaagcatcctggctaattccacttcctctaataacccttctaccctgactcaggacaagttacttgtccttttggcccagctggaggctttgacccaacgtctgggtgaactttctcagcaggtggccgagttgcgagtacaaactgagtctgctgtcggcacggcaaagtctaaataaaaaaaaaaaattccagaatcaatgaataaataaacgagcttgttgttgatttaaaatcaagtgttttttatttcatttttcgcgcacggtatgccctagaccaccgatctcgatcattgagaacacggtggattttttccaaaatcctataaaggtgggattgaatgtttagatacatgggcattaggccgtctttggggtggagatagctccattgaagggattcatgctccggggtagtgttgtaaattacccagtcataacaaggtcgctgtgcatggtgttgcacaatatcttttagaagtaggctgattgccacagataagcccttggtgtaggtgtttacaaaccggttgagctgggaggggtgcattcggggtgaaattatgtgcattttggattggatttttaagttggcaatattgccgccaagatctcgtcttgggttcatgttatgaagtaccaccaagacggtgtatccggtacatttaggaaatttatcgtgcagcttggatggaaaagcgtggaaaaatttggagacacccttgtgtcctccgagattttccatgcactcatccatgataatagcaatagggccgtgggcagcagcgcgggcaaacacgttccgtgggtctgacacatcatagttatgttcctgagttaaatcatcataggccattttaataaatttgggacggagagtacccgattggggtatgaatgttccttcgggccccggagcatagttcccctcacagatttgcatttcccaagctttcagttccgagggtggaatcatgtccacctggggggctataaagaacaccgtttctggggctggggtaattagttgggatgatagcaagtttctgagcaattgagatttgccacatccggtggggccataaatgattccgattacaggttgcagttggtagtttagggaacggcaactgccgtcttctcgaagcaagggggccacctcgttcatcatttcccttacatgcatattttcccgcaccaaatccattaggaggcgctctcctcctagtgatagaagttcttgtagtgaggaaaagtttttcagcggttttagaccgtcagccatgggcattttggagagagtctgttgcaaaagttctagtctgttccacagttcagtgatgtgttctatggcatctcgatccagcagacctcctcgtttcgcgggtttggacggctcctggagtagggtatgagacgatgggcgtccagcgctgccagggttcggtccttccagggtctcaaagttcgggtcagggttgtttccgtcacagtgaaggggtgtgcgcctgcttgggcgcttgccagggtgcgcttcagactcatcctgctggtcgaaaacttgtgccgcttggcgccctgtatgtcggccaagtagcagtttaccatgagttcgtagttgagcgcctcggctgcgtggcccttggcgcggagcttacctttggaagttttcttgcataccgggcagtataggcatttcagcgcatacagcttgggcgcaaggaaaatggattctggggagtatgcatccgcgccgcaggaggcgcaaacagtttcacattccaccagccaggttaaatccggttcattggggtcaaaaacaagttttccgccatattttttgatgcgtttcttacctttggtctccatgagttcgtgtcctcgttgagtgacaaacaggctgtccgtgtccccgtagactgattttacaggcctcttttccagtggagtgcctcggtcttcttcgtataggaactctgaccactctgatacaaaggcgcgcgtccaggccagcacaaaggaggctatgtgggaggggtagcgatcgttgtcaaccagggggtccaccttttccaaagtatgcaaacacatgtcactctcttcaacatccaggaatgtgattggcttgtaggtgtatttcacgtgacctggggtcccagctgggggggtataaaagggggcggttctctgctcttcctcactgtcttccggatcgctgtccaggaacgtcagctgttggggtaggtattccctctcgaaggcgggcatgacctctgcactcaggttgtcagtttctaagaacgaggaggatttgatattgacagtgccgcttgagatgcctttcatgaggttttcgtccatttggtcagaaaacacaatttttttattgtcaagtttggtggcaaatgatccatacagggcgttggataaaagtttggcaatggatcgcatggtttggttcttttccttgtccgcgcgctctttggcagcgatgttgagttggacatattcgcgtgccaggcacttccattcggggaagatagttgtcaattcatctggcacaattctcacttgccaccctcggttatgcaaggtaattaaatccacactggtggccacctcgcctcgaaggggttcgttggtccagcagagcctacctcctttcctagaacagaaaggtggaagtgggtctagcataagttcatcgggagggtctgcatccatggtaaagattccaggaagtaaatccttatcaaaatagctgatgggagtggggtcatctaaggccatttgccattctcgagctgccagtgcgcgctcatatgggttaaggggactgccccagggcatgggatgggtgagtgcagaggcatacatgccacagatgtcatagacgtagatgggatcctcaaagatgcctatgtaggttggatagcatcgcccccctctgatacttgctcgcacatagtcatatagttcatgtgacggcgctagcagccccggacccaagttggtgcgattgggtttttctgttctgtagacaatctggcgaaagatggcgtgagaattggaagagatggtgggtctttgaaaaatgttgaagtgggcatgaggtagacctacagagtctctgataaagtgggcataagattcttcaagcttggttaccagttgggcggtgacaagtacgtccagggcgcagtagtcaagtgtttcttgaatgatgtcataacctggttggtttttcttttcccacagttcgcggttgagaaggtattcttcgcgatccttccagtactcttctagcggaaacccgtctttgtctgcacggtaagatcctagcatgtagaactgattaactgccttgtaagggcagcagcccttctctacgggtagagagtatgcttgagcagcttttcgtagcgaagcgtgagtaagggcgaaggtgtctctaaccatgactttgacaaattggtatttaaagtccatgtcgtcacaggctccctgttcccagagttggaagtctacccgtttcttgtaggcggggttgggcaaagcgaaagtaacatcgttgaagagaatcttaccggctctgggcataaaattgcgagtgatgcgaaaaggctgtggtacttccgctcgattgttgatcacctgggcagctaggacgatctcgtcgaagccgttgatgttgtgtcctacaatgtataattctatgaaacgcggcgtgcctctgacgtgaggtagcttattgagctcatcaaaggttaggtctgtagggtcagataaggcgtagtgttcaagggcccattcgtgcagatgaggatttgcatgtaggaatgatgaccaaagatccaccgccagtgctgtttgtaactggtcccgatactgacgaaaatgctggccaattgccattttttctggagtgacacagtagaaggttccgggatcttgttgccatcgatcccacttaagtttaatggctagatcgtgggccatgttgacgagacgctcttctcctgagagtttcatgaccagcatgaaaggaactagttgtttgccaaaggaccccatccaggtgtaagtttccacatcgtaggtcaggaagagtctttctgtgcgaggatgagagccgattgggaaaaactggatttcctgccaccagttggaggattggctgttgatgtgatggaagtagaagtttctgcggcgcgccgagcattcgtgtttgtgcttgtacagacggccgcagtagtcgcagcgttgcacgggttgtatctcgtgaatgagctgtacctggcttcccttgacgagaaatttcagtgggaagccgaggcctggcgattgtatctcgtgctcttctatattcgctgtattggcctgttcatcttctgtttcgatggtggtcatgctgacgagcccccgcgggaggcaagtccagacctcggcgcgggaggggcggagctgaaggacgagagcgcgcaggctggagctgtccagagtcctgagacgctgcggactcaggttagtaggtagggacagaagattaacttgcatgatcttttccagggcgtgcgggaggtttagatggtacttgatttccacaggttcgtttgtagagacgtcaatggcttgcagggttccgtgtcctttgggtgccactaccgtacctttgttttttcttttgatcggtggtggctctcttgcttcttgcatgcttaaaagcggtgacggggacgcgcgccgggcggcagcggttgttccggacccgggggcatggctggtagtggcacgtcggcgccgcgcacgggcaggttctggtactgcgctctgagaagacttgcgtgcgccaccacgcgtcgattgacgtcttgtatctgacgtctttgggtgaaagctaccggccccgtgagcttgaacctgaaagagagttcaacagaatcaatttcggtatcgttaacggcagcttgtctcagtatttcttgtacgtcaccagagttgtcctggtaggcgatctccgccatgaactgctcgatttcttcctcctgaagatctccgcgacccgctctctcgacggtggccgcgaggtcattggagatacggcccatgagttgggagaatgcattcatgcccgcctcgttccagacgcggctgtaaaccacggccccctcggagtctcttgcgcgcatcaccacctgagcgaggttaagctccacgtgtctggtgaagaccgcatagttgcataggcgctgaaaaaggtagttgagtgtggtggcgatgtgttcggcgacaaagaaatacatgatccatcgtctcagcggcatttcgctgacatcgcccagagcttccaagcgctccatggcctcgtagaagtccacggcaaaattaaaaaactgggagtttcgcgcggacacggtcaattcctcctcgagaagacggatgagttcggctatggtggcccgtacttcgcgttcgaaggctcccggcatctcttcttcctcttctatctcttcttccactaacatctcttcttcgtcttcaggcgggggcggagggggcacgcggcgacgtcgacggcgcacgggcaaacggtcgatgaatcgttcaatgacctctccgcggcggcggcgcatggtttcagtgacggcgcggccgttctcgcgcggtcgcagagtaaaaacaccgccgcgcatctccttaaagtggtgactgggaggttctccgtttgggagggaaagggcgctgattatacattttattaattggcccgtagggactgcgcgcagagatctaatcgtgtcaagatccacgggatctgaaaacctttcaacgaaagcgtctaaccagtcacagtcacaaggtaggctgagtacggcttcttgtgggcgggggtggttatgtgttcggtctgggtcttctattccttcttcatctcgggaaggtgagacgatgctgctggtgatgaaattaaagtaggcagttctaagacggcggatggtggcgaggagcaccaggtctttgggtccggcttgctggatacgcaggcgattggccattccccaagcattatcctgacatctagccagatctttgtagtagtcttgcatgagccgttctacgggcacttcttcttcacccgttctgccatgcatacgtgtgagtccaaacccgcgcattggttggaccagtgccaagtcagctacaactctttcggcgaggatggcttgctgtacttgggtgagggtggcttgaaagtcatcaaaatccacgaagcggtggtaagccccggtattgatggtgtaagcacagttggccatgactgaccagttaactgtttggtgaccatggcgcacgagctcggtgtatttaaggcgcgaataggcgcgggtgtcaaaaatgtaatcgttgcaggtgcgcaccagatactggtaccctataagaaaatgcggtggtggttggcggtagagaggccattgttctgtagctggagcgccgggggcgaggtcttccaacataaggcggtgatagccgtagatgtacctggacatccaggtgattcctgcggcggtagtggaagcccgaggaaactcgcgtacgcggttccaaatgttgcgtagcggcatgaagtagttcattgtaggcacggtttgaccagtgaggcgcgcgcagtcattgatgctctatagacacgaagaaaatgaaagcgttcagcgactcgactctgtagcctggaggaacgtgaacgggttgggtcgcggtgtaccccggttcaagacttgtactcgagccggccggagccgcggctaacgtggtattggcactcccgtctcgacccagcctacaaaaatccaggatacggaatcgagtcgttttgctggttgctgaatggcagggaagtgagtcctatttttttttttgccgctcagatgcatcccgtgctgcgacagatgcgtccccaacaacagcccccctcgcagcagcagcaaccacaaaaggctgtccctgcaactactgcaactgccgccgtgagcggtgcgggacagcccgcctatgatctggacttggaagagggcgaaggactggcacgtctaggtgcgccctcgcccgagcggcatccgcgagttcaactgaaaaaagattctcgcgaggcgtatgtgccccaacagaacctatttagagacagaagcggcgaggagccggaggagatgcgagcttcccgctttaacgcgggtcgtgagctgcgtcacggtttggaccgaagacgagtgttgcgggacgaggatttcgaagttgatgaagtgacagggatcagtcctgccagggcacacgtggctgcagccaaccttgtatcggcttacgagcagacagtaaaggaagagcgtaacttccaaaagtcttttaataatcatgtgcgaaccctgattgcccgcgaagaagttactcttggtttgatgcatttgtgggatttgatggaagctatcattcagaaccctactagcaaacctctgaccgcacagctgtttctggtggtgcaacacagcagagacaacgaggctttcagagaggcactgctcaacatcactgaacccgaggggagatggttgtatgatcttatcaacattctacagagtatcatagtgcaggagcggagcctgggcctggccgaaaaggtggctgccatcaattactcggttttaagtttgggaaaatattacgctcgcaagatctacaagactccatacgttcccatagacaaggaggtgaagatagatgggttctacatgcgtatgacgctcaaggtcttgaccctgagcgatgatcttggggtgtaccgcaatgacagaatgcatcgcgccgttagcgccagtaggaggcgcgagttaagcgacagggaactgatgcacagtttgcaaagagctctgactggagctggaacagagggtgagaattactttgacatgggagctgacttgcagtggcagcctagtcgcagggctctgagcgccgcgacggcaggatgtgagcttccttacatagaagaggcggatgaaggcgaggaggaagagggcgagtacttggaagactgatggcacaacccgtgttttttgctagatggaacagcaagcaccggatcccgcaacgcgggcggcgctgcagagccagccgtccggcattaactcctcggacgattggacccaggccatgcaacgtatcatggcgttgacgactcgcaaccccgaagcctttagacagcaaccccaggccaaccgtctatcggccatcatggaagctgtagtgccttcccgctctaatcccactcatgagaaggtcctggccattgtaaacgcgttggtggagaacaaagctattcgtccagatgaggccggactggtatacaacgctcttttagaacgcgtggctcgctacaacagtagcaatgtgcaaaccaatttggaccgtatgataacagatgtacgcgaagccgtgtctcagcgtgaaaggttccagcgcgatgccaaccttggttcgctggtggcgttaaatgcttttttgagtactcagcctgctaatgtgccgcgtggtcaacaggattatactaactttttgagtgcgttgagactgatggtatctgaagtacctcagagcgaagtgtatcagtccggacctgactacttctttcagactagcagacagggtttgcagacggtaaatctgagccaagcttttaaaaaccttaaaggtttgtggggagtgcatgccccggtaggagaaagagcaaccgtgtctagcttgttaactccaaactcccgcctattactactgttggtagctcctttcaccgacagcggcagcatcgaccgtaattcctatttgggttacctactaaacctgtatcgcgaagccatagggcaaagccaggtggacgagcagacctatcaagaaattacccaagtcagtcgcgctttgggtcaggaagacactggcagtttggaagccactctgaacttcttgcttaccaatcggtctcagaagatccctcctcaatatgctcttactgcggaggaggagaggatccttagatatgtgcagcagagcgtgggattgtttctgatgcaagagggggcaactccgactgcggcattggacatgacagcgcgaaatatggagcccagcatgtatgccagtaaccggcctttcattaacaaactgctggactacttgcacagagctgccgctatgaactctgattattttaccaatgccatcctaaacccgcactggctgcccccacctggtttctacacgggcgaatatgacatgcccgaccctaatgacgggtttctgtgggacgacgtggacagtaatgttttttcacctctttttgatcatcgcacgtggaaaaaggaaggcggcgatagaatgcattcttctgcatcgctgtccggggtcatgggtgctaccgcggctgagcccgagtctgcaagtccttttcctagtctacccttttctctacacagtgtacgtagcagcgaagtgggtagaataagtcgcccgagtttaatgggcgaagaggaatacctaaacgattccttgctcagaccggcgagagaaaaaaatttcccaaacaatggaatagaaagtttggtggataagatgagtagatggaagacttatgctcaggatcacagagacgagcctgggatcatggggactacaagtagagcgagccgtagacgccagcgtcatgacagacagaggggtcttgtgtgggaagatgaggattcggccgatgatagcagcgtgttggacttgggtgggagaggaaggggcaacccgtttgctcatttgcgccctcgcttgggtggtatgttgtaaaaaaaaaataaaaaggaaaactcaccaaggccatggcgacgagcgtacgttcgttcttctttattatttgtgtctagtataatgaggcgagtcgtgctaggcggagcggtggtgtatccggagggtcctcctccttcgtacgagagcgtgatgcagcagcagcaggcgacggcggtgatgcaatccccactggaggctccctttgtacctccgcgatacctggcacctacggagggcagaaacagcattcgttactcggaactggcacctcagtacgataccaccaggttgtatctggtggacaacaagtcggcggacattgcttctctgaactatcagaatgaccacagcaacttcttgaccacggtggtgcagaacaatgactttacccctacggaagccagtacccagaccattaactttgatgaacgatcgcggtggggcggtcagctaaagaccatcatgcatactaacatgcccaacgtaaacgagtatatgtttagtaacaacttcaaagcgcgtgtgatggtgtccagaaaacctcccgaaggtgctgcagttggggatacatatgatcacaagcaggatattttggaatatgagtggttcgagtttactttgccagaaggcaacttttcagttactatgaccattgatttgatgaacaatgccatcatagataactacttgaaagtgggcagacagaatggagtgcttgaaagtgacattggtgttaagttcgacaccaggaacttcaagctgggatgggatcccgaaaccaagttgattatgcctggagtgtatacgtatgaagcctttcatcctgacattgtcttactgcctggctgtggagtggactttaccgaaagtcgtttgagcaaccttcttggtatcagaaaaaaacagccatttcaagagggttttaagattttgtatgaagatttagaaggaggtaatattccggccctcttggatgtagatgcctatgagaacagtaagaaagaacaaaaagccaaaatagaagctgctgcggaagctaaggcaaacatagttgccagcgactttacaagggttgctaacgctggagaggtcagaggagacaattttgcaccaacacctgttccgactgcagaatcattattggccgatgtaactggaggaacggacgtgaaactcactattcaacctgtagaaaaagatagtaagaatagaagctataatgtgttggaagataaaatcaacacagcctatcgcagttggtacctttcgtacaattatggcgatcccgaaaaaggagtgcgttcctggacattgctcaccacctcagatgtcacctgcggagcagagcaggtctactggtcgcttccagacatgatgcaggatcctgtcactttccgctccactagacaagtcagcaactaccctgtggtgggtgcagagcttatgcccgtcttctcaaagagcttctacaacgaacaagctgtgtactcccagcagctccgccagtccacctcgcttacgcacgtcttcaaccgctttcctgagaaccagattttaatccgtccgccggcgcccaccattaccaccgtcagtgaaaacgttcctgctctcacagatcacgggaccctgccgttgcgcagcagtatccggggagtccaacgtgtgaccgttactgacgccagacgccgcacctgtccctacgtgtacaaggcactgggcatagtcgcaccgcgcgtcctttcaagccgcactttctaaaaaaatgtccattcttatctcgcccagtaataacaccggttggggtctgcgcgctccaagcaagatgtacggaggcgcacgcaaacgttctacccaacatcccgtgcgtgttcgcggtcattttcgcgctccatggggtgccctcaagggccgcactcgcgttcgaaccaccgtcgatgatgtaatcgatgaggtggttgccgacgcccgtaattatactcctactgcgcctacatctactgtggatgcagttattgacagtgtagtggctgacgctcgcaactatgctcgacgtaagagccggcgaaggcgcattgccagacgccaccgagctaccactgccatgcgagccgcaagagctctgctacgaagagctagacgcgtgggacgaagagccatgcttagggcggccagacgtgcagcttcgggcgccagcgccggcaggtcccgcaggcaagcagccgctgtcgcagcggcgactattgccgacatggcccaaacgcgaagaggcaatgtatactgggtgcgtgacgctgccaccggtcaacgtgtacccgtgcgcacccgtccccctcgcacttagaagatactgagcagtctccgatgttgtgtcccagcggcgaggatgtccaagcgcaaatacaaggaagaaatgctgcaggttatcgcacctgaagtctacggccaaccgctgaaggatgaaaaaaaaccccgcaaaatcaagcgggctaaaaaggacaaaaaagaagaggaagatggcgatgatgggctggcggagtttgtgcgcgagtttgccccacggcgacgcgtgcaatggcgtggacgcaaagttcgacatttgttgagacctggaacttcggtggtctttacacccggcgagcgttcaagcgctacttttaagcgttcctatgatgaggtgtacggggatgatgatattcttgagcaggcggctgaccgattaggcgagtttgcttatggcaagcgtagtagaataaatcccaaggatgagacagtgtccatacccttggatcatggaaatcccacccctagtcttaaaccggtcactttgcagcaagtgttacccgtaactccgcgaacaggtgttaaacgcgaaggtgaagatttgtatcccactatgcaactaatggtacccaaacgccaaaagttggaggacgttttggagaaagtaaaagtggatccagatattcaacctgaggttaaagtgagacccattaagcaggtagcgcctggtctgggagtacaaactgtagacattaagattcccactgaaagtatggaagtgcaaactgaacccgcaaagcctactgccacctccactgaagtgcaaacggatccatggatgccgatgcctattacaactgacgccgccggtcccactcgaagatcccgacgaaagtacggtccagcaagtctgttgatgcccaactatgttgtacacccatctattattcctactcctggttaccgaggcactcgctactatcgcagccgaaacagtacctcccgccgtcgccgcaagacacctgcaaatcgcagtcgtcgccgtagacgcacaagcaaaccgactcccggcgccctggtgcggcaagtgtaccgcaatagtagtgcggaacctttgacactgccgcgtgcgcgttaccatccaagtatcatcacttaatcaatgttgccgctgcctccttgcagatatggccctcacttgtcgccttcgcgttcccatcactggttaccgaggaagaaattcgcgccgtagaagagggatgttggggcgcggaatgcgacgctacaggcgacggcgtgctatccgcaagcaattgcggggtggttttttgccagccttaattccaattatcgctgctgcaattggcgcgataccaggcatagcttccgtggcggttcaggcctcgcaacgacattgacattggaaaaaaaagtataaataaaaaaaaaaatacaatggactctgacactcctggtcctgtgactatgttttcttagagatggaaaacatcaatttttcatccttggctccgcgacacggcacgaagccgtacatgggcacctggagcgacatcggcacgagccaactgaacgggggcgccttcaattggagcagtatctggagcgggcttaaaaattttggctcaaccataaaaacatacgggaacaaagcttggaacagcagtacaggacaggcgcttagaaataaacttaaagaccagaactttcaacaaaaagtagtcgatgggatagcttccggcatcaatggagtggtagatttggctaatcaggctgtgcagaaaaagataaacagtcgtttggacccgccgccagcaaccccaggtgaaatacaagtggaggaagaaattcctccgccagaaaaacgaggcgacaagcgtccgcgtcccgatttggaagagacgctggtgacgcgcgtagatgaaccgccttcttatgaggaagcaacgaagcttggaatgcccaccactagaccgatagcccctatggctaccggggtaatgaaaccttctcagttgcatcgacccgtcactttggatttgccccctccccctgctgctactgctgtacccgcttctaagcctgtcgctgccccgaaaccagtcgccgtagccaggtcacgtcccgggggcgctcctcgtccaaatgcgcactggcaaaatactctgaacagcatcgtgggtctaggcgtgcaaagtgtaaaacgccgtcgctgcttttaattaaatatggagtagcgcttaacttgcctatctgtgtatatgtgtcattacacgccgtcacagcagcagaggaaaaaaggaagaggtcgtgcgtcgacgctgagttactttcaagatggccaccccatcgatgctgccccagtgggcatacatgcacatcgccggacaggatgcttcggagtacctgagtccgggtctggtgcagttcgcccgcgccacagacacctacttcaatctgggaaataagtttagaaatcccaccgtagcgccaacccacgatgtgaccaccgaccgtagccagcggctcatgttgcgcttcgtgcccgttgaccgggaggacaatacatactcttacaaagtgcggtacaccctggccgtgggcgacaacagagtgctggatatggccagcacgttctttgacattaggggcgtgttggacagaggtcccagtttcaaaccctattctggtacggcttacaactctctggctcctaaaggcgctccaaatgcatctcagtggttggataaaggggttgaaactactgaagaacggcaaaatgaagacggggaaaatgacgaaaaagctacatacacttttggcaatgccccagtaaaagccgatgctgacattacaaaagacggactaccaataggtttggaagtcccagctgaaggtgaccctaaacctatctacgctaataagctttaccaaccagaaccccaggtgggacaggaatcgtggactgatacagatggcactgaagaaaaatacggaggcagagtacttaaaccggacactaaaatgaaaccgtgctatgggtcttttgctaaacctactaatgtgaaaggcggacaggcaaaagtgaaaacagaagaaggcaacaacattgaatatgacattgacatgaacttttttgacttaagatcacaaaaacaaggtcttaaacctaagattgtaatgtatgcagaaaatgtggacctggaatctccagatactcatgttgtgtacaaacctgaagtttcagatgctagttcaaatgctaatcttggacagcagtctatgcccaacagacccaactacattggcttcagagataattttattggtcttatgtactataacagtactggtaacatgggggtgctggctggccaagcatctcagttgaatgcagtggttgacttgcaggacagaaacacagaactgtcttaccaactcttgcttgactccctgggcgatagaaccagatactttagcatgtggaatcaggctgttgacagttatgatcccgatgtgcgtgttattgaaaatcatggtgtggaagatgaacttcccaactactgttttccactggacggcatcggtccgcgaacagatagttacaaggagattcagttaaatggagaccaagcttggaaagatgtaaatccaaatggtatcagtgaacttgttaagggaaatccatttgccatggaaattaaccttcaagccaatctatggcgaagtttcctttattccaatgtggctctgtatctcccagactcgtacaaatacaccccgtccaatgtcactcttccagaaaacaaaaacacctacgactacatgaacgggcgggtggtgccgccatctctagtagacacctatgtgaacattggcgccaggtggtctctggatgctatggacaatgtcaacccattcaaccaccaccgtaacgctggcttgcgttaccgatccatgcttttgggtaacggacgttatgtgcctttccacatacaagtgcctcaaaaattcttcgctgtcaaaaacctgctgcttctcccaggctcctacacttatgagtggaacttcaggaaggatgtgaacatggtgctacagagttccctcggtaacgacctacgggtagatggcgccagcatcagtttcacgagcatcaacctctatgctacctttttccccatggctcacaacaccgcttccacccttgaagccatgctgcggaatgacaccaatgatcagtcattcaacgactatctatctgcagctaacatgctctatcccattcctgccaatgcaaccaatattcccatttccattccttctcgcaactgggcggctttcagaggctggtcatttaccagactcaaaaccaaagaaactccctctttggggtctggatttgacccctactttgtctattctggttctattccctacctggatggtaccttctacctgaaccacacttttaagaaggtttccatcatgtttgactcttcagtgagctggcctggaaatgacaggttactatctcccaacgaatttgaaataaagcgcactgtggatggcgaaggctacaatgtagcccaatgcaacatgaccaaagactggttcttggtacagatgctcgccaactacaacataggctatcagggcttctacattccagaaggatacaaagatcgcatgtattcatttttcagaaacttccagcccatgagcaggcaggtggttgatgaggtcaattacaaagacttcaaggccgtcgccataccctaccaacacaacaactctggctttgtgggttacatggctccgaccatgcgccaaggtcaaccctatcccgctaactatccctatccactcattggaacaactgccgtaaatagtgttacgcagaaaaagttcttgtgtgacagaaccatgtggcgcataccgttctcgagcaacttcatgtctatgggggcccttacagacttgggacagaacatgctttatgccaactcagctcatgctctggacatgacctttgaggtggatcccatggatgagcccaccctgctttatcttctcttcgaagttttcgacgtggtcagagtgcatcagccacatcgcggcatcatcgagacagtctacctgcgtacaccgttctcggccggtaacgctaccacgtaaaaagcttcttgcttcttgcaaacagcagctgcaaccatggcctgcggatcccaaaacggctccagcgagcaagagctcagagccattgtccaagacctgggttgcggaccctattttttgggaacctacgataagcgcttcccggggttcatggcccccgataagctcgcctgtgccattgtaaacacggccggacgtgagacggggggagagcactggttggctttcggttggaacccacgttctaacacctgctacctttttgatccttttggattctcggatgatcgtcttaaacagatttaccagtttgaatatgagggtctcctgcgccgcagcgctcttgctaccaaggaccgctgtattacgctggaaaaatctacccagaccgtgcagggcccccgttctgccgcctgcggacttttctgctgcatgttccttcatgcctttgtgcactggcctgaccgtcccatggacggaaaccccaccatgaaattgctgactggagtgccaaacaacatgcttcattctcctaaagtccagcccaccctgtgtgacaatcaaaaagcactctaccattttctcaatacccattcgccttattttcgctcccatcgtacacacatcgaaagggccactgcgttcgaccgtatggatgtgcaataatgactcatgtaaacaacgtgttgaataaacagcactttattttttacacgtatcaaggctctggattacttatttatttacaagtcgaatgggttctgacgagaatcagaatgacccgcgggcagtgatacgttgcggaactgatacttgggttgccacttgaattcgggaatcaccaacttgggaaccggtatatcgggtaggatgtcactccacagctttctggtcagctgcaaagctcccagcaggtcaggagccgaaatcttgaaatcacaattaggaccagtgctctgagcgcgagagttgcggtacaccggattgcagcactgaaacaccatcagcgacggatgtctcacgcttgccagcacggtgggatctgcaatcatgcccacatccagatcttcagcattggcaatgctgaacggggtcatcttgcaggtctgcctacccatggcgggcacccaattaggcttgtggttgcaatcgcagtgcagggggattagtatcatcttggcctgatcctgtctgattcctggatacacggctctcatgaaagcatcatattgcttgaaagcctgctgggctttactaccctcggtatagaacatcccgcaggacctgctcgaaaactggttagctgcgcagccggcatcattcacacagcagcgggcgtcattgttggctatttgcaccacacttctgccccagcggttttgggtgattttggttcgctcgggattctccttcaaggctcgttgtccattctcgctggccacatccatctcgataatctgctccttctgaatcataatagtgccatgcaggcacttcagcttgccctcataatcattgcagccatgaggccacaacgcacagcctgtacattcccaattatggtgggcgatctgagaaaaagaatgtatcattccctgcagaaatcttcccatcatcgtgctcagtgtcttgtgactagtgaaagttaactggatgcctcggtgctcctcgtttacgtactggtgacagatgcgcttgtattgttcgtgctgctcaggcattagtttaaaagaggttctaagttcgttatccagcctgtacttctccatcagtacacacatcacttccatgcccttctcccaagcagacaccaggggcaagctaatcggattcttaacagtacaggcagcagctcctttagccagaggatcatctttggcaatcttttcaatgcttcttttgccatccttctcaacgatgcgcacgggcgggtagctgaaacctactgctacaagctgcgcctcttctctttcttcttcgctgtcttgactgatgtcttgcatgggaacatgtttggtcttccttggcttctttttggggggtatcgggggaggaggactgtcgctccgttccggagacagggaggattgtgaagtttcgctcaccattaccaactgactgtcggtagaagaacctgaccccacacggcgacaggtgtttctcttcgggggcagaggtggaggcgattgcgaagggctgcggtccgacctggaaggcggatgactggcagaaccccttccgcgttcgggggtgtgctccctgtggcggtcgcttaactgatttccttcgcggctggccattgtgttctcctaggcagagaaacaacagacatggaaactcagccattgctgtcaacatcgccacaagtgccatcacatctcgtcgtcagcgacgaggaaaaggagcagagcttaaccattccaccgcccagtcctgccaccacctctaccctagaagataaggaggtcgacgcatctcatgacatgcagaataaaaaagcgaaagagtctgaaacagacatcgagcaagacccgggctatgtgacaccggtggaacacgaggaagagttgaaacgctttctagagagagaggatgaaaactgcccaaaacagcaagcggataactatcaccaagatgctggaaatagggatcagaacaccgactacctcatagggcttgacggggaagacgcgctccttaaacatctagcaagacagtcactcatagtcaaggatgcattattggacagaactgaagtgcccatcagtgtggaagagctcagccgcgcctacgagcttaaccttttttcacctcgtactccccccaaacgccagccaaacggcacctgcgagccaaatcctcgcttaaacttttatccagcttttgctgtgccagaagtactcgctacttatcacatcttttttaaaaatcaaaaaattccagtctcctgccgcgctaatcgcacccgcgctgacgccctacttaatctgggacctggttcacgcttacctgatatagcttccttggaagaggttccaaaaatcttcgagggtctgggcaataatgagactcgggccgcaaatgctctgcaaaagggagaaaatggcatggatgagcatcacagcgttctggtggaattggagggcgataatgccagactcgcagtactcaagcgaagcgtcgaggtcacacactttgcataccccgctgtcaacctgccccctaaagttatgacggcggtcatggaccagttactcattaagcgcgcaagtcccctttcagaagacatgcatgacccagacgcctgtgatgagggtaaaccagtggtcagtgatgagcagctaacccgatggctggacaccgactctccccgggatttggaagagcgtcgcaagcttatgatggccgtagtgctggttaccgtagaactagagtgtctccggcgtttctttaccgattcagaaaccttgcgcaaactcgaagagaatctgcactacacttttagacacggctttgtgcggcaggcgtgcaagatatctaacgtggaactcaccaacctggtttcctacatgggtattctgcatgagaatcgtctaggacaaagcgtgctgcacagcacccttaagggggaagcccgccgtgattacatccgcgattgtgtctatctctacctgtgccacacgtggcaaaccggcatgggtgtatggcagcaatgtttagaagaacagaacttgaaagagcttaacaagctcttacagaaatctcttaaggttctgtggacagggttcgacgagcgcaccgtcgcttccgacctggcagacctcatcttcccagagcgtcttagggttactttgcgaaacggactgcctgactttatgagccagagcatgcttaacaattttcgctctttcatcctggaacgctccggtatcctgcccgccacctgctgcgcactgccctccgactttgtgcctctcacctaccgcgagtgccccccgccgctatggagtcactgctacctgttccgtctggccaactacctctcctaccactcggatgtgatcgaggatgtgagcggagacggcttgctggagtgtcactgccgctgcaatctgtgcacgccccaccggtccctagcttgcaacccccagttgatgagcgaaacccagataataggcacctttgaactgcaaggccccagcagccaaggcgatgggtcttctcctgggcaaagtttaaaactgaccccgggactgtggacctctgcctacttgcgcaagtttgccccggaagattaccacccctatgaaatcaagttctatgaggaccaatcacagcctccaaaggccgaactttcggcctgcgtcatcacccagggggcaattctagcccaattgcaagccatccaaaaatcccgccaagaatttctactgaaaaagggtaagggggtctaccttgacccccagaccggcgaggaactcaacacaaggttccctcaggatgtcccaacgacgagaaagcaagaagttgaaggtgcagccgccgcccccagaagatatggaggaagattgggacagtcaggcagaggaagcggaggaggacagtctggaggacagtctggaggaagacagtttggaggaggaaaacgaggaggcagaggaggtggaagaagtaaccgccgacaaacagttatccccggctgcggagacaagcaacagcgctatcatctccgctccgagtcgaggaacgcggcggcgtcccagcagtagatgggacgagaccggacgcttcccgaacccaaccaccgcttccaagaccggtaagaaggatcggcagggatacaagtcctggcgggggcataagaatgccatcatctcctgcttgcatgagtgcgggggaaacatatccttcacgcgacgctacttgctattccaccatggggtgaactttccacgcaatgttttgcattactaccgtcacctccacagcccctactatagccagcaaatcccggcaatctcgacagaaaaagacagcggcggcgacctccaacagaaaaccagcagcggcagttaaaaaatacacaacaagtgcagcaacaggaggattaaagattacagccaacgagccagcgcaaacccgagagctaagaaatcggatctttccaaccctgtatgccatcttccagcagagtcggggccaagagcaggaactgaaaataaaaaaccgatctttgcgttcgctcaccagaagttgtttgtatcacaagagcgaagatcaacttcagcgcactcttgaggacgccgaggctctcttcaacaagtactgcgcgctgactcttaaagagtaggcagcgaccgcgcttattcaaaaaaggcgggaattacatcatcctcgtcatgagtaaagaaattcccacgccttacatgtggagttatcagccccaaatgggattggcggcaggcgcctcccaggactactccacccgcatgaattggctcagcgccgggccttctatgatttctcgagttaatgatatacgcgcctaccgaaaccaaatacttttggaacagtcagctcttaccaccacgccccgccaacaccttaatcccagaaattggcccgccgccctagtataccaggaaagtcccgctcccaccactgtattacttcctcgagacgcccaggccgaagtccaaatgactaatgcaggtgcgcagttagctggcggctccaccctatgtcgtcacaggcctcggcataatataaaacgcctgatgattagaggccgaggtattcagcttaacgacgagtcggtgagctctccgcttggtctacgaccagacggaatctttcaaattgccggctgcgggagatcttccttcacccctcgtcagactgttttgactttggaaagttcgtcttcgcaaccccgctcgggcggaatcgggaccgttcaatttgtggaggagtttactccctctgtctacttcaaccctttctccggatctcctgggcactacccggacgagttcataccgaactttgacgcaattagcgagtcagtggacggctacgattgatgtctggtgacgcggctgagctatctcggctgcgacatctagaccactgccgccgctttcgctgttttgcccgggaactcattgagttcatttacttcgaactccccaaggatcaccctcaaggtccggcccacggagtgcggattactatcgaaggtaaaataaactctcgcctgcatcgaattttctcccagcggcccgtgctgatcgagcgagaccagggaaacaccacggtttctatctactgcatttgtaatcacccaggattgcatgaaagcctttgctgtcttatgtgtactgagtttaataaaaactgaattaagactctcctacggactgccgcttcttcaacccggattttacaaccagaagaacgaaacttttcctctcatccaggactctgttaactttacctttcctacttacaaaccagaagctcaacgacaacaccgcttttccagaagcattttccctactaatactactttcaaaaccggaggtgagctccacagtctccccgcagaaaacccttgggtggaagcgggccttgtagtgctaggaattcttgcgggcgggcttgtgattattctttgctacctatacacaccttgcttcactttcctagtggtgttgtggtattggtttaaaaaatggggcccatactagtcttgcttgttttactttcgcttttgggaccgggttctgccaactacaatccatgtctagactttgacccagaaaactgcacacttacttttgcacccgacacaagccgcatctgtggagttcttattaagtgcggatgggaatgcaggtccgttgaaattacacacaataacaaaacctggaacaataccttatccaccacatgggagccaggagttcccgagtggtacactgtctctgtccgaggtcctgacggttccatccgcattagtaacaacacttttattttttctacaatgtgcgatctggccatgttcatgagcaaacagtattctctatggcctcccagcaaggacaacattgtaacgttctccattgcttattgcttgtgcgcttgccttcttactgctttactgtgcgtatgcatacacctgcttgtaaccactcgtatcaaaaacgccaataacaaagaaaaaatgccttaacctctttctgtttacagacatggcttttcttacagctctcatacttgtcagcattgtcactgccgctcacggacaaacagtcgtctctatccctctaggtcataattacactctcataggacccccaatcacttcagaggtcatctggaccaaactgggaagcgttgattactttgatataatctgtaacaaaacaaaaccaataatagtaacctgcaacatacaaaatcttacattaattaatgttagcaaagtttacagcggttactattatggttatgacagatacagtagtcaatatagaaattacttggttcgtgttacccagtccaaaaccacgaaaatgccaaatatggcagaaattcgatccgatgacaattctctagaaacttttacatcttccaccacacctgacgaaaaaaatatcccagattcaatgattgcaattatcgcagcggtggcagtggtgatggcactaacagtaatatgcatgcttttatatgcttgtcgctacaaaaagtttcatcctaaaaaacaagatctcctactaaggcttaacatttaatttctttttacacagccatggtttccactaccacattccttatgcttactagtatagcaactctgacttctgctcgctcacacctcactgtaactataggctcaaactgcacactaaaaggacctcaaggtggtcatgtcttttggtggagaatatatgacaatggatggtttacaaaaccatgtgaccaacctggtagatttttctgcaacggcagagacctaaccattatcaacgtgacagcaaatgacaaaggcttctattatggaaccgactataaaagtagtttagattataacattattgtactgccatccaccactccagcgccccgcaaaactactttctctagcagcagtgccgctaacaatacaatttccaatccaacctttaccgcgcttttaaaacgcactgtgaataattctacaacaatttccacttcaacaatcagcatcatcgctgccgtgacaattggaatatctattcttgtttttaccataacctactacacctgctgctataaaaaagacgaacataaaggtgatccattacttagatttgatatttaatttgttctttttttttttatttacagtatggtgaacaccaatcatggtacctagaaatttcttcttcaccatactcatctgtgcttttaatgtttgcgctactttcacagcagtagccacagcaagcccagactgtataggagcatttgcttcctatgcactttttgcttttgtcacttgcatctgcgtatgtagcatagtctgcctggttattaattttttccaacttctagactggatccttgtgcgaattgcctacctgcgccaccatcccgaataccgcaaccaaaatatcgcggcacttcttagacttatctaaaaccatgcaggctatactaccaatatttttgcttctattgcttccctacgctgtctcaaccccagctacctatagtactccaccagaacaccttagaaaatgcaaattccaacaaccgtggtcatttcttgcttgctatcgagaaaaatctgaaattcccccaactttaataatgattgctggaataattaatgtaatctgttgcaccataatttcatttctgatataccccctatttgattttggctggaatgctcccaatgcacatgattattcccaagacccagaggaacacattcccctacataacatgcaacaaccaatagcgctaatagaatacgaaagtgaaccacaacccccactactccctgctattagttacttcaacctaaccggcggagatgactgaaacactcaccacctccaattccgccgaggatctgcttgatatggacggccgcgtctcagaacagcgactcgcccaactacgcatccgccagcagcaggaacgcgtggccaaagagctcagagatgtcatccaaattcaccaatgcaaaaaaggcatattctgtttggtaaaacaagccaaaatatcctacgagatcaccgctaccgaccatcgcctctcttacgagcttggcccccaacgacaaaaatttacctgcatggtgggaatcaaccccatagttatcacccaacaaagtggagatactaagggttgcattcactgctcctgcgattccatcgagtgcacctacaccctgctgaagaccctatgcggactaagagacctgctacccatgaattaaaaaaatgattaataaaaaatcacttacttaaaatcagcaataaggtctctattgaaattttctcccagcagcacctcacttccctcttcccaactctggtattctaaaccccgttcagcggcatactttctccatactttaaaggggatgtcaaattttagctcctctcctgtacccacaatcttcatctctttcttcccagatgaccaagagagtccggctcagtgactccttcaaccctgtctacccctatgaagatgaaagcacctcccaacacccctttataaacccagggtttatttccccaaatggcttcacccaaagcccagacggagttcttactttaaaatgtttaaccccgctaacaaccacaggcgggtctctacagctaaaagtgggagggggacttacagtagatgacactgatgggaccttacaagaaaacataggtgccaccacaccacttgttaagactgggcactctataggtttatccctaggagccggattgggaacagatgaaaataaactttgtaccaaattgggagaaggacttacattcaattcaaacaacatttgcattgatgacaatattaacaccctgtggacaggagttaaccccaccgaagccaactgtcaaatgatggactccagtgaatctaatgattgcaaattaattctaacactagttaaaactggagccctagtcactgcatttgtttatgttataggagtatctaacaattttaatatgctaactacatacagaaatataaattttactgcggagctgttttttgattctgcgggtaatttactaactagcctgtcatccctaaaaactccacttaatcataaatcaggacaaaacatggctactggtgccattactaatgctaaaagtttcatgcccagcacaactgcttatcctttcaataataattctagagaaaaagaaaactacatttacggaacttgtcactacacagctagtgatcacactgcttttcccattgacatatctgtcatgcttaaccaaagagcaataagagctgatacatcatattgtattcgtataacttggtcctggaacacaggagatgccccagaggggcaaacctctgctacaaccctagttacctccccatttaccttttactacatcagagaagacgactgacaaataaagtttaacttgtttatttgaaaatcaattcacaaactccgagtagttattttgcctcccccttcccatttaacagaatataccaatctctccccacgcacagctttaaacatttggataccattagagatagacatggttttagattccacattccaaacagtttcagagcgagccaatctggggtcagtgatagataaaaatccatcgggatagtcttttaaagcgctttcacagtccaactgatgcggatgcgactccggagtctggatcacggtcatctggaagaagaacgatgggaatcataatccgaaaacgggatcgggcgattgtgtctcatcaaacccacaagcagccgctgtctgcgtcgctccgtgcgactgctgtttatgggatcgggatccacagtgtcctgaagcatgattttaatagcccttaacattaactttctggtgcgatgcgcgcagcaacgcattcttatttcacttagattaatacagtaggtacagcacattatcacaatattgtttaataaaccataattaaaagcactccagccaaaactcatatctgatataatcgcccctgcatgaccatcataccaaagtttaatataaattaaatgacgttccctcaaaaacacactacccacatacatgatctcttttggcatgtgcatattaacaatctgtctgtaccatggacaacgttggttaatcatgcagcccaatataaccttccggaaccacactgccaacaccgctcccccagccatgcattgaagtgaaccctgctgattacaatgacaatgaagaatccaattctctcgaccgtgaatcacttgagaatgaaaaatatctatagtagcacaacatagacataaatgcatgcatcttctcataatttttaactcctcaggatttagaaacatatcccaaggaataggaagctcttgcagaacagtaaagctggcagaacaaggaagaccacgaacacaacttacactatgcatagtcatagtatcacaatctggcaacagcgggtggtcttcagtcatagaagctcgggtttcattttcctcacaacgtggtaactgggctctggtgtaaggatgatgtctggcgcatgatgtcgagcgtgcgcacaaccttgtcataatggagttgcttcctgacattctcgtattttgtatagcaaaacgcggccctggcagaacacactcttcttcgccttttatcctgccgcttagcgtgttccgtgtgatagttcaagtacagccacactcttaagttggtcaaaagaatgctggcttcagttgtaatcaaaactccatcacatctaatcgttctgaggaaatgatccacggtagcatatgcaaatcccaaccaagcaatgcaactggattgcgtttcaagcaggagaggagagggaagagacggaagaaccatgttaatttttattccaaacgatctcgcagtacttcaaattgtagatcgcgcagatggcatctgtcgcccccactgtgttggtgaaaaagcacagctagatcaaaagaaatgcgattttcaaggtgctcaacggtggcttccagcaaagcctccacgcgcacatccaagaacaaaagaataccaaaagaaggagcattttctaactcctcaatcatcatattacagtcctgcaccattcccagataattttcagctttccagccttggattattcgtgtcatttcttgtggtaaatccaatccacacattacaaacaggtcccggagggcgccctccaccaccattcttaaacacaccctcataatgacaaaatatcttgctcctgtgtcacctgtagcaaattgagaatggcaacatcaattgacatgccgttggctctaagttcttctctaagttctagttgtaaatactctttcatattatcaccaaactgcttagccagaagccccccgggaacaagagcaggacacgctacagtgcagtacaagcgcagacctccccaattggctccagcaaaaacaagattggaataagcatattgggaaccaccagtaatgtcatcaaagttgctggaaatataatcaggcagagtttgttgtaaaaattgaataaaagaaaaatttgccaaaaaaacattcaaaacctctgggatgcaaatgcaataagttaccgcgctgcgctccaacattgttagttttgaatgagtctgcaaaaaataaaaaaacaagcgtcatatcagagtagcctgacgaacaggtggataaatcagtctttccatcacaagacaagccacagggtctccagcccgaccctcgtaaaacctgtcatcgtgattaaacaacagcaccgaaagttcctcgcggtgaccagcatgaataattcttgatgaagcatacaatccaaacatgttagcatcagttaaagacaaaaaacagccaatatagcctctgggtataattatgcttaatcgtaaatatagcaaagccacccctcgcggatacaaagtaaaaggcacaggagaataaaaaatataattattcctttgctgctgttcaggcaacgtcgcccccggtccctctaaatacacatacaaagcctcatcagccatggcttaccagacaaagtacagcaggcacacaaagcacaagctctaaagtcactcaccaacctgtccacagtatatatacacaaaccctaaactgacgtaatggggctaaagtacacaaaatcccgccaaacccaacacacaccccgaaactgcgtcaccacaaaagtacagtttcacttccgcaatcccaacaagcggcacttcctctttctcacgggacgtcacatccgcttaacttgcaacctcattttcccacggccgcgccgccccttttagccgttaaccccacagccaattaccacacagcccacactttttaaaatcacctcatttacatattggcaccattccatctataaggtatattattgatgatg

SEQ ID NO: 213 - DNA, 35522 bp, Human adenovirus
  misc_feature 1..35522: note = Reference Ad16 Genome Sequence: GenBank accession no. AY601636 (SEQ ID NO: 213); Human adenovirus 21
  source 1..35522: mol_type = genomic DNA
cattatctataatataccttatagatggaatggtgccaacatgtaaatgaggtaatttaaaaaagtgcgcgctgtgtggtgattggctgcggggtgaacggctaaaaggggcgggcaatgctgggatgtgacgtaacttatgtgggaggagttatgttgcaagttatcgcggtaaaggtgacgtaaaacgaggtgtggtttggacacggaagtagacagttttcccacgtttactgacaggatatgaggtagttttgggcggatgcaagtgaaaattctccattttcgcgcgaaaactgaatgaggaagtgaatttctgagtcatttcgcggttatgacagggtggagtatttgccgagggccgagtagactttgaccgtttacgtggaggtttcgattaccgtgtttttcacctaaatttccgcgtacggtgtcaaagtcctgtgtttttacgtaggtgtcagctgatcactagggtatttaaacctgtcgagttccgtcaagaggccactcttgagtgccagcgagaagagttttctcctccgcgctgcgagtcagttttgcgctttgaaaatgagacacctgcgattcctgccacaggagattatctccagcgagaccgggatcgaaatactggagtttgtggtaaataccctgatgggagatgacccggaaccgccagtgcagcctttcgatccacctacgctgcacgatctgtatgatttagaggtagacgggcctgatgatcccaatgaggaagctgtaaatgggttttttactgattctatgctgctagctgccgatgaaggattggacataaaccctcctcctgagacccttgataccccaggggtggttgtggaaagcggcagaggtgggaaaaaattgcctgatctgggagcagctgaaatggacttgcgttgttatgaagagggttttcctccgagtgatgatgaagacggggaaactgaacagtccatccataccgcagtgaatgagggagtaaaagctgccagcgatgtttttaagttggactgtccggagctgcctggacatggctgtaagtcttgtgaatttcacaggaataacactggaatgaaagaactattgtgctcgctttgctatatgagaatgcactgccactttatttacagtaagtgtatttaagtgaaatttaaaggaatagtgtagctgtttaataactgttgaatggtagatttatgtttttgcttgcgattttttgtaggtcctgtgtctgatgatgagtcaccttctcctgattcaactacctcacctcctgaaattcaggcgcccgtacctgcaaacgtatgcaagcccattcctgtgaagcctaagtctgggaaacgccctgctgtggataagcttgaggacttgttggagggtggggatggacctttggaccttagtacccggaaactgccaaggcaatgagtgccctgcagctgtgtttatttagtgacgtcatgtaataaaattatgtcagctgctgagtgttttattgcttcttgggtggggacttggatatataagtaggagcagatctgtgtggttagctcatagcaacctgctgccatccatggaggtttgggctatcttggaagacctgagacagactaggctactgctagaaaacgcctcggacggagtctctggcttttggagattctggttcggtggcgatctagctaggctagtgtttaggataaaacaggactatagggaagaatttgaaaagttattggacgacagtccaggactttttgaagctcttaacttgggccatcaggctcattttaaggagaaggttttatcagttttagatttttctactcctggtagaactgctgctgctgtagcttttcttacttttatattggataaatggatccgccaaacccacttcagcaagggatacgttttggatttcatagcagcagctttgtggagaacatggaaggctcgcaggatgaggacaatcttagattactggccagtgcagcctctgggagtagcagggatactgagacacccaccggccatgccagcggttctggaggaggagcagcaggaggacaatccgagagccggcctggaccctccggtggaggagtagctgacttgtttcctgaactgcgacgggtgcttactaggtctacgtccagtggacaggacaggggcattaagagggaaaggaatcctagtgggaataattcaagaaccgagttggctttaagtttaatgagccgtaggcgtcctgaaactgtttggtggcatgaggttcagagcgaaggcagggatgaagtttcaatattgcaggagaaatattcactagaacaacttaagacctgttggttggaacctgaggatgattgggaggtggccattaggaattatgctaagatatctctgaggcctgataaacagtatagaattactaagaagattaatattagaaatgcatgctacatatcagggaatggggcagaggttataatagatacacaagataaagcagcttttagatgttgtatgatgggtatgtggccaggggttgtcggcatggaagcagtaacatttatgaatattaggtttaaaggggatgggtataatggcattgtatttatggctaacactaagctgattctacatggttgtagcttttttgggtttaataatacttgtgtagaagcttgggggcaagttagtgtgaggggttgtagtttttatgcatgctggattgcaacatcaggtagggtcaagagtcagttgtctgtgaagaaatgcatgtttgagagatgtaatcttggcatactgaatgaaggtgaagcaagggtccgccactgcgcagctacagaaactggctgcttcattctaataaagggaaatgccagtgtgaagcataatatgatctgtggacattcgaatgagaggccttatcagatgctgacctgcgctggtggacattgcaatattctggctaccgtgcatatcgtttcccatgcacgcaagaaatggcctgtatttgaacataatgtgattaccaagtgcaccatgcacataggtggtcgcaggggaatgtttatgccttaccagtgtaacatgaatcatgtgaaggtgatgttggaaccagatgccttttccagagtaagcttaacaggaatctttgatatgaatattcaactatggaagatcctgagatatgatgacactaaaccgagggtgcgcgcatgcgaatgcggaggcaagcatgctagattccagccggtgtgcgtggatgtgactgaagacctgagacccgatcatttggtgcttgcctgcactggagcggagttcggttctagtggtgaagaaactgactaaagtgagtagtgggacgagctgtggaggtgggactttgaggttggtaaggtgggcagattgggtaaattttgttaatttctgtcttgcagctgccatgagtggaagcgcttcttttgaggggggagtatttagcccttatctgacgggcaggctcccaccatgggcaggagttcgtcagaatgtcatgggatccactgtggatgggagacccgtccagcccgccaattcctcaacgctgacctatgccactttgagttcgtcaccattggatgcagctgcagccgccgccgctactgctgccgccaacaccatccttggaatgggctattacggaagcatcgttgccaattccagttcctctaataacccttcaaccctggctgaggacaagctacttgttctcttggctcagctcgaggccttaacccaacgcttaggcgaactgtctaagcaggtggcccagttgcgtgagcaaactcagtctgctgttgccacagcaaagtctaaataaagatcttaaatcaataaataaagaaatacttgttataaaaacaaatgaatgtttatttgatttttcgcgcgcggtatgccctggaccatcggtctcgatcattgagaactcggtggatcttttccagtaccctgtaaaggtgggattgaatgtttagatacatgggcattagtccgtcccgggggtggagatagctccattgaagagcctcttgctccggggtagtgttataaatcacccagtcatagcaaggtcggagtgcatggtgttgcacaatatcttttaggagcagactaattgcaacggggaggcccttagtgtaggtgtttacaaatctgttgagctgggacgggtgcatccggggtgaaattatatgcattttggactggatcttgaggttggcaatgttgccgcctagatcccgtctggggttcatattgtgcagaaccaccaagacagtgtatccggtgcacttgggaaatttatcatgcagcttagagggaaaagcatgaaaaaatttggagacgcctttgtgaccccccagattctccatgcactcatccataatgatagcgatggggccgtgggcagcggcacgggcgaacacgttccgggggtctgaaacatcatagttatgctcctgagtcaggtcatcataagccattttaataaactttgggcgaagggtgccagattgggggatgaaagttccctctggcccgggagcatagtttccctcacatatttgcatttcccaggctttcagttcagagggggggatcatatccacctgcggggctataaaaaatactgtttctggagccggggtgattaactgggatgagagcaaattcctaagcagctgagacttgccgcacccagtgggaccgtaaatgaccccaattacgggttgcagatggtagtttagggagcgacagctgccgtcctcccggagcaggggggccacttcgttcatcatttcccttacatggatattttcccgcaccaagtccgttaggaggcgctctcccccaagggatagaagctcctggagcgaggagaagtttttcagcggcttcagcccgtcagccatgggcattttggaaagagtctgttgcaagagctcgagccggtcccagagctcggtgatgtgctctatggcatctcgatccagcagacctcctcgtttcgcgggttgggacggctcctggagtagggaatcagacgatgggcgtccagcgctgccagggtccgatccttccatggtcgcagcgtccgagtcagggttgtttccgtcacggtgaaggggtgcgcgcctggttgggcgcttgcgagggtgcgcttcagactcatcctgctggtcgagaaccgctgccgatcggcgccctgcatgtcggccaggtagcagtttaccatgagttcgtagttgagcgcctcggccgcgtggcctttggcacggagcttacctttggaagttttatggcaggcggggcagtagatacatttgagggcatacagcttgggcgcgaggaaaatggattcgggggagtatgcatccgcaccgcaggaggcgcagacggtttcgcactccacgagccatgtcagatccggctcatcggggtcaaaaacaagttttccgccatgttttttgatgcgtttcttacctttggtttccatgagttcgtgtccccgctgggtaacaaagaggctgtccgtgtccccgtagactgactttatgggcctgtcctcgagcggagtgccgcggtcctcttcgtagaggaacccagcccactctgatacaaaagcgcgtgtccaggccagcacaaaggaggccacgtgggaggggtagcggtcgttgtcaaccagggggtccaccttctctacggtatgtaaacacatgtccccctcctccacatccaagaatgtgattggcttgtaagtgtaggccacgtgaccaggggtccccgccgggggggtataaaagggggcgggcctctgttcgtcttcactgtcttccggatcgctgtccaggagcgccagctgttggggtaggtattccctctcgaaggcgggcatgacctctgcactcaggttgtcagtttctaggaacgaggaggatttgatattgacagtaccagcagagatgcctttcataagactctcgtccatctggtcagaaaacacaatcttcttgttgtccagcttggtggcaaatgatccatagagggcattggatagaagcttggcgatagagcgcatggtttggttcttttccttgtccgcgcgctccttggcggcgatgttaagctggacgtactcgcgcgccacacatttccattcagggaagatggttgtcagttcatccggaactattctgactcgccatcccctattgtgcagggttatcagatccacactggtggctacctcgcctcggaggggctcattggtccagcagagtcgacctccttttcttgaacagaaaggggggagggggtctagcatgaactcatcaggggggtccgcatctatggtaaatattcccggtagcaaatccttgtcaaaatagctgatggtggcgggatcatccaaagtcatctgccattctcgaactgccagcgcgcgctcataggggttaagaggggtgccccagggcatggggtgggtgagcgcggaggcatacatgccacagatatcgtagacatagaggggctcttcgaggatgccgatgtaagtgggataacagcgcccccctctgatgcttgctcgcacatagtcatagagttcatgtgagggggcgagaagacccgggcccagattggtgcggttgggtttttccgccctgtaaacgatctggcgaaagatggcatgggaattggaagagatagtaggtctctggaatatgttaaaatgggcatgagggaggcctacagagtcccttatgaagtgggcatatgactcttgcagcttggctaccagctcggcggtgacaagtacgtctagggcacagtagtcgagagtttcctggatgatgtcataacgcggttggtttttcttttcccacagctcgcggttgagaaggtattcttcgcgatccttccagtactcttcgaggggaaacccgtctttttctgcacggtaagagcccaacatgtagaattgattgactgccttgtagggacagcatcccttctccactgggagagagtatgcttgggctgcattgcgcagcgaggtatgagtgagggcaaaagtgtccctgaccatgactttgaggaattgatacttgaagtcgatgtcatcacaggccccctgttcccagagttggaagtccacccgcttcttgtaggcggggttgggcaaagcgaaagtaacatcattgaagaggatcttgccggccctgggcataaaatttcgggtgattctgaaaggctgagggacctctgctcggttattgataacctgagcggccaagacgatctcatcaaagccattgatgttgtgccccactatgtacagttctaagaatcgaggtgtgcccctgacatgaggcagcttcttgagttcttcaaaagtgaggtctgtagggtcagtgagagcatagtgttcgagggcccattcgtgcaggtgagggttcgctttgaggaaggaggaccagaggtccactgccagtgctgtttgtaactggtcccggtactgacgaaaatgctgcccgactgccatcttttctggggtgacgcaatagaaggtttgggggtcctgctgccagcgatcccacttgagttttatagccaggtcataggcgatgttgacgagccgctggtctccagagagtttcatgaccagcatgaaggggattagctgcttgccaaaggaccccatccaggtgtaggtttccacatcgtaggtgaggaagagcctttctgtgcgaggatgagagccaatcgggaagaactggatctcctgccaccagttggaggaatggctgttgatgtgatggaagtagaactccctgcgacgcgccgagcattcatgcttgtgcttgtacagacggccgcagtactcgcatcgattcacgggatgcacctcatgaatgagttgtacctgacttcctttgacgagaaatttcagtggaaaattgaggcctggcgcttgtacctcgcgctctactatgttgtctgcatcggcatgaccatcttctgtctcgatggtggtcatgctgacgagccctcgcgggaggcaagtccagacctcggcgcggcaggggcggagctcgaggacgagagcgcgcaggtcggagctgtccagggtcctgagacgctgcggagtcaggttagtaggcagtgtcaggagattgacttgcatgatcttttcgagggcgtgagggaggttcagatggtacttgatctccacgggtccgttggtggagatgtcgatggcttgcagggttccgtgccccttgggcgctaccaccgtgcccttgtttttccgtttgggcggcggtggctctgttgcttcttgcatgtttagaagcggtgtcgagggcgcgcaccgggcggcaggggcggctcgggacccggcggcatggccggcagtggtacgtcggcgccgcgcgcgggtaggttctggtactgcgccctgagaagacttgcatgcgcgacgacgcggcggttgacatcctggatctgacgcctctgggtgaacgctaccggccccgtgagcttgaacctgaaagagagttcaacagaatcaatctcggtatcgttgacggcggcttgcctaaggatttcttgcacgtcgccagagttgtcctggtaggcgatctcggccatgaactgctcgatctcttcctcttgaagatctccgcggcccgctctctcgacggtggccgcaaggtcgttggagatgcgtccaatgagttgagagaatgcattcatgcccgcctcgttccagacgcggctgtagaccacagccccctcgggatctctcgcgcgcatgaccacctgggcgaggttgagctccacgtggcgggtgaagaccgcatagttgcataggcgctggaaaaggtagttgagtgtggtggcgatgtgctcggtgacgaagaaatacatgatccatcgtctcagcggcatctcgctaacatcgcccagcgcttccaagcgctccatggcctcgtagaagtccacggcaaagttgaaaaactgggagttacgcgcggacacggtcaactcctcttccagaagacggatgagttcggcgatggtggtgcgcacctcgcgctcgaaagcccccgggatttcttcctcaatttcttcttcttccactaacatctcttcctcttcaggtggggctgcaggaggagggggaacgcggcgacgccggcggcgcacaggcagacggtcgatgaatctttcaatgacctctccgcggcggcggcgcatggtctcggtgacggcacgaccgttctccctgggtctcagagtgaagacgcctccgcgcatctccctgaagtggtgactgggaggctctccgttgggcagggacaccgcgctgattatgcattttatcaattgccccgtaggtactccgcgcaaggacctgatcgtctcaagatccacgggatctgaaaacctttcgacgaaagcgtctaaccagtcgcaatcgcaaggtaggctgagcactgtttcttgcgggcgggggcggctagacgctcggtcggggttctctctttcttctccttcctcctctttggagggtgagacgatgctgctggtgatgaaattaaaataggcagttttgagacggcggatggtggcgaggagcaccaggtctttgggtccggcttgttggatgcgcaggcgatgggccattccccaagcattatcctgacatctggccagatctttatagtagtcttgcatgagtcgttccacgggcacttcttcttcgcccgctctgccatgcatgcgagtgatcccgaacccgcgcatgggctggacaagtgccaggtccgctacaaccctttctgcgaggatggcttgctgcacctgggtgagggtggcttggaagtcgtcaaagtccacgaagcggtggtaagccccggtgttgattgtgtaggagcagttggccatgactgaccagttgactgtctggtgccccggacgcacaatctcggtgtacttgaggcgcgagtaggcgcgggtgtcaaagatgtaatcgttacaggtgcgcaccaggtactggtagccgatgagaaagtgaggcggcggctggcggtataggggccatcgctctgtagccggggcgccaggggcgaggtcttccagcatgaggcggtgataaccgtagatgtacctggacatccaggtgataccggaggcggtggtggatgcccgcgggaactcgcgtacgcggttccagatgttgcgcagcggcatgaagtagttcatggtaggcacggtttggcccgtgagacgcgcacagtcgttgatgctctagacatacgggcaaaaacgaaagcggtcagcggctcgtctccgtggcctggaggctaagcgaacgggttgggctgcgcgtgtaccccggttcgaatctcggatcaggctggagccgcagctaacgtggtactggcactcccgtctcgacccaggcctgcacaaaacctccaggatacggaggcgggtcgttttttttttgctttttcctggatgggagccagtgctgcgtcaagctttagaacactcagttctcggggctgggagtggctcgcgcccgtagtctggagaatcaatcgccagggttgcgttgcggtgtgccccggttcgagtcttagcgcgccggatcggccggtttccgcgacaagcgagggtttggcagcctcgtcatttctaagaccccgccagccgacttctccagtttacgggagcgagccctcttttttttgttttttgttgcccagatgcatcccgtgctgcgacagatgcgcccccagcaacagcccccttctcagcagcagctacaacaacagccacaaaaggctcttcctgctcctgtaactactgcggctgcagccgtcagcggcgcgggacagcccgcctatgatctggacttggaagagggcgagggattggcgcgcctgggggctccatcgcccgagcggcacccgcgggtgcaactaaaaaaggactctcgcgaggcgtacgtgccccaacagaacctattcagggacaggagcggcgaggagccagaggagatgcgagcatctcgatttaacgcgggtcgcgagctgcgccacggtctggatcgaagacgggtgctgcaagacgaggattttgaggtcgatgaagtgacagggatcagcccagctagggcacatgtggccgcggccaacctagtctcggcctacgagcagaccgtgaaggaggagcgcaacttccaaaaatcttttaacaaccatgtgcgcaccctgatcgcccgcgaggaagtgaccctgggtctgatgcacctgtgggacctgatggaggctatcacccagaaccccactagcaaacccctgacagctcagctgtttctggtggttcaacatagcagggacaacgaggcattcagggaggcgttgttgaatatcaccgagcctgatgggagatggctgtatgatctgattaacatcctgcaaagtattatagtgcaggaacgtagcctgggtttggctgagaaagtggcagctatcaactactcggtcttgagcctgggcaaatactacgctcgcaagatctacaagaccccctacgtacccattgacaaggaggtgaagatagatgggttttacatgcgcatgactctcaaggtgttgactttaagcgacgatctgggggtgtatcgcaatgacaggatgcaccgcgcggtgagcgccagcaggaggcgcgagctgagcgacagagaacttatgcacagcttgcaaagggctctaacgggggccggaactgatggggagaactactttgacatgggagcggacttgcaatggcaacccagtcgcagggccatggaggctgcagggtgtgagcttccttacatagaagaggtggatgaagtcgaggacgaggagggcgagtacttggaagactgatggcgcgacccgtatttttgctagatggaacaacagcaggcaccggaccccgcaatgcgggcggcgctacagagccagccgtccggcattaactcctcggacgattggacccaggccatgcaacgtataatggcgctgacgacccgcaaccccgaagcctttagacagcaaccccaggccaaccgcctttcggccatactggaggccgtagtgccctcccgctccaaccccacccacgagaaggtcctggctatcgtgaacgcgctggtggagaacaaggccatccgtcccgatgaggccgggctggtatacaatgctcttttggagcgcgtggcccgttacaacagcagcaacgtgcagaccaacctggaccggatggtgaccgatgtgcgcgaggctgtgtctcagcgcgagcggttccagcgcgacgccaacttggggtcattggtagcgctaaacgctttccttagcacccagcccgccaacgtgccccgtggtcagcaagactatacaaactttttgagtgcattgagactcatggtatctgaggtgccccagagcgaggtgtaccagtccgggccagattacttcttccagaccagcagacagggcttgcagacagtgaacctgacccaggctttcaagaacctgaagggtctgtggggagtgcacgccccagtaggagatcgcgcgaccgtgtctagcttgctgactcccaactcccgcctgctgctgctgctggtatcccccttcactgacagcggtagcatcgaccgcaactcctacttgggctacctgcttaacctgtatcgcgaggctataggacagagccaggtggacgagcagacctatcaagaaatcacccaagtgagccgcgccctgggtcaggaagacacaggcggtttggaagccaccctgaacttcttactaaccaaccggtcgcagaagatccctcctcagtatgcgcttaccgctgaggaggagcggatcctaagatacgtgcaacagagcgttggactgtttttgatgcaggagggggcgacacctaccgccgcgctggatatgacagctcgaaacatggagcccagcatgtatgctagtaacaggcctttcattaacaaactgctggactacctgcacagggcggccgccatgaactctgattatttcaccaatgctattctgaacccacactggctgcccccacctggtttctacactggcgaatacgacatgcccgatcccaatgacgggttcctatgggacgatgtggacagtagcatattttccccgccgccaggttatacggtttggaagaaggaagggggcgatagaaggcactcttccgtatcgttgcccggaacggctggtgctgccgcggccgtgcccgaagctgcgagtcctttccctagcttgtccttttcactaaacagcgttcgcagcagtgaactggggagaataaaccgcccgcgcttgatgggcgaggatgagtacttgaatgactctttgctgaggccagagagggaaaagaacttccctaacaatggaatagagagcctggtggataagatgagtagatggaagacctatgcgcaggatcacagagacgagcccaggatcttgggggctacaagcagaccgagccgtagacgccagcgccacgacaggcagatgggtcttgtgtgggacgacgaggactctgccgatgacagcagcgtgttggacttgggtggaaaaggagttggcaacccgttcgctcatctgcgtccccgtttcggtcgcatgttgtaaaagtgaaagtaaaaataaaaaggcaactcaccaaggccatggcaaccgagcgtgcgttcgttcttttttttgttatctgtatctagtacgatgaggagacgagccgtgctaggcggagcggtggtgtatccggagggtcctcctccttcttacgagagcgtgatgcagcaacaggcggcgatgatacagcccccactggaggctcccttcgtaccccctcggtacctggcgcctacggaagggagaaatagcattcgttactcggagctgtcaccccagtacgataccaccaagttgtatctggtggacaacaagtcggcggacatcgcctccctgaactatcagaacgaccacagcaacttcctgaccacagtggtgcagaacaatgactttacccccacggaggctagcacccagaccattaactttgacgagcggtcgcggtggggcggtcagctgaagaccattatgcacaccaacatgcccaacgtgaacgagtacatgttcagcaacaagtttaaggcgagggtgatggtatctaggaaggctcctgaaggtgttacagtaaatgatcataaagatgatattttgaaatatgagtggtttgagttcactttaccagaaggtaacttctcagctaccatgaccatcgacctgatgaacaatgccatcattgacaactacctgaaaattggcagacagaatggagtgctggaaagtgacattggtgttaagtttgacactagaaacttcaggctcgggtgggaccccgaaactaagttgattatgccaggggtctacacttatgaggcattccatcctgacattgttttgttgcctggttgcggggtagattttactgaaagccgacttagcaacttgcttggcatcaggaagagacatccattccaggagggtttcaaaatcatgtatgaagatcttgaagggggtaatattcctgcccttttggatgtcactgcctatgaggaaagcaaaaaggataccactactgaaacaggcgaaaaggcggtggttaaaacaaccacagtggctgttgcagaggaaaccagtgaagatgataatataactagaggagatacttatataactgaaaaacaaaaacgtgaagctgcagctgcagaactattacttatgtctgaagttaaaaaagagttaaagatccaacctttagaaaaagacagcaagaatagaagctacaatgtcttggaagacaaaatcaacacagcctaccgcagctggtacctgtcctacaattatggtaaccctgagaaaggaataaggtcctggacactgctcaccacttcggatgtcacctgtggagccgagcaggtctactggtcgctccccgacatgatgcaagaccccatcaccttccgctcctcgagacaagtcaacaactacccagtagtgggtgcagagcttatgccggtcttctcaaagagtttctacaatgagcaagccgtgtactctcagcagctccgacagtccacctcgctcacgcacgtcttcaaccgcttccctgagaaccagatcctcatccgcccgccggcgcccacaattaccaccatcagtgaaaacgttcctgctctcacagatcacgggaccctgccgttacgcagcagtatccggggagtccagcgcgtgaccgttactgacgccagacgtcgcacctgtccctacgtttacaaggccctgggcatagtcgcgccgcgcgttctttcaagccgcactttctaaaaaaaaaaaaaaatgtccattctcatctcgcccagtaataataccggttggggactgcatgcgcccaccaagatgtacggaggcgcccgcaaacgctctacccagcaccccgtgcgcgttcgcggtcatttccgcgctccctggggcgccctcaagggccgtacccgcactcggaccacggtcgatgatgtgatcgaccaggtggttgccgatgctcgtaattatactcctactgcgcctacatctactgtggatgcagttattgacagtgtagtggcagacgctcgcgcctatgctcgccggaagagccgaaggaggcgcatcgccaggcgccacagggctactcccgctatgcgagctgcaaaagctattctgcggagggccaaacgtgtgggacgaagagccatgcttagagcggccagacgcgcggcttctggtgctagcagcggcaggtcccgcaggcgcgcggccacggcggcagcagcggccattgccaacatggcccaaccgcgaagaggcaatgtgtattgggtgcgcgatgccactaccggccagcgcgtgcccgtgcgcacccgcccccctcgcacttagaagatactgagcagtctccgatgttgtgtcccagcggcaagtatgtccaagcgcaaatacaaggaagagatgctccaggtcatcgcgcctgaaatctacggtccgccgatgaaggatgaaaaaaagccccgcaaaatcaagcgggttaaaaaggacaaaaaagaagaagatggcgatgatggactggtggagtttgtgcgcgagttcgcgccaagacggcgcgtgcagtggcgcggtcgaaaagtacgccaagtgcttagacccgggaccactgtggtctttacacctggcgagcgttccagcactacttttaaacggtcctatgatgaggtgtatggggatgacgatattattgagcaggcggcagaccgccttggcgagtttgcttatggcaagcgcacaagatccagtcccaaagaggaggcggtatctattcccttggatcatggaaatcccacccctagcctcaaaccagtcaccctgcagcaagtgctgcccgtacctgcgagcagaggcgtaaagcgcgagggtgaggacctatatcccaccatgcagctaatggtgcccaagcggcagagattagaagacgtactggagaaaatgaaagtggatgccgatatccagcctgaggtgaaagtgagacccatcaaggaagtggcgccaggtttgggagtacaaacctttgacatcaagattcccactgagtccatggaagtgcagaccgaacctgcaaaacccacagtcacctcaattgaggttcagacggaaccctggatgcccgcgcccgttgccgcccccagcaccactagaagatcacgtcgaaagtatggcccagcaagtctgctaatgcccaactatgctctgcacccatccatcattcccactccgggttacagaggcactcgctactatcgaagtcggagcaacacctcacgccgccgcaaactacctgcaagtcgcactcgccgtcgccgccgccgcaccactgccagcaaattaactcccgccgccctggtgcggagagtgtaccgcgatggtcgcgctgaacctctgacgctgccgcgcgcgcgctatcatccaagcatcaccacttaatgactgttgacgctgcctccttgcagatatggctctcacttgccgccttcgcgtccccattactggctaccgaggaagaaactcgcgccgtagaaggatgttggggcgagggatgcgccgccacagacgaaggcgcgctatcagcaagcgattagggggtggctttctgccagctcttatacccatcatcgccgcggcgatcggggcgataccaggcatagcttccgtggcggttcaggcctcgcagcgccactaacaatggaaaaatttataaataaaaaatagaatggactctgacgctcctggtcctgtgactatgtttttgtagagatggaagacatcaatttttcatccctggctccgcgacacggcacgaggccgtacatgggcacctggagcgacatcggcacgagccaactgaacgggggcgccttcaattggagcagtatctggagcgggcttaaaaattttggctcgaccataaaaacctatgggaacaaagcttggaacagcagcacagggcaggcccttagaaataagcttaaggagcagaacttccaacaaaaggtggtcgatggtatcgcctctggtattaacggcgtagtggatctagccaaccaggctgtgcagaaacagataaacagccgcctggacccgccgcccgcaactcctggtgaaatggaagtggaggaagagcttcctccgctggagaagcggggcgacaagcgaccgcgtcccgagctggaacagacgttggtgacgcgcgcagacgagcccccttcatacgaggaggcagtaaagctcggaatgcccactaccaggcctgtagctcacatggctaccggggtgatgaaaccttctcagtcgcatcggcctgccaccttggacttgcctcctccccctgcttctgcggcgcctattcccaaacctgtcgctaccagaaagcccaccgccgtacagcccgtcgccgtagccagaccgcgtcctggggcacaccgcgcccgaaagcaaactggcagagtactctgaacagcatcgtgggtctgggcgtgcagagtgtaaagcgccgtcgctgctattaattaaatatggagtagcgcttaacttgcttgtctgtgtgtatgtatcatcaccatgccgccgcagcagaggagaaaggaagaggtcgcgcgccgaggctgagttgctttcaagatggccaccccatcgatgatgccccaatgggcatacatgcacatcgccggacaggatgcttcggagtacctgagtccgggtctggtgcagttcgcccgtgcaacagacacctacttcagtatggggaacaagtttagaaaccccacagtggcgcccacccacgatgtgaccaccgaccgtagccagcgactaatgctgcgcttcgtgcccgttgaccgggaagacaatacctactcttacaaagttcgctacacgctggctgtaggggacaacagagtactggatatggccagcacgttctttgacatccgcggcgtgctggaccggggccctagcttcaaaccctactccgggaccgcctacaacagcctggctcccaagggagcgcccaacacctgccagtggaaggattctgacagcaaaatgcatacctttggggtagctgccatgcccggtgttactgggaaaaagatagaagctgatgggctgcctattggaatagattcaacttctggaactgacacagtaatttatgctgataaaactttccaaccagaaccacaagttggaaatgccagttgggttgacgccaatggtacagaggaaaaatatggaggcagagctctgaaggacactacaaagatgaaaccctgctatggttctttcgccaagcctaccaacaaagaaggtggtcaggctaacttaaaagattcagaaaccgccgccaccactcctaactatgatatagatctggctttctttgacaacaaaaatattgctgctaactacgatccagatattgtaatgtacacagaaaatgttgacttgcagactccagatactcatattgtatacaaacctggaacagaggacaccagctctgaatccaatttgggtcagcaagccatgcctaacagacccaactacattggcttcagagacaattttattgggctcatgtactacaacagcactggcaatatgggggtgctggccggtcaggcctctcagctgaatgctgtggttgacttgcaagacagaaacactgaactgtcctaccagctcttgcttgactctctgggtgacagaacccggtatttcagtatgtggaatcaggcggtggacagctatgatcctgatgtgcgtattattgaaaaccatggtgtggaggacgaattgccaaactattgctttccgttgaatggtgtgggatttacagacacttaccaaggtgttaaagttaaaacagatgcagttgctggaaccagtggaacacagtgggacaaagatgacaccacagttagtactgctaatgaaatccatggaggcaatccttttgccatggaaatcaacatccaagccaatctatggcgaagtttcctttattccaatgtggctttgtatctcccagactcgtataaatacaccccgtccaatgtcactctcccagaaaacaaaaacacctacgactacatgaacgggcgggtggtgccgccatctctagtagacacctatgtgaacattggtgccaggtggtctctggatgccatggacaatgtcaacccattcaaccaccaccgtaacgctggcttgcgttaccgatccatgcttctgggtaacggacgttatgtgcctttccacatacaagtgcctcaaaaattcttcgctgttaaaaacctgctgcttctcccaggctcctacacttatgagtggaactttaggaaggatgtaaacatggttctacagagttcccttggtaacgacctacgggtagatggcgccagcatcagtttcacgagcatcaatctttatgctacttttttccccatggctcacaacaccgcttccacccttgaagccatgctgcggaatgacaccaatgatcagtcattcaacgactacctatctgcagctaacatgctctaccccatacctgccaacgcaaccaatattcccatttccattccttctcgcaactgggcggctttcagaggctggtcatttaccagactgaaaaccaaagaaactccctctttggggtctggatttgacccatactttgtctattccggttctattccctacctggatggtaccttctatctaaatcacacttttaagaaggtttccatcatgtttgactcttcagtgagctggcctggaaatgacaggttactatctcctaacgaatttgaaataaagcgcactgtggatggcgaaggctacaacgtagcccaatgcaacatgaccaaagactggttcttggtacagatgctcgccaactacaacattggctaccagggcttttacatccctgagggatacaaggatcgcatgtactcctttttcagaaacttccagcctatgagcaggcaggtggttgatgaggttaattacactgactacaaagccgtcaccttaccatatcaacacaacaactctggctttgtaggataccttgcgcctactatgagacaaggggaaccttacccagccaattatccatacccgctcatcggaactactgccgttaagagtgttacccaaaaaaagttcctgtgcgacaggaccatgtggcgcataccgttctccagcaacttcatgtccatgggggcccttacagacctgggacaaaacctgctctatgccaactcggcccatgcactggacatgacttttgaggtggatcccatggatgagcccaccctgctttatcttcttttcgaagtcttcgacgtggtcagagtgcaccagccacaccgcggcgtcatcgaggccgtctacctgcgcacaccgttctcggccggcaacgccaccacataagaagcctcttgcttcttgcaagcagcagctgcagccatgtcatgcgggtccggaaacggctccagcgagcaagagctcaaagccatcgtccgagacctgggttgcggtccctatttcctgggaacctttgacaagcgtttcccggggttcatggcccccgacaagctcgcctgcgccatagtcaacactgccggacgcgagacggggggagagcactggctggcttttggttggaacccgcgctccaacacctgctacctttttgatccttttgggttctcggatgagcgactcaaacagatttaccagtttgagtacgaggggctcctgcgccgcagtgcccttgctaccaaagaccgctgcatcaccctggaaaagtccacccagagcgtgcagggcccacgctcagccgcctgtggacttttttgctgtatgttccttcatgcctttgtgcactggcccgaccgtcccatgaacggaaaccccaccatgaagttgctgactggggtgcccaacagcatgctccaatctccccaagtccagcccaccctgcgccgcaaccaggaggcactataccgcttcctaaacacccactcatcttactttcgttctcaccgcgcacgcatcgaaagggccaccgcgtttgaccgtatggatatgcaataagtcatgtaaaaccgtgttcaataaaaagcactttatttttacatgcactaaggctctggttttttgctcattcgttttcatcattcactcagaaatcaaatgggttctggcgggagtcatagtggcccgcgggcagggatacgttgcggaactgtaacctgttctgccacttgaactcggggatcaccagcttgggaactggaatctcgggaaaggtgtcttgccacaactttctggtcagttgcagggcgccaagcaggtcaggagcagagatcttgaaatcacagttggggccggcattctggacacgggagttgcggtacactgggttgcaacactggaacaccatcaaggctgggtgtctcacgcttgccagcacggtcgggtcactgatggtagtcacatccaagtcttcagcattggccatcccaaagggggtcatcttacaggtctgcctgcccatcacgggagcgcagcctggcttgtggttgcaatcgcaatgaatgggaatcagcatcatcctggcttggtcgggggttatccctggatatacggccttcatgaaggcttcgtactgcttgaaagcttcctgagccttacttccctcggtgtagaacattccacaggacttgctggaaaattggttagtagcacagttggcatcatttacacagcagcgggcatcgttgttggccaactgaaccacatttctgccccagcggttctgggtgatcttggctctgtctgggttctccttcatagcgcgctgcccgttctcgctcgccacatccatctcgataatgtggtccttctggatcatgatagtgccatgcaggcatttcaccttgccttcgtaatcggtgcatccatgagcccacagagcgcacccggtgcactcccaattattgtgggcgatctcagaataagaatgcaccaatccctgcatgaatcttcccatcatcgctgtcagggtcttcatgctactaaatgtcagcggaatgccacggtgctcctcgttcacatactggtggcagatacgcttgtactgctcgtgctgctctggcatcagcttgaaagaggttctcaggtcattatccagcctatacctctccattagcacagccatcacttccatgcccttctcccaggcagataccaggggcaagctcaaaggattcctaacagcaatagaagtagctcctttagctatagggtcattcttgtcgatcttctcaacacttctcttgccatccttctcaatgatgcgcaccggggggtagctgaagcccacggccaccaactgagcctgttctctttcttcttcgctgtcctggctgatgtcttgcagagggacatgcttggtcttcctgggcttcttcttgggagggatcgggggaggactgttgctccgttccggagacagggatgaccgcgaagtttcgcttaccagtaccacctggctctcgatagaagaatcggaccccacgcgacggtaggtgttcctcttcgggggcagaggtggaggcgactgagatgggctgcggtctggccttggaggcggatggctggcagagcccattccgcgttcgggggtgtgctcccgttggcggtcgcttgactgatttcctccgcggctggccattgtgttctcctaggcagagaaacaacagacatggaaactcagccatcactgccaacatcgctgcaagcgccatcacacctcgcccccagcagcgacgaggaggagagcttaaccaccccaccacccagtcccgctaccaccacctctaccctcgatgatgaggaggaggtcgacgcagcccaggagatgcaggcgcaggataatgtgaaagcggaagagattgaggcagatgtcgagcaggacccgggctatgtgacaccggcggagcacgaggaggagctgaaacgttttctagacagagaggatgacgaccgcccagagcatcaagcagatggcgatcaccaggaggctggcctcggggatcatgttgccgactacctctccgggcgtgggggggaggacgtgctcctcaaacatctagcaaggcagtcgctcatagttaaagacgcactactcaacctcaccgaagtgcccatcagtgtggaagagcttagccgcgcctacgagctgaacctcttttcgcctcagataccccccaagcggcagccaaacggcacctgcgaggccaaccctcgactcaacttctatccagcttttactgtccccgaagtgctggccacctaccacatcttttttaagaaccaaaagattccagtctcctgccgcgccaaccgcacccgcgcagatgcccttctcaacttgggtccgggagctcgcttacctgatatagcttccttggaagaggttccaaagatctttgagggtctgggaagtgatgagactcgggccgcaaatgctctgcaacagggagagaatggcatggatgaacatcacagcgctctagtggaactggagggtgacaatgcccggcttgcagtgctcaagcgcagtatcgtggtcacccattttgcctaccccgctgttaacctgccgcccaaagtcatgagcgctgtcatggaccatctgctcatcaaacgagcaagtccactttcagaaaaccagaacatgcaggatccagacgcctcggacgagggcaagccggtagtcagtgacgagcagctatctcgctggctgggtaccaactccccccgagatttggaagaaagacgcaagcttatgatggctgtagtgctagtaactgttgagttggagtgtctgcgccgcttttttaccgaccccgagaccctgcgcaagctagaggagaacctgcactacaccttcagacatggcttcgtgcggcaggcatgcaagatctccaacgtggagctcaccaacctggtttcatacatgggcattttgcatgagaaccggctagggcagagcgttctgcacaccaccctgaagggggaggcccgccgcgactacatccgagactgtgtctacctctacctctgccatacctggcagactggtatgggtgtgtggcaacagtgtttggaagagcagaaccttaaagagctggacaagctcttgcagagatccctcaaagccctgtggacaggttttgacgagcgcaccgtcgcctcggacttggcggacatcatcttccccgagcgtcttacggttactctgcgaaacggcctgccagacttcatgagccagagcatgcttaacaactttcgctctttcatcctggaacgctccggtatcctgcctgccacctgctgtgcgctgccctccgactttgtgcctctcacctaccgcgagtgcccaccgccgctatggagccactgctacctattccgcctggccaactacctctcctaccactcggatgtgatagaggatgtgagcggagacggcctgctggaatgccactgccgatgcaatttatgcacaccccaccgctccctcgcctgcaacccccagttgctaagcgagacccagatcatcggcaccttcgagttgcagggtcccaacagtgaaggcgaggggtcttctccggggcagagtctgaaactgacaccggggctgtggacctccgcctacctgcgcaagtttcatcccgaggactatcatccctatgagatcaggttctatgaggaccagtcacatcctcccaaagtcgagctctcagcctgcgtcatcacccagggggcaattctggcccaattgcaagccatccaaaaatcccgccaagaatttctgctgaaaaagggaagcggggtctaccttgacccccagaccggtgaggagctcaacacaaggttcccccaggatgtcccatcgccgaggaagcaagaagctgaaggtgcagctgtcacccccagaggatatggaggaagactgggacagtcaggcagaggaggagatggaagattgggacagccaggcagaggaggtggacagcctggaggaagacagtttggaggaggaagacgaggaggcagaggaggtggaagaagcaaccgccgccaaacagttgtcatcggcggcggagacaagcaagtccccagacagcagcacggctaccatctccgctccgggtcggggggcccagcggcggcccaacagtagatgggacgagaccgggcgattcccaaacccgaccaccgcttccaagaccggtaagaaggagcgacagggatacaagtcctggcgtggacataaaaacgctatcatctcctgcttgcatgaatgcgggggcaacatatccttcacccggcgatacctgcttttccaccacggtgtgaacttcccccgcaatatcttgcattactaccgtcacctccacagcccctactgcagtcagcaagtcccggcaaccccgacagaaaaagacagcagcgacaacggtgaccagaaaaccagcagttagaaaatccacaacaagtgcagcaggaggaggactgaggatcacagcgaacgagccagcgcagaccagagagctgaggaaccggatctttccaaccctctatgccatcttccagcagagtcgggggcaagagcaggaattaaaagtaaaaaaccgatctctgcgctcgctcaccagaagttgtttgtatcacaagagcgaagaccaacttcagcgcactctcgaggacgccgaggctctcttcaacaagtactgcgcgctgactcttaaagagtagcccttgcccgcgctcattcgaaaacggcgggaatcacgtcacccttggcagctgtcctttgccctcgtcatgagtaaagagattcccacgccttacatgtggagctatcagccccaaatggggttggcagcaggtgcttcccaggactactccacccgcatgaattggcttagcgccgggccctcaatgatatcacgggttaatgatatacgagcttatcgaaaccagttactcctagaacagtcagctctcaccaccacaccccgccaacaccttaatccccgaaattggcccgccgccctggtgtaccaggaaaatcccgctcccaccaccgtactacttcctcgagacgcccaggccgaagttcagatgactaacgcaggtgtacagctggcgggcggttccgccctatgtcgtcaccgacctcaacagagtataaaacgcctggtgatcagaggccgaggtatccagctcaacgacgagtcggttagctcttcgcttggtctgcgaccagacggagtcttccagatcgccggctgtgggagatcttccttcactcctcgtcaggctgtgctgactttggagagttcgtcctcgcagccccgctcgggcggcatcggaactctccagtttgtggaggagtttactccctctgtctacttcaaccccttctccggctctcctggccagtacccggacgagttcataccgaacttcgacgcaatcagcgagtcagtggatggctatgattgatgtctaatggtggcgcggctgagctagctcgactgcgacacctagaccactgccgccgctttcgctgtttcgcccgggaactcaccgagttcatctacttcgaactctccgaggagcaccctcagggtccggcccacggagtgcggattaccatcgaagggggaatagactctcgcctgcatcgcatcttctcccagcggcccgtgctgattgagcgcgaccagggaaatacaaccatctccatctactgcatttgtaaccaccccggattgcatgaaagcctttgctgtcttgtttgtgctgagtttaataaaaactgagttaagaccctcctacggactaccgcttcttcaatcaggactttacaacaccaaccagatcttccagaagacccagacccttcctcctctgatccaggactctaactctaccttaccagcaccctccactactaaccttcccgaaactaacaagcttggatctcatctgcaacaccgcctttcacgaagccttctttctgccaatactaccactcccaaaaccggaggtgagctccgcggtcttcctactgacgacccctgggtggtagcgggttttgtaacgttaggagtagttgcgggtgggcttgtgctaatcctttgctacctatacacaccttgctgtgcatatttagtcatattgtgctgttggtttaagaaatgggggccatactagtcgtgcttgctttactttcgcttttgggtctgggctctgctaatctcaatcctcttgatcacgatccatgtctagacttcgacccagaaaactgcacacttacttttgcacccgacacaagccgtctctgtggagttcttattaagtgcggatgggactgcaggtccgttgaaattacacataataacaaaacatggaacaataccttatccaccacatgggagccaggagttcccgagtggtatactgtctctgtccgaggtcctgacggttccattcgcattagtaacaacactttcattttttctgaaatgtgcgatctggccatgtttatgagcaaacagtatgacctatggcctcctagcaaagagaacattgtggcattttccattgcttattgcttggtaacatgcatcatcactgctatcatttgtgtgtgcatacacttgcttatagttattcgccctagacaaagcaatgaggaaaaagagaaaatgccttaacctttttcctcataccttttctttacagcatggcttctgttacagctctaattattgccagcattgtcactgtcgctcacgggcaaacaattgtccatattaccttaggacataatcacactcttgtagggcccccaattacttcagaggttatttggaccaaacttggaagtgttgattattttgatataatttgcaacaaaactaaaccaatatttgtaatctgcaacagacaaaatctcacgttaattaatgtcagcaaaatttataacggttactattatggttatgatagatccagtagtcaatataaaaattacttagttcgcataactcaacccaaatcaacagtgccaactatgacaataattaaaatggctaataaagcattagaaaattttacattaccaacaacgcccaatgaaaaaaacattccaaattcaatgattgcaattattgcggcggtggcattgggaatggcactaataataatatgcatgttcctatatgcttgttgctataaaaagtttaaacataaacaggatccactactaaattttaacatttaattttttatacagatgatttccactacaatttttatcattactagccttgcagctgtaacttatggccgttcacacctaactgtacctgttggctcaacatgtacactacaaggaccccaagaaggccatgtcacttggtggagaatatatgataatggagggttcgctagaccatgtgatcagcctggtacaaaattttcatgcaacggaagagacttgaccattattaacataacattaaatgagcaaggcttctattatggaaccaactataaaaatagtttagattacaacattattgtagtgccagccaccacttctgctccccgcaaatccactttctctagcagcagtgccaaagcaagcacaattcctaaaacagcttctgctatgttaaagcttcgaaaaatcgctttaagtaattccacagccgctcccaatacaattcctaaatcaacaattggcatcattactgccgtggtagtgggattaataattatatttttgtgcataatgtactacgcctgctgctatagaaaacatgaacaaaaaggtgatgcattactaaattttgatatttaattttttatagaattatgatattgtttcaatcaaataccactaacactatcaatgtgcagactactttaaatcatgacatggaaaaccacactacctcctatgcatacacaaacattcagcctaaatacgctatgcaactaagaaatcaccatactaattgtaattggaattcttatactatctgttattctttattttatattctgccgtcaaatacccaatgttcatagaaattctaaaagacgacccatctattctcctatgattagtcgtccccatatggctctgaatgaaatctaagatctttttttttctcttacagtatggtgaacatcaatcatgattcctagaaatttcttcttcaccatactcatctgtgctttcaatgtctgtgctactttcacagcagtagccactgcaagcccagactgtataggaccatttgcttcctatgcactttttgccttcgttacttgcatctgcgtgtgtagcatagtctgcctggttattaattttttccaactggtagactggatctttgtgcgaattgcctacctacgtcaccatcccgaataccgcaatcaaaatgttgcggcactttttaggcttatttaaaaccatgcaggctatgctgccagtcattttaattctgctcctaccctgcattgccctagcttccaccgccactcgcgctacacctgaacaacttagaaaatgcaaatttcaacaaccatggtcatttcttgattgctaccatgaaaaatctgattttcccacatactggatagtgattgttggaataattaacatactttcatgtacctttttctcaatcacaatataccccacatttaattttgggtggaattctcccaatgcactgggttacccacaagaaccacatgaacatatcccactacaacacatacaacaaccactagcactggtagagtatgaaaatgagccacaaccttcactgcctcctgccattagttacttcaacctaaccggcggagatgactgaaatactcaccacctccaattccgccgaggatctgcttgatatggacggccgcgcctcagaacagcgactcgcccaactacgcatacgccagcagcaggaacgtgccgccaaggagctcagggatgctattgaaattcaccaatgcaaaaaaggcatattttgtttggtaaaacaagccaagatatcctacgagattaccaatactgaccatcgcctctcatacgagctcggaccgcagcgacaaaaattcacttgtatggtgggaatcaaccccataatcatcacccagcaagctggagataccaagggttgcatccactgttcctgcagttccgccgagtgcatctacaccctgctgaagaccctctgcggccttcgagacctcctacccatgaactaatcaacccagcccctcacttaccaattacataaagccaattaataaaaacacttacttgaaatcagaaataaggtttctgtctacgttgtttccaagcagcacctcacttccttcttcccaactctggtactctaagcctcggcgggtggcatacttcctccacactttgaaagggatgtcaaattttagttcctcttctttgcccacaatcttcatttctttatccccagatggccaaacgagctcggctaagcagctccttcaatccggtctacccctatgaagatgaaagcagctcacaacacccctttataaaccctggtttcatttcctcaaatggttttgcacaaagcccagatggagttctaactcttaaatgtgttaatccactcactaccgccagcggacccctccaacttaaagttggaagcagtcttacagtagatactatcgatgggtctttggaggaaaatataactgccgcagcgccactcactaaaactaaccactccataggtttattaataggatctggcttgcaaacaaaggatgataaactttgtttatcgctgggagatgggttggtaacaaaggatgataaactatgtttatcgctgggagatgggttaataacaaaaaatgatgtactatgtgccaaactaggacatggccttgtgtttgactcttccaatgctatcaccatagaaaacaacaccttgtggacaggcgcaaaaccaagcgccaactgtgtaattaaagagggagaagattccccagactgtaagctcactttagttctagtgaagaatggaggactgataaatggatacataacattaatgggagcctcagaatatactaacaccttgtttaaaaacaatcaagttacaatcgatgtaaacctcgcatttgataatactggccaaattattacttacctatcatcccttaaaagtaacctgaactttaaagacaaccaaaacatggctactggaaccataaccagtgccaaaggcttcatgcccagcaccaccgcctatccatttataacatacgccactgagaccctaaatgaagattacatttatggagagtgttactacaaatctaccaatggaactctctttccactaaaagttactgtcacactaaacagacgtatgttagcttctggaatggcctatgctatgaatttttcatggtctctaaatgcagaggaagccccggaaactaccgaagtcactctcattacctcccccttctttttttcttatatcagagaagatgactgacaacaaaaaaaataaagatcaacttttttattgaaaatcagtttacaagattcgagtagttattttgcccccctcttcccattttatagaatacacaattctctccccacgcacagctttgaacatttgaattccattagagatagacatagttttagattccacattccacacagtttcagagcgggccaatcttggatcagtgatagatataaatccatcggaacagtctttcaaggtggtttcacagtccaactgctgcggctgcggctccggggtttggattagggtcatctggaagaagaacgatgggagtcataatccgagaacgggatcgggcggttgtgtcttaaacctcgaagcaatcgctgtctgcgccgctccgtgcgactgctgctgatgggatcaggatccacagtctctcgaagcataattttaatagccctcaacattaacatcctggtgcgatgggcacaacaacgcattctaatttcgcttagctcactgcagtaggtacaacacattaccacaatgttgtttaacaggccataattaaaggtgctccagccaaaactcatctcagggataatcatacccgcgtgaccatcgtaccaaatcttaatgtaaattagatgacgccccctccagaacacactgcccacatacataatttccttgggcatatgcatgttcacaatttctctgtaccatggacagcgctggttaatcatacagcccctaataaccttccggaaccacatagctagcactgctcccccagcaatacattgaagagaacccggctgtttacagtgacaatggagaacccacttctctcgcccatggatcacttgagaattaaatatatctatagtggcacaacacaaacataaatgcatgcatcttttcataaccctcaactcttcgggggttaaaaacatatcccagggaataggaagctcttgcaaaacagtaaagctggcagaacaaggaagaccacgaacacaacttacactatgcatagtcatagtatcacaatctggcaacagcgggtggtcttcagtcatagaagctcgggtttcattttcctcacatcgtggtaactgggctctggtgtaagggtgatgtctggcgcatgatgtcgagcgtgcgcgcaaccttgtcataatggagttgcttcctgacattctcgtattttgtatagcaaaatgcggccctggcacaacacacttttcttcgtcttctatcctgccgcttagtgtgttccgtctgataattcaagtacagccacactcttaagttggtcaaaagaatgctggcttcagttgtaatcaaaactccatcatatttaattgttctaaggaaatcatccacggtagcatatgcaaatcccaaccaagcaatgcaactggattgcgtttcaagcagcagaggagagggaagagacggaagaatcatgttaatttttattccaaacgatctcgcagtacttcaaattgtagatcgcgcagatggcatctatcgcccccactgtgttggtgaaaaagcacagctaaatcaaaagaaatgcgattttcaaggtgctcaacggtggcttccaacaaagcctccacgcgcacatccaaaaacaaaagaataccaaaagaaggagcattttctaactcctcaaacatcatattacattcctgcaccattcccagataattttcagctttccagccttgaattattcgtgtcagttcttgtggtaaatccaaaccacacattacaaacaggtcccggagggcgccctccaccaccattcttaaacacaccctcataatgacaaaatatcttgctcctgtgtcacctgtagcaaattaagaatggcatcatcaattgacatgcccttggctctaagttcttctctaagttctagttgtaaatactctctcatattatcaccaaactgcttagccagaagccccccgggaacaatagcaggggacgctacagtgcagtacaagcgcagacctccccaattggctccagcaaaaacaagattagaataagcatactgggaaccaccagtaatatcatcaaagttgctggaaatataatcaggcagagtttcttgtaaaaattgaataaaagaaaaattttccaaagaaacattcaaaacctctgggatgcaaatgcaataggttaccgcgctgcgctccaacattgttagttttgaattagtctgtaaaataaaagaaacaagcgtcatatcatagtagcctgtcgaacaggtggataaatcagtctttccatcacaagacaagccacagggtctccagcttgaccctcgtaaaacctgtcatcgtgattaaacaacagcaccgaaagttcctcgcggtggccagcatgaataattcttgatgaagcatataatccagacatgttagcatcagttaaagagaaaaaacagccaacatagcctctgggtataattatgcttaatcttaagtatagcaaagccacccctcgcggatacaaagtaaaaggcacaggagaataaaaaatataattatttctctgctgctgttcaggcaacgtcgcccccggtccctctaaatacacatacaaagcctcatcagccatggcttaccagacaaagtacagcgggcgcacaaagcacaagctctaaagaagctctaaagacactctccaacctctccacaatatatacacaagccctaaactgacgtaatgggagtaaagtgtaaaaaatcccgccaagcccaacacacaccccgaaactgcgtcagcagggaaaagtacagtttcacttccgcaaacccaacaagcgtaacttcctctttctcacggtacgtcacatccgattaacttgcaacgtcattttcccacggccgcaccgccccttttagccgttcaccccgcagccaatcaccacacagcgcgcacttttttaaattacctcatttacatgttggcaccattccatctataaggtatattattgataatg

SEQ ID NO: 214 - DNA, 35382 bp, Human adenovirus
  misc_feature 1..35382: note = Reference Ad21 Genome Sequence: GenBank accession no. AY601633 (SEQ ID NO: 214); Human adenovirus 16
  source 1..35382: mol_type = genomic DNA
ctatctatataatataccttatagatggaatggtgccaatatgcaaatgaggtaatttaaaaaagtgcgcgctgtgtggtgattggctgcggggtgaacggctaaaaggggcgggcaatgctgggaggtgacgtaacttatgtaggaggagttatgttgcaagttatcgcggtaaaggtgacgtaaaacgaggtgtggtttggacacggaagtagacagttttcccacgcttactgacaggatatgaggtagttttgggcggatgcaagtgaaaattctccattttcgcgcgaaaactgaatgaggaagtgaatttctgagtcatttcgcggttatgacagggtggagtatttgccgagggccgagtagactttgaccgtttacgtggaggtttcgattaccgtgtttttcacctaaatttccgcgtacggtgtcaaagtcctgtgtttttacgtaggtgtcagctgatcactagggtatttaaacctgtcgagttccgtcaagaggccactcttgagtgccagcgagaagagttttctcctccgcgctgcgagtcagttttgcgctttgaaaatgagacacctgcgattcctgccacaggagattatctccagcgagaccgggatcgaaatactggagtttgtggtaaataccctgatgggagatgacccggaaccgccagtgcagcctttcgatccacctacgctgcacgatctgtatgatttagaggtagacgggcctgatgatcccaatgaggaagctgtaaatgggttttttactgattctatgctgctagctgccgatgaaggattggacataaaccctcctcctgggacccttgataccccaggggtggttgtggaaagcggcagaggtgggaaaaaattgcctgatctgggagcagctgaaatggacttgcgttgttatgaagagggttttcctccgagtgatgatgaagatggggaaactgaacagtccatccataccgcagtgaatgagggagtaaaagctgccagcgatgtttttaagttggactgtccggagctgcctggacatggctgtaagtcttgtgaatttcacaggaataacactggaatgaaagaactattgtgctcgctttgctatatgagaatgcactgccactttatttacagtaagtgtatttaagtgaaatttaaaggaatagtgtagctgtttaataactgttgaatggtagatttatgtttttacttgcgattttttgtaggtcctgtgtctgatgatgaggcgccttctcctgattcaactacctcacctcctgaaattcaggcgcccgtacctgcaaacgtatgcaagcccattcctgtgaagcctaagtgtgggaaacgccctgctgtggataagcttgaggacttgttggagggtggggatggacctttggaccttagtacccggaaactgccaagacaatgagtgccctgcagctgtgtttatttaatgtgacgtcatgtaataaaattatgtcagctgctgagtgttttattgcttcttgggtggggacttggatatataagtaggagcagatctgtgtggttagctcatagcaacctgctgccatccatggaggtttgggctatcttggaagacctgagacagactaggctactgctagaaaacgcctcggacggagtctctggcttttggagattctggttcggtggtgatctagctaggctagtgtttaggataaaacaggactacagggaagaatttgaaaagttattggacgacagtccaggactttttgaagctcttaacttgggccaccaggctcattttaaggagaaggttttatcagttttagatttttctactcctggtagaactgctgctgctgtagcttttcttacttttatattggataaatggatccgccaaacccacttcagcaagggatacgttttggatttcatagcagcagctttgtggagaacatggaaggctcgcaggatgaggacaatcttagattactggccagtgcagcctctgggagtagcagggatactgagacacccaccggccatgccagcggttctggaggaggagcagcaggaggacaatccgagagccggcctggaccctccggtggaggagtagctgacctgtttcctgaactgcgacgggtgcttactaggtctacgtccagtggacaggacaggggcattaagagggagaggaatcctagtgggaataattcaagaaccgagttggctttaagtttaatgagccgtaggcgtcctgaaactgtttggtggcatgaggttcagagcgaaggcagggatgaagtttcaatattgcaggagaaatattcactagaacaacttaagacctgttggttggaacctgaggatgattgggaggtggccattaggaattatgctaagatatctctgaggcctgataaacagtatagaattactaagaagattaatattagaaatgcatgctacatatcagggaatggggcagaggttataatagatacccaagataaagcagcttttagatgttgtatgatgggtatgtggccaggggttgtcggcatggaagcagtaacatttatgaatattaggtttaaaggggatgggtataatggcattgtatttatggctaacactaagctgattctacatggttgtagcttttttgggtttaataatacttgtgtagaagcttgggggcaagttggtgtgaggggttgtagtttttatgcatgctggattgcaacatcaggtagggtcaagagtcagttgtctgtgaagaaatgcatgtttgagagatgtaatcttggcatactgaatgaaggtgaagcaagggtccgccactgcgcagctacagaaactggctgcttcattctaataaagggaaatgccagtgtgaagcataatatgatctgtggacattcgaatgagaggccttatcagatgctgacctgcgctggtggacattgcaatattcttgctaccgtgcatatcgtttcccatgcacgcaagaaatggcctgtatttgaacataatgtgattaccaagtgcaccatgcacataggtggtcgcaggggaatgtttatgccttaccagtgtaacatgaatcatgtgaaggtgatgttggaaccagatgccttttccagagtgagcttaacaggaatctttgatatgaatattcaactatggaagatcctgagatatgatgacactaaaccgagggtgcgcgcatgcgaatgcggaggcaagcatgctagattccagccggtgtgcgtggatgtgactgaagacctgagacccgatcatttggtgcttgcctgcactggagcggagttcggttctagtggtgaagaaactgactaaagtgagtagtggggcaatatgtggatggggactttcaggttggtaaggtggacagattgggtaaattttgttaatttctgtcttgcagctgccatgagtggaagcgcttcttttgaggggggagtatttagcccttatctgacgggcaggctcccatcatgggcaggagttcgtcagaatgtcatgggatccactgtggatgggagacccgtccagcccgccaattcctcaacgctgacctatgccactttgagttcgtcatcattggatgcagctgcagccgccgccgctactgctgccgccaacaccatccttggaatgggctattacggaagcatcgttgccaattccagttcctctaataacccttcaaccctggctgaggacaagctgcttgttctcttggctcagctcgaggccttaacccaacgcttaggcgaactgtctaagcaggtggcccagttgcgtgagcaaactgagtctgctgttgccacagcaaagtctaaataaagatctcaaatcaataaataaagaaatacttgttataaaaacaaatgaatgtttatttgatttttcgcgcgcggtatgccctggaccatcggtctcgatcattgagaactcggtggatcttttccagtaccctgtaaaggtgggattgaatgtttagatacatgggcattagtccgtctcgggggtggagatagctccattgaagagcctcttgctccggggtagtgttataaatcacccagtcatagcaaggtcggagtgcatggtgttgcacaatatcttttaggagcagactaattgcaacggggaggcccttagtgtaggtgtttacaaatctgttgagctgggacgggtgcatcctgggtgaaattatatgcattttggactggatcttgaggttggcaatgttgccgcctagatcccgtctcggattcatattgtgcagaaccaccaagacagtgtatccggtgcacttgggaaatttatcatgcagcttagagggaaaagcatgaaaaaatttggagacgcctttgtgaccccccagattctccatgcactcatccataatgatagcgatggggccgtgggcagcggcacgggcgaacacgttccgggggtctgaaacatcatagttatgctcctgagtcaggtcatcataagccattttaataaactttgggcggagggtgccagattgggggatgaaagttccctctggcccgggagcatagtttccctcacatatttgcatttcccaggctttcagttccgagggggggatcatgtccacctgcggggctataaaaaataccgtttctggagccggggtgattaactgggatgagagcaaattcctaagcagctgagacttgccgcacccagtgggaccgtaaatgaccccaattacgggttgcagatggtagtttagggagcgacagctgccgtcctcccggagcaggggggccacttcgttcatcatttcccttacatggatattttcccgcaccaagtccgttaggaggcgctctcccccaagggatagaagctcctggagcgaggagaagtttttcagcggcttcagcccgtcagccatgggcattttggaaagagtctgttgcaagagctcgagccggtcccagagctcggtgatgtgctctatggcatctcgatccaacagacctcctcgtttcgcgggttgggacggctcctggagtagggaatcagacgatgggcgtccagcgctgctagggtccgatccttccatggtcgcagcgtccgagtcagggttgtttccgtcacggtgaaggggtgcgcgcctggttgggcgcttgcgagggtgcgcttcagactcatcctgctggtcgagaaccgctgccgatcggcgccctgcaggtcggccaggtagcagtttaccatgagttcgtagttgagcgcctcggccgcgtggcctttggcacggagcttacctttggaagttttatggcaggcggggcagtagatacatttgagggcatacagcttgggcgcgaggaaaatggattcgggggagtatgcatccgcaccgcaggaggcgcagacggtttcgcactccacgagccaggtcagatccggctcatcggggtcaaaaacaagttttccgccatgttttttgatgcgtttcttacctttggtttccatgagttcgtgtccccgctgggtgacaaagaggctgtccgtgtccccgtagaccgactttatgggcctgtcctcgagcggagtgcctcggtcctcttcgtagaggaacccagcccactctgatacaaaagcgcgtgtccaggccagcacaaaggaggccacgtgggaggggtagcggtcgttgtcaaccagtgggtccaccttctctacggtatgtaaacacatgtccccctcctccacatccaagaatgtgattggcttgtaagtgtaggccacgtgaccaggggtccccgccgggggggtataaaagggggcgggcctctgttcgtcctcactgtcttcaggatcgctgtccaggagcgccagctgttggggtaggtattccctctcgaaggcgggcatgacctctgcactcaggttgtcagtttctaggaacgaggaggatttgatattgacagtaccagcagagacgcctttcataagactctcgtccatctggtcagaaaacacaatcttcttgttgtccagcttggtggcaaatgatccataaagggcattggacagaagcttggcgatggagcgcatggtttggttcttttccttgtccgcgcgctccttggcggcgatgttaagctggacgtactcgcgcgccacacatttccattcagggaagatggttgtcagttcatccggaactattctgactcgccatcccctattgtgcagggttatcagatccacactggtggccacctcgcctcggaggggctcattggtccagcagagtcgacctccttttcttgaacagaaaggtgggagggggtctagcatgaactcatcaggggggtccgcatctatggtaaatattcccggtagcaaatctttgtcaaaatagctgatggtggcgggatcatccaaggtcatctgccattctcgaactgccagcgcgcgctcataggggttaagaggggtgccccagggcatggggtgggtgagcgcggaggcatacatgccacagatatcgtagacatagaggggctcttcgaggatgccgatgtaagtgggataacagcgcccccctctgatgcttgctcgcacatagtcatagagttcatgtgagggggcgagaagacccgggcccagattggtgcggttgggtttttccgccctgtaaacgatctggcgaaagatggcatgggaattggaagagatagtaggtctctggaatatgttaaaatgggcatgaggtaggcctacagagtcccttatgaagtgggcatatgactcttgcagcttggctaccagctcggcggtgacgagtacatccagggcacagtagtcgagagtttcctggatgatgtcataacgcggttggcttttcttttcccacagctcgcggttgagaaggtattcttcgcgatccttccagtactcttcgaggggaaacccgtctttttctgcacggtaagagcccaacatgtagaactgattgactgccttgtagggacagcatcccttctccactggaagagagtatgcttgggctgcattgcgcagcgaggtatgagtgagggcaaaagtgtccctgaccatgactttgaggaattgatacttgaagtcaatgtcatcacaggccccctgttcccagagttggaagtccacccgcttcttgtaggcggggttgggcaaagcgaaagtaacatcattgaagaggatcttgccggccctgggcatgaaatttcgggtgattttgaaaggctgagggacctctgctcggttattgataacctgagcggccaagacgatctcatcaaagccattgatgttgtgccccactatgtacagttctaagaatcgaggggtgcccctgacatgaggcagcttcttgagttcttcaaaagtgagatctgtagggtcagtgagagcatagtgttcgagggcccattcgtgcacgtgagggttcgctttgaggaaggaggaccagaggtccactgccagtgctgtttgtaactggtcccggtactgacgaaaatgctgcccgactgccatcttttctggggtgacgcaatagaaggtttgggggtcctgccgccagcgatcccacttgagtttcatggcgaggtcataggcgatgttgacgagccgctggtctccagagagtttcatgaccagcatgaaggggattagctgcttgccaaaggaccccatccaggtgtaggtttccacatcgtaggtgaggaagagcctttctgtgcgaggatgagagccaatcgggaagaactggatctcctgccaccagttggaggaatggctgttgatgtgatggaagtagaactccctgcgacgcgccgagcattcatgcttgtgcttgtacagacggccgcagtactcgcagcgattcacgggatgcacctcatgaatgagttgtacctgacttcctttgacgagaaatttcagtggaaaattgaggcctggcgtttgtacctcgcgctctactatgttgtctgcatcggcatgaccatcttctgtctcgatggtggtcatgctgacgagccctcgcgggaggcaagtccagacctcggcgcggcaggggcggagctcgaggacgagagcgcgcaggccggagctgtccagggtcctgagacgctgcggagtcaggttagtaggcagtgtcaggagattgacttgcatgatcttttcgagggcgtgagggaggttcagatggtacttgatctccacgggtccgttggtggagatgtcgatggcttgcagggttccgtgccccttgggtgctaccaccgtgcccttgtttttccttttgggcggcggtggctctgttgcttcttgcatgtttagaagcggtgtcgagggcgcgcaccgggcggcaggggcggttcgggacccggcggcatggctggcagtggtacgtcggcgccgcgcgcgggtaggttctggtactgtgctctgagaagactcgcatgcgcgacgacgcggcggttgacatcctggatctgacgcctctgggtgaaagctaccggccccgtgagcttgaacctgaaagagagttcaacagaatcaatctcggtatcgttgacggcggcttgcctaaggatttcttgcacgtcgccagagttgtcctggtaggcgatctcggccatgaactgctcgatctcttcctcttgaagatctccgcggcccgctctctcgacggtggccgccaggtcgttggagatgcgcccaatgagttgagagaatgcattcatgcccgcctcgttccagacgcggctgtagaccacagcccccacgggatctctcgcgcgcatgaccacctgggcgaggttgagctccacgtggcgggtgaagaccgcatagttgcatagacgctggaaaaggtagttgagtgtggtggcgatgtgctcggtgacgaagaaatacatgatccatcgtctcagcggcatctcgctgacatcgcccagcgcttccaagcgctccatggcctcgtagaagtccacggcaaagttgaaaaactgggagttacgcgcggacacggtcaactcctcttccagaagacggatgagttcggcgacggtggtgcgcacctcgcgctcgaaagcccctgggatttcttcctcaatctcttcttcttccactaacatctcttcctcttcaggtggggctgcaggaggagggggaacgcggcgacgccggcggcgcacgggcagacggtcgatgaatctttcaatgacctctccgcggcggcggcgcatggtctcggtgacggcacgaccgttctccctgggtctcagagtgaagacgcctccgcgcatctccctgaagtggtgactgggaggctctccgttgggcagggacaccgcgctgattatgcattttatcaattgccccgtaggtactccgcgcaaggacctgatcgtctcaagatccacgggatctgaaaacctttcgacgaaagcgtctaaccagtcgcaatcgcaaggtaggctgagcactgtttcttgcgggcgggggcggctagacgctcggtcggggttctctctttcttctccttcctcctctttggagggtgagacgatgctgctggtgatgaaattaaaataggcagttttgagacggcggatggtggcgaggagcaccaggtctttgggtccggcttgttggatgcgcaggcgatgggccattccccaagcattatcctgacatctggccagatctttatagtagtcttgcatgagtcgttccacgggcacttcttcttcgcccgctctgccatgcatgcgagtgatcccgaacccgcgcatgggctggacaagtgccaggtccgctacaaccctttctgcgaggatggcttgctgcacctgggtgagggtggcttggaagtcgtcaaagtccacgaagcggtggtaagccccggtgttgattgtgtaggagcagttggccatgactgaccagttgactgtctggtgccccggacgcacaatctcggtgtacttgaggcgcgagtaggcgcgggtgtcaaagatgtaatcgttacaggtgcgcaccaggtactggtagccgataagaaagtgcggcggcggctggcggtataggggccatcgctctgtagccggggcgccaggggcgaggtcttccagcatgaggcggtgataaccgtagatgtacctggacatccaggtgataccggaggcggtggtggatgcccgcgggaactcgcgtacgcggttccagatgttgcgcagcggcatgaagtagttcatggtaggcacggtttggcccgtgagacgtgcacagtcgttgatgctctagacatacgggcaaaaacgaaagcggtcagcggctcgtctccgtggcctggaggctaagcgaacgggttgggctgcgcgtgtaccccggttcgaatctcggatcaggctggagccgcagctaacgtggtactggcactcccgtctcgacccaggcctgcacaaaacctccaggatacggaggcgggtcgtttttttttttttttgctttttcctggatgggagccagtgctgcgtcaagctttagaacactcagttctcggggctgggagtggctcgcgcccgtagtctggagaatcaatcgccagggttgcgttgcggtgtgccccggttcgagtcttagcgcgccggatcggccggtttccgcgacaagcgagggtttggcagccccgtcatttctaagaccccgccagccgacttctccagtttacgggagcgagccctctttttttgtttttttgttgcccagatgcatcccgtgctgcgacagatgcgcccccagcaacagcccccttctcagcagcagctacaacaacagccacaaaaggctcttcctgctcctgtaactactgcggctgcagccgtcagcggcgcggggcagcccgcctatgatctggacttggaagagggcgagggactggcgcgcctgggcgcaccatcgcccgagcggcacccgcgggtgcaactgaaaaaggactctcgcgaggcgtacgtgccccagcagaacctgttcagggacaggagcggcgaggagcctgaggaaatgcgagcttcccgctttaacgcgggtcgcgaactgcgtcacggtctggaccgaagacgggtgctgcgtgatgatgattttgaagtcgatgaagtgacaggaataagtcctgctagggcacatgtggccgcggccaacctagtatcagcttacgagcagaccgtgaaggaggagcgcaactttcaaaaatctttcaacaaccatgtgcgcaccctgattgcccgcgaggaagtgacactgggactgatgcacctgtgggacctgatggaagccattacccagaaccccaccagcaaacctctaaccgctcagctgtttctggtggtgcaacatagtagagacaatgaggcatttagggaggcgctgttgaacattactgagcccgaggggagatggttgtatgatcttatcaatattctgcaaagtataatagtgcaagaacgtagcctgggtctagctgagaaggtggctgctattaactactcggtcttgagcctgggcaagcactacgctcgcaagatctacaaaaccccatacgtacctatagacaaggaggtgaagatagatgggttttatatgcgcatgactctcaaggtgctgaccttgagtgacgatctgggagtgtaccgcaacgacaggatgcaccgcgcagtgagcgccagcagaaggcgtgagctgagcgacagagaacttatgcacagcttgcaaagagctctgactggggctggaaccgagggggagaactactttgacatgggagcggacttgcaatggcagcccagtcgcagggccctggacgcagcagggtatgagcttccttacatagaagaggtggatgaaggccaggatgaggagggcgagtacctggaagactgatggcgcgaccatccatatttttgctagatggaacagcaggcaccggaccccgcaaaacgggcggcgctacagagccagccgtccggcattaactcctcggacgattggagccaggccatgcaacgcatcatggcgctgacgacccgcaaccccgaagcctttaggcagcaaccccaggccaaccgcctttctgctatcctggaggccgtagtgccctcccgctccaaccccacacacgagaaggtcctggccatcgtgaacgcgctggtggagaacaaagccatacgtcccgatgaggctgggctggtatacaatgccctattggagcgcgtagcccgctacaacagcagcaacgtgcagaccaacctggaccggatggtgaccgatgtgcgcgaggccgtgtctcagcgcgagcggttccagcgagacgccaatttagggtcgctggtggctttgaacgccttcctcagcactcagcctgccaacgtgcctcgcggtcagcaagactacacaaactttctaagtgcattgagactcatggtggccgaagtccctcaaagcgaagtgtaccagtccgggccagactactttttccagaccagcagacagggcttgcagacagtgaacctgagccaggcttttaagaacctgaatggtctgtggggagtgcgcgccccagtgggagatcgggcgaccgtgtctagcttgctgacccccaactcccgcctactactgctcttggtagccccattcactgacagcggtagcatcgaccgtaattcgtacttgggctatctgttgaacctgtatcgcgaggccatagggcaaactcaggtagatgagcaaacctatcaagaaattacccaagtgagccgcgctctgggtcgggaggacactggcagcttggaagccaccttaaacttcttgctgaccaaccggtcgcagaagatccctcctcagtatgcgcttaccgcggaggaggaacggatcctgagatacgtgcagcagagcgtgggactgttcctaatgcaggagggggcgactcctactgctgcgctcgatatgacagcccgaaacatggagcccagcatgtatgccagtaaccggccttttatcaataaactgctagactacttacacagggcggctgctatgaactctgattatttcaccaatgctatcctgaacccccattggctgcccccacctgggttctatacgggcgagtatgacattgcccgacccaatgacgggtttttatgggacgatgtggacagtagtgttttctccccgcctcctggttataacacttggaagaaggaaggtggcgatagaaggcactcttccgtgtcactgtccggggcaacgggtgctgccgcagcggctcccgaggccgcaagtcctttccctagtttgccattttcgctaaacagtgtacgcagcagtgagctgggaagaataacccgtcctcgcttgatcggcgaggaggagtatttgaacgactccctgttgagacccgagagggagaagaatttccccaacaacgggatagaaagcttggttgacaaaatgaaccgctggaagacgtacgcgcacgatccccgggcgctgggggatagccggggcagcgctacccgtaaacgccagtggcacgacaggcagcggggcctggtgtgggccgatgatgattccgccgacgacagcagcgtgttggacttgggtgggagtggtggtaacccgttcgctcacctgcgcccccgcgtcgggcgcctgatgtaagaaaccgaaaataaatactcaccaaggccatggcgaccagcgtgcgttcgtttcttctctgttatatctagtatgatgaggcgaaccgtgctaggcggagcggtggtgtatccggagggtcctcctccttcgtacgagagcgtgatgcagcaggcggcggcggcgacgatgcagccaccactggaggctccctttgtaccccctcggtacctggcacctacggaggggagaaacagcattcgttactcggagctggcaccattgtatgataccacccggttgtatttggtggacaacaagtccgcggacatcgcctcactgaactatcagaacgaccacagcaacttcctcaccacggtggtgcaaaacaatgactttacccccacggaggccagcacccagaccatcaactttgacgagcggtcgcgatggggcggtcagctgaagactatcatgcacaccaacatgcccaacgtgaacgagtacatgtttagcaacaagttcaaagctcgggtgatggtgtctagaaaggctcctgaaggtgtcacagtagatgacaattatgatcacaagcaggatattttggaatatgagtggtttgagtttactctaccggaagggaatttctcagccacaatgaccattgacctaatgaacaatgccatcattgataattaccttgaagtgggcagacagaatggagtgttagagagtgacattggtgttaaatttgacaccaggaactttagactgggttgggatccggaaactaagttgattatgcctggggtttacacctatgaggcattccatcctgacattgtattgttgcctggttgcggagttgactttactgaaagtcgccttagtaacttgcttggtatcaggaaaagacacccattccaggagggttttaagatcttgtatgaggatcttgaagggggtaatatcccggccctgttggatgtagaagcctatgagaacagtaagaaagaacaagaagccaaaacagaagccgctaaagctgctgctattgctaaagccaacatagttgtcagcgaccctgtaagggtggctaatgcagaagaagtcagaggagacaactatacagcttcatctgttgcaactgacgaatcgctattggctgctgtggccgaaactacagagacaaaactcactattaaacctgtagaaaaagacagcaagagtagaagttacaatgtcttggaagataaagtgaatacagcctaccgcagctggtacctgtcctacaactatggtgaccctgaaaaaggagtccgttcctggacactgctcaccacctcggatgtcacctgtggagcagagcaggtgtactggtcgctcccagacatgatgcaggaccctgtcacattccgttccacgagacaagtcagcaactatccagtggtaggtgcagagctcatgccggtcttctcaaagagtttctacaacgagcaagccgtgtactcccagcagcttcgccagtccacctcgctcacgcacgtcttcaaccgcttccctgagaaccagatcctcatccgcccgccagcgcccaccattaccaccgtcagtgaaaacgttcctgctctcacagatcacgggaccctgccgttgcgcagcagtatccggggagtccagcgcgtgaccgttactgacgccagacgccgcacctgcccctacgtctacaaggccctgggcatagtcgcgccgcgcgtcctttcaagccgcactttctaaaaaaaaaaatgtccattcttatctcacctagtaataacaccggttggggcctgcgcgcgccaagcaagatgtacggaggtgctcgcaaacgctctacacagcaccctgtgcgcgtgcgcgggcacttccgcgctccatggggcgccctcaagggtcgtgcccgcactagaaccaccgtcgatgatgtgatcgaccaggtggtggccgatgctcgtaattatactcctactgcacctacatctactgtggatgcagttattgacagcgtagtggctgacgcccgcgcctatgctcgccggaagagcaggcggagacgcatcgccaggcgccaccgggctactcccgctatgcgagcggcaagagctctgctacggagggccaaacgcgtggggcgaagagctatgcttagagcggccagacgcgcggcttcaggtgccagtgccggcaggtcccgcaggcgcgcagccacggcggcagcagcggccattgccaacatggcccaaccgcgaagaggcaatgtgtactgggtgcgcgacgccaccaccggccagcgcgtgcccgtgcgcacccgcccccctcgctcttagaagatactgagcagtctccgatgttgtgtcccagcgaggatgtccaagcgcaaatacaaggaagagatgctccaggtcatcgcgcctgaaatctacggtccgccggtgaaggatgaaaaaaagccccgcaaaatcaagcgggtcaaaaaggacaaaaaggaagaagatggcaatgatggtctggcggagtttgtacgcgagttcgccccaaggcggcgtgtgcagtggcgtggacgcaaagtgcggcctgtgctgagacctggaaccacggtggtctttacgcccggcgagcgctccagcactgcttttaagcggtcctatgatgaggtgtatggggatgatgatattctggagcaggcggccgaccgcctgggcgagtttgcttatggcaagcgctcccgctcgagccccaaggaggaggcggtgtccattcccttggacaatgggaatcccacccctagtctcaagccagtcaccctgcagcaagtgctgcccgtgcctccacgcagaggcaacaagcgagagggtgaggatctgtatcccactatgcaattgatggtgcccaagcgccagcggctggaggacgtgctggagaaaatgaaagtggatcccgatatacaacctgaggtcaaagtgagacccatcaagcaggtggcgccaggtttgggagtacaaaccgtagacatcaagattcccaccgagtccatggaagtccaaaccgaacctgcaaagcccacaaccacctccattgaggtgcaaacggatccctggatgaccgcacccgttacaactccagctgctgtcaacaccactcgaagatcccggcgaaagtacggtccagcaagtttgctgatgccaaattatgctctgcacccatccattattccaactccgggttaccgaggcactcgctactaccgcagcaggagcagcacttcccgccgtcgccgcaaaacacctgcaagtcgtagtcaccgtcgtcgccgccgccccaccagcaatctgactcccgctgctctggtgcggagagtgtatcgcgatggccgcgcggatcccctgacgttgccgcgcgtacgctaccatccaagcatcacaacttaacaactgttgccgctgcctccttgcagatatggccctcacttgccgccttcgtgtccccattactggctaccgaggaagaaactcgcgccgtagaagagggatgttggggcgcggaatgcgacgccacaggcggcggcgcgctatcagcaagaggctggggggtggctttctgcctgctctgatccccatcatagccgcggcgatcggggcgataccaggcatagcttccgtggcggttcaggcctcgcagcgccactgacattggaaaaacttataaataaaacagaatggactctgatgctcctggtcctgtgactatgtttttgtagagatggaagacatcaatttttcatccctggctccgcgacacggcacgaggccgtacatgggcacctggagcgacatcggcaccagccaactgaacgggggcgccttcaattggagcagtatctggagcgggcttaaaaattttggctctaccataaaaacctatgggaacaaagcttggaacagcagcacagggcaggcattgagaaataagcttaaagagcaaaacttccaacagaaggtggttgatggaatcgcctctggtatcaatggggtggtggatctggccaaccaggccgtgcagaaacagataaacagccgcattgacccgccgccgtcagccccgggtgaaatggaagtggaggaagatctccctccccttgaaaagcggggcgacaagcgtccgcgccccgatctggaggagacactagtcacacgctcagacgacccgccctcctacgaggaggcagtgaagcttggaatgcccaccaccagacctgtagcccccatggctaccggggtaatgaaaccttctcagtcacaccgacccgctaccttggacttgcctccccctgctgttgcagcgcctgctcgcaagcctgtcgctaccccgaagcccaccaccgtacagcccgtcgccgtagccagaccgcgtcctgggggcactccacgtccgaatgcaaactggcagagtactctgaacagcatcgtgggtctgggcgtgcaaagtgtaaagcgccgtcgctgcttttaaattaatatggagtagcgcttaacttgcctgtctgtgtgtatgtgtcatcatcacgccgccgccgcagcaacagcagaggagcaaggaagaggtcgcgcgccgaggctgagttgatttcaagatggccaccccatcgatgctgccccagtgggcatacatgcacatcgccggacaggatgcttcggagtacctgagtccgggtctggtgcagttcgcccgcgccacagacacctacttcaatctggggaacaagtttaggaaccccaccgtggcgcccacccatgatgtgaccaccgaccgcagtcagcggctgatgctgcgctttgtgcccgttgaccgggaagacaatacctacgcatacaaagttcgatacaccttggctgtgggcgacaacagagtgctggatatggccagcactttctttgacattcggggtgtgttggatagaggccctagcttcaagccatactctggcactgcttacaactcgttggcccctaagggcgctcccaatacatctcagtggattgctgaaggcgtaaaaaaagaagatgggggatctgacgaagaggaagagaaaaatctcaccacttacacttttggaaatgccccagtgaaagcagaaggtggtgatatcactaaagacaaaggtcttccaattggttcagaaattacagacggcgaagccaaaccaatttatgcagataaactataccaaccagaacctcaggtgggagatgaaacttggactgacacagatggaacaactgagaagtatggtggtagagctctaaagccagaaactaaaatgaaaccctgctatgggtcttttgctaaacccactaacgtcaaaggcggacaggcaaaacaaaaaactactgaacaaccgcaaaaccagcaggttgaatatgatattgacatgaacttttttgatgaagcgtcacagaaagcaaacttcagtccaaaaattgtgatgtatgcagaaaatgtagacttggaaaccccagacactcatgtggtgtacaaacctggtacttcagaagaaagttctcatgctaatctgggtcaacaatctatgcccaacagacccaactacattggctttagagataactttattggacttatgtactacaacagtactggcaacatgggagtgctggcaggtcaagcatcccaattgaatgcggtggttgacttgcaggacagaaacacagaactatcatatcaactactgcttgactctctgggtgacagaaccagatacttcagcatgtggaatcaagcagtcgatagctatgatcctgatgtgcgcattattgaaaatcatggggtggaagatgagcttcccaactactgctttccattggatggagtaggggtaccaataagtagttacaaaataattgaaccaaacggacagggtgcagattggaaagagcctgacataaatggaacaagtgaaattggacaaggaaatctctttgccatggaaattaacctccaagctaatctctggagaagttttctttattccaatgtggctctgtatctcccagactcctacaaatacaccccagccaatgtcactcttccaactaacaccaacacttatgactacatgaatgggcgggtggttcccccatccctggtggatacctacgtaaacattggcgccagatggtctttggatgccatggacaatgtcaacccctttaaccatcaccgcaacgctggcctgcgataccggtccatgcttttgggcaatggtcgttacgtgcctttccacattcaagtgcctcagaaattctttgctgtgaagaacctgctgcttctacccggttcttacacctacgagtggaacttcagaaaggatgtgaacatggtcctgcagagttcccttggtaatgatctccgggtcgatggtgccagcataagttttaccagcatcaatctctatgccaccttcttccccatggcccacaacactgcctccacccttgaagccatgctgcgcaatgacaccaatgatcaatcattcaatgactacctttctgctgccaacatgctctaccccatcccggccaacgctaccaacgttcccatctccattccctctcgcaactgggccgccttcagaggctggtccttcaccagactcaaaaccaaggagactccctctttgggatcagggttcgatccctactttgtttactctggttctataccctacctggatggtaccttctaccttaaccacactttcaagaaagtctccatcatgtttgactcttcagtgagctggcctggtaatgacagattgctaagtccaaatgagttcgaaatcaagcgcacagttgatggggaaggctacaatgtggcccaatgtaacatgaccaaagactggttcctggtccagatgcttgccaactacaacattggataccagggcttctacgttcctgagggttacaaggatcgcatgtactccttcttcagaaacttccagcccatgagtagacaggtggttgatgagattaactacaaagactataaagctgtcgccgtaccctaccagcataataactctggctttgtgggttacatggctcctaccatgcgtcagggtcaagcgtaccctgctaactacccataccccctaattggaaccactgcagtaaccagtgtcacccagaaaaaattcctgtgcgacaggaccatgtggcgcatcccattctctagcaacttcatgtccatgggtgcccttacagacctgggacagaacttgctgtatgccaactcggcccatgcgctggacatgacttttgaggtggatcccatggatgagcccaccctgctttatcttcttttcgaagtcttcgacgtggtcagagtgcaccagccacaccgcggcgtcatcgaggccgtctacctgcgcacaccgttctcggccggcaacgccaccacataagaagcctcttgcttcttgcaagcagcagctgcagccatgtcatgcgggtccggaaacggctccagcgagcaagagctcaaagccatcgtccgagacctgggctgcggaccctatttcctgggaacctttgacaagcgtttcccggggttcatggcccccgacaagctcgcctgcgccatagtcaacactgccggacgcgagacggggggagagcactggctggcttttggttggaacccgcgctccaacacctgctacctttttgatccttttgggttctcggatgagcgactcaaacagatttaccagtttgagtacgaggggctcctgcgccgcagtgcccttgctaccaaagaccgctgcatcaccctggaaaagtccacccagagcgtgcagggcccgcgctcagccgcctgtggacttttttgctgtatgttccttcatgcctttgtgcactggcccgaccgccccatgaacggaaaccccaccatgaagttgctgactggggtgtcaaacagcatgctccaatcaccccaagtccagcccaccctgcgtcgcaaccaggaggcgctatatcgcttcctaaacacccactcatcttactttcgttctcaccgcgcacgcatcgaaagggccaccgcgtttgaccgtatggatatgcaataagtcatgtaaaaccgtgttcaataaaaagcactttatttttacatgcactaaggctctggttttttgctcattcgttttcatcattcactcagaaatcaaatgggttctggcgtgagtcagagtgacccgtgggcagggagacgttgcggaactgtaacctgttctgccacttgaactcggggatcaccagcttgggaactggaatttcgggaaaggtgtcttgccacaactttctggtcagttgcagggcgccaagcaggtcaggagcagagatcttgaaatcacagttggggccggcattctggacacgggagttgcggtacactgggttgcaacactggaacaccatcaaggctgggtgtctcacgcttgccagcacggtcgggtcactgatggtagtcacatccaagtcttcagcattggccattccaaagggggtcatcttacaggtctgcctgcccatcacgggagcgcagcctggcttgtggttgcaatcgcaatgaatggggatcagcatcatcctggcttggtcgggggttatccctgggtacacggccttcatgaaggcttcgtactgcttgaaagcttcctgagccttacttccctcggtgtaaaacatcccacaggacttgctggaaaattggttagtagcacagttggcatcattcacacagcagcgggcatcgttgttggccaactggaccacatttctgccccagcggttctgggtgatcttggctctgtctgggttctccttcatagcgcgctgcccgttttcgctcgccacatccatctcgataatgtggtccttctggatcataatagtgccatgcaggcatttcaccttgccttcgtaatcggtgcatccatgagcccacagagcgcacccggtgcactcccaattattgtgggcgatctcagaataagaatgcaccaatccctgcatgaatcttcccatcatcgctgtcagggtcttcatgctactaaatgtcagcgggatgccacggtgctcctcgttcacatactggtggcagatacgcttgtactgctcgtgctgctctggcatcagcttgaaagaggttctcaggtcattatccagcctatacctctccattagcacagccatcacttccatgcccttctcccaggcagataccaggggcaagctcaaaggattcctaacagcaatagaagtagctcctttagctatagggtcattcttgtcgatcttctcaacacttctcttgccatccttctcaatgatgcgcaccggggggtagctgaagcccacggccaccaactgagcctgttctctttcttcttcgctgtcctggctgatgtcttgcagagggacatgcttggtcttcctgggcttcttcttgggagggatcgggggaggactgttgctccgttccggagacagggatgaccgcgaagtttcgcttaccagtaccacctggctctcgatagaagaatcggaccccacgcgacggtaggtgttcctcttcgggggcagaggtggaggcgactgagatgggctgcggtccggccttggaggcggatggctggcagagcccattccgcgttcgggggtgtgctcccgttggcggtcgcttgactgatttcctccgcggctggccattgtgttctcctaggcagagaaacaacagacatggaaactcagccatcactgccaacatcgctgcaagcgccatcacacctcgcccccagcagcgacgaggaggagagcttaaccaccccaccacccagtcccgctaccaccacctctaccctcgatgatgaggaggaggtcgacgcagcccaggagatgcaggcgcaggataatgtgaaagcggaagagattgaggcagatgtcgagcaggacccgggctatgtgacaccggcggagcacgaggaggagctgaaacgttttctagacagagaggatgacgaccgcccagagcatcaccaggaggctggcctcggggatcatgttgccgactacctctccgggcttgggggggaggacgtgctcctcaaacatctagcaaggcagtcgatcatagttaaagacgcactactcaacctcaccgaagtgcccatcagtgtggaagagcttagccgcgcctacgagctgaacctcttttcgcctcagataccccccaagcggcagcgaaacggcacctgcgaggccaaccctcgactcaacttctatccagcttttactgtccccgaagtgctggccacctaccacatcttttttaagaaccaaaagattccagtctcctgccgcgccaaccgcacccgcgcagatgcccttctcaacttgggtccgggagctcgtttacctgatatagcttccttggaagaggttccaaagatctttgagggtctgggaagtgatgagactcgggccgcaaatgctctgcaacagggagagaatggcatggatgaacatcacagcgctctagtggaactggagggtgacaatgcccggcttgcagtgctcaagcgcagtatcgtggtcacccattttgcctaccccgctgttaacctgccgcccaaagtcatgagcgctgtcatggaccatctgctcatcaaacgagcaagtccactttcagaaaaccagaacatgcaggatccagacgcctcggacgagggcaagccggtagtcagtgacgagcagctatctcgctggctgggtaccaactccccccgagatttggaagaaagacgcaagcttatgatggctgtagtgctagtaactgttgagttggagtgtctgcgccgcttttttaccgaccccgagaccctgcgcaagctagaggagaacctgcactacaccttcagacatggcttcgtgcgccaggcatgcaagatctccaacgtggagctcaccaacctggtttcatacatgggcattttgcatgagaaccggctagggcagagcgttctgcacaccaccctgaagggggaggcccgccgcgactacatccgagactgtgtctacctctacctctgccatacctggcagactggtatgggtgtgtggcaacagtgtttggaagagcagaaccttaaagagctggacaagctcttgcagagatccctcaaagccctgtggacaggttttgacgagcgcaccgtcgcctcggacctggcggacatcatcttccccgagcgtcttagggttactctgcgaaacggcctgccagacttcatgagccagagcatgcttaacaactttcgctctttcatcctggaacgctccggtatcctgcctgccacctgctgtgcgctgccctccgactttgtgcctctcacctaccgcgagtgcccaccgccgctatggagccactgctacctattccgcctggccaactacctctcctaccactcggatgtgatagaggatgtgagcggagacggcctgctggaatgccactgccgatgcaatttatgcacaccccaccgctccctcgcctgcaacccccagttgctaagcgagacccagatcatcggcaccttcgagttgcagggtcccaacagtgaaggcgaggggtcttctccggggcagagtctgaaactgacaccggggctgtggacctccgcctacctgcgcaagttttatcccgaggactatcatccctatgagatcaggttctatgaggaccagtcacatcctcccaaagtcgagctctcagcctgcgtcatcacccagggggcaattctggcccaattgcaagccatccaaaaatcccgccaagaatttctgctgaaaaagggaagcggggtctaccttgacccccagaccggtgaggagctcaacacaaggttcccccaggatgtcccatcgccgaggaagcaagaagctgaaggtgcagctgtcacccccagaggatatggaggaagactgggacagtcaggcagaggaggagatggaagattgggacagccaggcagaggaggtggacagcctggaggaagacagtttggaggaggaagacgaggaggcagaggaggtggaagaagcaaccgccgccaaacagttgtcatcggcggcggagacaagcaagtccccagacagcagcacggctaccatctccgctccgggtcggggggcccagcggcggcccaacagtagatgggacgagaccgggcgatttccaaacccgaccaccgcttccaagaccggtaagaaggagcgacagggatacaagtcctggcgtggacataaaaacgctatcatctcctgcttgcatgaatgcgggggcaacatatccttcacccggcgatacctgcttttccaccacggtgtgaacttcccccgcaatatcttgcattactaccgtcacctccacagcccctactgcagtcagcaagtcccggcaaccccgacagaaaaagacagcagcgacaacggtgaccagaaaaccagcagttagaaaatccacaacaagtgcagcaggaggaggactgaggatcacagcgaacgagccagcgcagaccagagagctgaggaaccggatctttccaaccctctatgccatcttccagcagagtcgggggcaagagcaggaattgaaagtaaaaaaccgatctctgcgctcgctcaccagaagttgtttgtatcacaagagcgaagaccaacttcagcgcactctcgaggacgccgaggctctcttcaacaagtactgcgcgctgactcttaaagagtagcccttgcccgcgctcattcgaaaacggcgggaatcacgtcacccttggcagctgtcctttgccctcgtcatgagtaaagacattcccacgccttacatgtggagctatcagccccaaatggggttggcagcaggtgcttcccaggactactccacccgcatgaattggcttagcgccgggccctcaatgatatcacgggttaatgatatacgagcttatcgaaaccagttactcctagaacagtcagctcttaccaccacaccccgccaacaccttaatccccgaaattggcccgccgccctggtgtaccaggaaaatcccgctcccaccaccgtactacttcctcgagacgcccaggccgaagttcagatgactaacgcaggtgtacagctggcgggcggttccgccctatgtcgtcaccggcctcaacagagtataaaacgcctggtgatcagaggccgaggtatccagctcaacgacgagtcggttagctcttcgcttggtctgcgaccagacggagtcttccagatcgccggctgtgggagatcttccttcactcctcgtcaggctgtgctgactttggagagttcgtcctcgcagccccgctcgggcggcatcggaactctccagtttgtggaggagtttactccctctgtctacttcaaccccttctccggctctcctggccagtacccggacgagttcataccgaacttcgacgcaatcagcgagtcagtggatggctatgattgatgtctaatggtggcgcggctgagctagctcgactgcgacacctagaccactgccgccgctttcgctgtttcgcccgggaactcaccgagttcatttacttcgaactctccgaggagcaccctcagggtccggcccacggagtgcggattaccatcgaagggggaatagactctcgcctgcatcgcatcttctcccagcggcccgtgctgattgagcgcgaccagggaaatacaaccatctccatctactgcatctgtaaccaccccggattgcatgaaagcctttgctgtcttgtttgtgctgagtttaataaaaactgagttaagaccctcctacggactaccgcttcttcaatcaggactttacaacaccaaccagatcttccagaagacccagacccttcctcctctgatccaggactctaactctaccttaccagcaccctccactactaaccttcccgaaactaacaagcttggatctcatctgcaacaccgcctttcacgaagccttctttctgccaatactaccactcccaaaaccggaggtgagctccgcggtcttcctactgacgacccctgggtggtagcgggttttgtaacgttaggattagttgcgggtgggcttgtgctaatcctttgctacctatacacaccttgctgtgcatatttagtcatattgtgctgttggtttaagaaatgggggccatactagtcgtgcttgctttactttcgcttttgggtctgggctctgctaatctcaatcctcttgatcacgatccatgtctagacttcgacccagaaaattgcacacttacttttgcacccgacacaagccgtctctgtggagttcttattaagtgcggatgggactgcaggtccgttgaaattacacataataacaaaacatggaacaatacattatccaccacatgggaaccaggagttcccgagtggtatactgtctctgtccgaggtcctgacggttccattcgcattagtaacaacactttcattttttctgaaatgtgcgatctggccatgtttatgagcaaacagtatgacctatggcctcctagcaaagagaacattgtggcattttccattgcttattgcttggtaacatgcatcatcactgctatcatttgtgtgtgcatacacttgcttatagttattcgccctagacaaagcaatgaggaaaaagagaaaatgccttaacctttttcctcataccttttctttacagcatggcttctgttacagctctaattattgccagcattgtcactgtcgctcacgggcaaacaattgtccatattaccttaggacataatcacactcttgtagggcccccaattacttcagaggttatttggaccaaacttggaagtgttgattattttgatataatttgcaacaaaactgaaccaatatttgtaatctgtaacagacaaaatctcacgttaattaatgttagcaaaatttataacggttactattatggttatgatagatccagtagtcaatataaaaattacttagttcgcataactcagcccaaatcaacagtgccaactatgacaataattaaaatggctaataaagcattagaaaattttacattaccaacaacgcccaatgaaaaaaacattccaaattcaatgattgcaattattgcggcggtggcattgggaatggcactaataataatatgcatgttcctatatgcttgttgctataaaaagtttcaacataaacaggatccactactaaattttaacatttaattttttatacagatgatttccactacaatttttatcattactagccttgcagctgtaacttatggccgttcacacctaactgtacctgttggctcaacatgtacactacaaggaccccaagaaggctatgtcacttggtggagaatatatgataatggagggttcgctagaccatgtgatcagcctggtacaaaattttcatgcaacggaagagacttgaccattattaacataacattaaatgagcaaggcttctattatggaaccaactataaaaatagtttagattacaacattattgtagtgccagccaccacttctgctccccgcaaatccactttctctagcagcagtgccaaagcaagcacaattcctaaaacagcttctgctatgttaaagcttcgaaaaatcgctttaagtaattccacagcagctcccaatacaattcctaaatcaacaattggcatcattactgccgtggtagtgggattaatgattatatttttgtgcataatgtactacgcctgctgctatagaaaacatgaacaaaaaggtgatgcattactaaattttgatattgtttcaatcaaatgccactaacactctcaatgtgcagactactttaaaacatgacatggaaaaccacactacctcctatgcatacacaaatattcagcctaaatacgctatgcaacttagaaatcaccatactaattgtaattggaattcttacactatctgttattctttattttatattctgccgtcaaatacccaatgttcatagaaattctaaaagacgtcccatctattctcctatgattagtcgtccccatatggctctgaatgaaatctaagatctttttttttcttttacagtatggtgaacatcaatcatgattcctagaaatttcttcttcaccatactcatctgtgctttcaatgtctgtgctactttcacagcagtagccactgcaagcccagactgtataggaccatttgcttcctatgcactttttgcctttgttacttgcatctgcgtgtgtagcatagtctgcctggttattaattttttccaactggtagactggatctttgtgcgaattgcctacctacgtcaccatcccgaataccgcaatcaaaatgttgcggcacttcttaggcttatttaaaaccatgcaggctatgctaccagttattttaattctgctactaccctgcattgccctaccttccaccgccactcgcgctacacctgaacaacttagaaaatgcaaatttcaacaaccatggtcatttcttgattgctaccatgaaaaatctgattttcccacatactggatagtgattgttggaataattaacatactttcatgtaccgttttctcaatcacaatataccccacatttaattttgggtggaattctcccaatgcactgggttacccacaagaactagatgaacatatcccactacaacacatacaacaaccactagcattggtagagtatgaaaatgagccacaaccttcactgcctcctgctattagttacttcaacctaaccggcggagatgactgaaatactcaccacctccaattccgccgaggatctgcttgatatggacggccgcgcctcagaacagcgactcgcccaactacgcatccgccagcagcaggaacgcgtgaccaaagagctcagagatgtcatccaaattcaccaatgcaaaaaaggcatattttgtttggtaaaacaagccaagatatcctacgagatcaccgctactgaccatcgcctttcttacgaacttggcccccaacgacaaaaatttacatgcatggtgggaatcaaccctatagttatcacccagcaaagtggagatactaagggttgcattcactgctcttgcgattccaccgagtgcacctacaccctgctgaagaccctatgcggcctaagagacctgctacccatgaattaaaaattaataaaaaattacttacttgaaatcagcaataaggtctctgttgaaattttttcccagcagcacctcgcttccctcttcccaactctggtattctaaaccccgttcagcggcatactttctccatactttaaatgggatgtcaaattttagctcctctcctgtacccacgatcttcatgtctttcttcccagatgaccaagagagtccggctcagtgattccttcaaccctgtctacccctatgaagatgaaagcacctcccaacacccctttataaacccagggtttatttccccaaatggctttacacaaagcccagacggagttcttactttaaattgtttaaccccactaacaaccacaggcgggcctttacagttaaaagtgggagggggacttatagtggatgacactgatgggaccttacaagaaaacatacgtgctacagcacccattactaaaaataatcattctgtagaactatccattggaaatggattagaaacacaaaacaataaactatgtgccaaattgggaaatgggttaaaatttaacaacggtgacatttgtataaaggatagtattaacaccttatggactggaataaagcctccacctaactgtcaaattgtggaaaacactgatacaaacgatggcaaacttactttagtattagtaaaaaacggagggcttgttaatggctacgtatctctagttggtgtatcagacactgtgaaccaaatgttcacacaaaagtcagcaaccatacaattaagattatatttcgactcttctggaaatctattaactgatgaatcaaacttaaaaattccacttaaaaataaatcttctacagcaaccagtgaagctgcaaccagcagcaaagcctttatgccaagtactacagcttatccctttaacaccactactagggatagtgaaaactatattcatggaatatgttactatatgactagttatgatagaagtctagttcccttaaacatttctataatgctaaacagccgtacgatttcttccaatgttgcctatgccatacaatttgaatggaatctaaatgcaaaagaatctccagaaagcaacatagctacgctgaccacatccccctttttcttttcttatattagagaagacgacaactaaaaaataaagtttaagtgtttttatttaaaaatcacaaaattcgagtagttattttgcctcccccttcccatttaacagaatacaccaatctctccccacgcacagctttaaacatttggataccattagagatagacatagttttagtttccacattccaaacagtttcagagcgagccaatctggggtcagtgatacataaaaatgcatcgggatagtcttttaaagcgctttcacagtccaactgctgcggatgcgactccggagtctggatcacagtcatctggaagaagaacgatgggaatcataatccgaaaacggaatcgggcgattgtgtctcatcaaacccacaagcagccgctgtctgcgtcgctccgtgcgactgctgtttatgggatcggggtctgcagtgtcctgaagcatgattttaatagcccttaacattaactttctggtgcgatgcgcgcagcaacgcattctgatttcacttagattactacagtatgtacagcacattatcacaatattgtttaataaaccataattaaaagcgctccagccaaaactcatatctgatacaatcgcccctgcatgaccatcataccaaattttaatataaattaaatgtcgttccctcaaaaacacactacccacatacatgatctcttttggcatgtgcatattaacaatctgtctgtaccatggacaacgttggttaatcatgcaacccaatataaccttccggaaccacactgccaacaccgctcccccagccatgcattgaagtgaaccctgctgattacaatgacaatgaagaacccaattctctcgaccatgaatcacttgagactgaaaaatatctatagtagcacaacaaagacataaatgcatgcatcttctcataatttttaactcatctggatttaaaaacatatcccaaggaatgggaaactcttgcaaaacagtaaagctggcagaacaaggaagaccacgaacacaacttacactatgcatagtcatagtatcacaatctggcaacagcgggtggtcttcagtcatagaagctcgggtttcattttcctcacatcgtggtaactgggctctggtgtaagggtgatgtctggcgcatgatgtcgagcgtgcgcgcaaccttgtcataatggagttgtttcctgacattctcgtattttgtatagcaaaatgcggccctggcacaacacactcttcttcgtcttctatcctgccgcttagtgtgttccgtctgataattcaagtacagccacactcttaagttggtcaaaagaatgctggcttcagttgtaatcaaaactccatcatatttaattgttctaaggaaatcatccacggtagcatatgcaaatcccaaccaagcaatgcaactggattgtgtttcaagcagcagaggagagggaagagacggaagaatcatgttaatttttattccaaacgatctcgcagtacttcaaattgtagatcgcgcagatggcatctatcgcccccactgtgttggtgaaaaagcacagctaaatcaaaagaaatgcgattttcaaggtgctcaacggtggcttccaacaaagcctccacgcgcacatccaaaaacaaaagaataccaaaagaaggagcattttctaactcctcaaacatcatattacattcctgcaccattcccagataattttcagctttccagccttgaattattcgtgtcagttcttgtggtaaatccaaaccacacattacaaacaggtcacggagggcgccctccaccaccattcttaaacacaccctcataatgacaaaatatcttgctcctgtgtcacctgtagcaaattaagaatggcatcatcaattgacatgcccttggctctaagttcttctctaagttctagttgtaaatactctctcatattatcaccaaactgcttagccaaaagccccccgggaacaatagcaggggacgctacagtgcagtacaagcgcagacctccccaattggctccagcaaaaacaagattagaataagcatactgggaaccaccagtaatatcatcaaagttgctggaaatataatcaggcagagtttcttgtaaaaattgaataaaagaaaaattttccaaagaaacattcaaaatctctgggatgcaaatgcaataggttaccgcgctgcgctccaacattgttagttttgaattagtctgcaaaataaaagaaacaagcgtcatatcatagtagcctgtcgaacaggtggataaatcagtctttccatcacaagacaagccacagggtctccagctcgaccctcgtaaaacctgtcatcgtgattaaacaacagcaccgaaagttcctcgcggtggccagcatgaataattcttgatgaagcatataatccagacatgttagcatcagttaaagagaaaaaacagccaacatagcctctgggtataattatgcttaatcttaagtatagcaaagccacccctcgcggatacaaagtaaaaggcacaggagaataaaaaatataattatttctctgccgctgttcaggcaacgtcgcccccggtccatctaaatacacatacaaagcctcatcagccatggcttaccagacaaagaacagcgggcgcacaaagcacaagctctaaagaagctctaaagacactctccaacctctccacaatatatacacaagccctaaactgacgtaatgggagtaaagtataaaaaatcccgccaagcccaacacacaccccgaaactgcgtcagcagggaaaaatacagtttcacttccgcattcccaacaagcgtaagttcctctttctcatggtacgtcacatccgattaacttgcaacgtcattttcccacggtcgcaccgccccttttagccgttcaccccgcagccaatcaccacacagcgcgcacttttttaaattacctcatttgcatattggcaccattccatctataaggtatattatatagatag

SEQ ID NO: 215 - DNA, 34775 bp, Human adenovirus
  misc_feature 1..34775: note = Reference Ad34 Genome Sequence: GenBank accession no. AY737797 (SEQ ID NO: 215); Human adenovirus 34
  source 1..34775: mol_type = genomic DNA
catcatcaataatataccttatagatggaatggtgccaatatgtaaatgaggtgattttaaaaattgtggggtgtgtggtgattggctgtggggttaacggctaaacggggcggcgcggccgtgggaaaatgacgttttgtgggggtggagtttttttgcaagttgtcgcgggaaatgtgacgcataaaaaggctttttttctcacggaactactgacttttcccacggtatttaacaggaaatgaggtagttttgaccggatgcaagtgaaaattgctgatttgcgcgcgaaaactgaatgaggaagtgtttttctgaataatgtggtatttatggcagggtggagtatttgttcagggccaggtagactttgacccattacgtggaggtttcgattaccgtgttttttacctgaatttccgcgtaccgtgtcaaagtcttctgtttttacgtaggtgtcagctgatcgctacggtatttatacctcagggtttgtgtcaagaggccactcttgagtgccagcgagaagagttttctcctctgcgccggcagtttaataataaaaaaatgagagatttgcgatttctgcctcaggaaataatttctgctgagactggaaatgaaatactggagcttgtggtgcacgccctgatgggagacgatccggagccacctgtgcagctttttgagcctcctacgcttcaggaactgtatgatttagaggtagagggatcggaggattctaatgaggaagctgtgaatggcttttttaccgattctatgcttttagctgctaatgaaggattagaattagatccgcctttggacactttcgatactccaggggtgattgtggaaagcggtacaggtgtaagaaaattacctgatttgggttccgtggactgtgatttgcactgctatgaagacgggtttcctccgagtgatgaggaggaccatgaaaaggagcagtctatgcagactgcagcgggtgagggagtgaaggctgccagtgttggttttcagttggattgcccggagcttcctggacatggctgtaagtcttgtgaatttcacaggaaaaatactggagtaaaggaactgttatgttcgctttgttatatgagagcgcactgccactttatttacagtaagtgtgtttaagttaaaatttaaaggaatatgctgtttttcacatgtatattgagtgggagttttgtgcttcttattataggtcctgtgtctgatgctgatgagtcaccatctcctgattctactacctcacctcctgagattcaagcacctgttcctgtggacgtgcgcaagcccattcctgtgaagcttaagcctgggaaacgtccagcagtggaaaaacttgaggacttgttacagggtggggacggacctttggacttgagtacacggaaacggccaagacaataagtgttccatatccgtgtttacttaaggtgacgtcaatatttgtgtgagagtgcaatgtaataaaaatatgttaactgttcactggtttttattgctttttgggcggggactcaggtatataagtagaagcagacctgtatggttagctcataggagctggctttcatccatggaggtttgggccattttggaagaccttagaaagactaggcaactgttagaggacgcttcggacggagtctccggtttttggagattctggttcgctagtgaattagctagggtagtttttaggataaaacaggactataaagaagaatttgaaaagttgttggtagattgcccaggactttttgaagctcttaatttgggccatcaagttcactttaaagaaaaagttttatcagttttagacttttcaaccccaggtagaactgccgctgctgtggcttttcttacttttatattagataaatggatcccgcagactcatttcagcaggggatacgttttggatttcgtagccacagcattgtggagaacatggaaggttcgcaagatgaggacaatcttaggttactggccagtgcagcctttgggtgtagcgggaatcctgaggcatccaccggtcatgccagcggttctggaggaggaacagcaagaggacaacccgagagccggcctggaccctccagtggaggaggcggagtagctgacttgtctcctgaactgcaacgggtgcttactggatctacgtccactggacgggataggggcgttaagagggagagggcatctagtggtactgatgctagatctgagttggctttaagtttaatgagtcgcagacgtcctgaaaccatttggtggcatgaggtccagaaagagggaagggatgaagtttctgtattgcaggagaaatattcactggaacaggtgaaaacatgttggttggagcctgaggatgattgggaggtggccattaaaaattatgccaagatagctttgaggcctgataaacagtataagattactagacggattaatatccggaatgcttgttacatatctggaaatggggctgaggtggtaatagatactcaagacaaggcagttattagatgctgcatgatggatatgtggcctggagtagtcggtatggaagcagtaacttttgtaaatgttaagtttaggggagatggttataatggaatagtgtttatggccaataccaaacttatattgcatggttgtagcttttttggtttcaacaatacctgtgtagatgcctggggacaggttagtgtacggggatgtagtttctatgcgtgttggattgccacagctggcagaaccaagagtcaattgtctctgaagaaatgcatattccaaagatgtaacctgggcattctgaatgaaggcgaagcaagggtccgccactgcgcttctacagatactggatgttttattttaattaagggcaatgccagcgtaaagcataacatgatttgcggtgcttccgatgagaggccttatcaaatgctcacttgtgccggtgggcattgtaatatgctggctactgtgcatattgtttcccatcaacgcaaaaaatggcctgtttttgatcacaatgtgttgaccaagtgtaccatgcatgcaggtgggcgtagaggaatgtttatgccttaccagtgtaacatgaatcatgtgaaagtgttgttggaaccagatgccttttccagaatgagcctaacaggaatctttgacatgaacatgcaaatctggaagatcctgaggtatgatgatacgagatcgagggtgcgcgcatgcgaatgcggaggcaagcatgccaggttccagccggtgtgtgtagatgtgactgaagatctgagaccggatcatttggttattgcccgcactggagcagagttcggatccagtggagaagaaactgactaaggtgagtattgggaaaacttggggtggggttttcagatggacagattgagtaaaaatttgttttttctgtctttcagctgtcatgagtggaaacgcttcttttaaggggggagtcttcagcccttatctgacagggcgtctcccatcctgggcaggagttcgtcagaatgttatgggatctactgtggatggaagacccgtccaacccgccaattcttcaacgctgacctatgctactttaagttcttcacctttggacgcagctgcagccgccgccgccgcctctgttgccgctaacactgtgcttggaatgggttactatggaagtatcgtggctaattccacttcctctaataacccttctaccctgactcaggacaagttacttgtccttttggcccagctggaggctttgacccaacgtctgggtgaactttatcagcaggtggccgagttgcgagtacaaactgagtctgctgtcggcacggcaaagtctaaataaaaaaaaattccacaatcaatgaataaataaacgagcttgttgttgatttaaaatcaagtgtttttatttcatttttcgcgcacggtatgccctagaccaccgatctcgatcattgagaacacggtggattttttccagaatcctatagaggtgggattgaatgtttagatacatgggcattaggccatctttggggtggagatagctccattgaagggattcatgctccggggtagtgttgtaaatcacccagtcataacaaggtcgcagtgcatggtgttgcacaatatcttttagaagtaggctgattgccacagataagcccttggtgtaggtgtttacaaaccggttgagctgggaggggtgcattcggggtgaaattatgtgcattttggattggatttttaagttggcaatattgccgccaagatctcgtcttgggttcatgttatgaaggaccaccaagacggtgtatccggtacatttaggaaatttatcgtgtagcttggatggaaaagcgtggaaaaatttggagacacccttgtgtcctccgagattttccatgcactcatccatgataatagcaatggggccgtgggcagcagcgcgggcaaacacgttccgtgggtctgacacatcatagttatgttcctgagttaaatcatcataagccattttaatgaatttggggcggagagtacccgattggggtatgaatgttccttcgggccccggagcatagttcccctcacagatttgcatttcccaagctttcagttccgatggtggaatcatgtccacctggggggctatgaagaacaccgtttctggggcgggggtgattagttgggatgatagcaagtttctgagcaattgagatttgccacatccggtggggccataaatgattccgattacaggttgcaggtggtagtttagggaacggcaactgccgtcttctcgaagcaagggggccacctcgttcatcatttcccttacatgcatattttcccgcaccaaatccattaggaggcgctctcctcctagtgatagaagttcttgtagtgaggaaaagtttttcagcggttttagaccgtcagccatgggcattttggagagagtttgctgcaaaagttctagtctgttccacagttcagtgatgtgttctatggcatctcgatccagcagacctcctcgtttcgcgggtttggacggctcctggagtagggtatgagacgatgggcgtccagcgctgccagggttcggtccttccagggtctcagtgttcgagtcagggttgtttccgtcacagtgaaggggtgtgcgcctgcttgggcgcttgccagggtgcgcttcagactcattctgctggtggagaacttctgtcgcttggcgccctgtatgtcggccaagtagcagtttaccatgagttcgtagttgagcgcctcggctgcgtggcctttggcgcggagcttacctttggaagttttcttgcataccgggcagtataggcatttcagcgcatacagcttgggcgcaaggaaaatggattctggggagtatgcatctgcgccgcaggaggcgcaaacagtttcacattccaccagccaggttaaatccggttcattggggtcaaaaacaagttttccgccatattttttgatgcgtttcttacctttggtctccatgagttcgtgtcctcgttgagtgacaaacaggctgtccgtatccccgtagactgattttacaggcctcttctccagtggagtgcctcggtcttcttcgtacaggaactctgaccactctgatacaaaggcgcgcgtccaggccagcacaaaggaggctatgtgggaggggtagcgatcgttgtcaaccagggggtccaccttttccaaagtatgcaaacacatgtcaccctcttcaacatccaggaatgtgattggcttgtaggtgtatttcacgtgacctggggtccccgctgggggggtataaaagggggcggttctttgctcttcctcactgtcttccggatcgctgtccaggaacgtcagctgttggggtaggtattccctctcgaaggcgggcatgacctctgcactcaggttgtcagtttctaagaacgaggaggatttgatattgacagtgccggttgagatgcctttcatgaggttttcgtccatttggtcagaaaacacaatttttttattgtcaagtttggtggcaaatgatccatacagggcgttggataaaagtttggcaatggatcgcatggtttggttcttttccttgtccgcgcgctctttggcagcgatgttgagttggacatactcgcgtgctaggcacttccattcggggaagatagttgtcaattcatctggcacgattctcacttgccaccctcgattatgcaaggtaattaaatccacactggtggccacctcgcctcgaaggggttcgttggtccaacagagcctacctcctttcctagaacagaaagggggaagtgggtctagcataagttcatcgggagggtctgcatccatggtaaagattcccggaagtaaatccttatcaaaatagctgatgggagtggggtcatctaaggccatttgccattctcgagctgccagtgcacgctcatatgggttaaggggactgccccagggcatgggatgggtgagtgcagaggcatacatgccacagatgtcatagacgtagatgggatcctcaaagatgcctatataggttggatagcatcgcccccctctgatacttgctcgcacatagtcatatagttcatgtgatggcgctagcaaccccggacccaagttggtgcgattgggtttttctgttctgtagacaatctggcgaaagatggcgtgagaattggaagagatggtgggtctttgaaaaatgttgaaatgggcatgaggtagacctacagagtctctgacaaagtgggcataagattcttgaagcttggttaccagttcggcggtgacaagtacgtctagggcgcagtagtcaagtgtttcttgaatgatgtcataacctggttggtttttcttttcccacagttcgcggttgagaaggtattcttcgcgatccttccagtactcttctagcggaaacccgtctttgtctgcacggtaagatcctagcatgtagaactgattaactgccttgtaagggcagcagcccttctctacgggtagagagtatgcttgagcagcttttcgcagcgaagcgtgagtaagggcgaaggtgtctctgaccatgactttgagaaattggtatttgaagtccatgtcgtcacaggctccctgttcccagagttggaagtctacccgtttcttgtaggcggggttgggcaaagcgaaagtaacatcgttgaagagaatcttaccggctctgggcataaaattgcgagtgatgcggaaaggctgtggtacttccgctcgattgttgatcacctgggcagctaggacgatctcgtcgaaaccgttgatgttgtgtcctacgatgtataattctatgaaacgcggcgtgcctttgacgtgaggtagcttattgagctcatcaaaggttaggtctgtagggtcagataaggcgtagtgttcgagagcccattcgtgcaggtgaggatttgcatgtaggaatgatgaccaaagatccaccgccagtgctgtttgtaactggtcccgatactgacgaaaatgctggccaattgccattttttctggagtgacacagtagaaggttctggggtcttgttgccatcgatcccactttagtttaatggctagatcgtgggccatgttgacgagacgctcttctcctgagagtttcatgaccagcatgaaaggaactagttgtttgccaaaggaccccatccaggtgtaagtttccacatcgtaggtcaggaagagtctttctgtgcgaggatgagagccgatcgggaagaactggatttcctgccaccagttggaggattggctgttgatgtgatggaagtagaagtttctgcggcgcgccgagcattcgtgtttgtgcttgtacagacggccgcagtagtcgcagcgttgcacgggttgtatctcgtgaatgagctgtacctggcttcccttgacgagaaatttcagtgggaagccgaggcctggcgattgtatctcgtgctcttctatattcgctgtatcggcctgttcatcttctgtttcggtggtggtcatgctgacgagcccccgcgggaggcaagtccagacctcggcgcgggaggggcggagctgaaggaccagagcgcgcaggctggagctgtccagagtcctgagacgctgcggactcaggttagtaggtagggacagaagattaacttgcatgatcttttccagggcgtgcgggaggttcagatggtacttgatttccacaggttcgtttgtagagatgtcaatggcttgcagggttccgtgtcctttgggcgccactaccgtacctttgttttttcttttgatcggtggtggctctcttgcttcttgcatgctcagaagcgatgacggggacgcgcgccgggcggaagcggttgttccggacccggaggcatggctggtagtggcacgtcggcgccgcgcacgggcaggttctggtactgcgctctgagaagacttgcgtgcgccaccacgcgtcgattgacgtcttgtatctgacgtctctgggtgaaagctaccggccccgtgagcttgaacctgaaagagagttcaacagaatcaatttcggtatcgttaacggcagcttgtctcagtatttcttgtacgtcaccagagttgtcctggtaggcgatctccgccatgaactgctcgatttcttcctcctgaagatctccgcgacccgctctctcgacggtggccgcgaggtcattggagatacggcccatgagttgggagaatgcagtcatgcccgcctcgttccagacgcggctgtaaaccacggccccctcggagtctcttgcgcgcatcaccacctgagcgaggttaagctccacgtgtctggtgaagaccgcatagttgcataggcgctgaaaaaggtagttgagtgtggtggcaatgtgttcggcgacgaagaaatacatgatccatcgtctcagcggcatttcgctgacatcgcccagagcttccaagcgctccatggcctcgtagaagtccacggcaaaattaaaaaactgggagtttcgcgcggacacggtcaattcctcctcgagaagacggatgagttcggctatggtggcccgtacttcgcgttcgaaggctcccgggatctcttcttcctcttctatctcttcttccactaacatctcttcttcgtcttcaggcgggggcggagggggcacacggcgacgtcgacggcgcacgggcaaacggtcgatgaatcgttcaatgacctctccgcggcggcggcgcatggtttcagtgacggcgcggccgttctcgcgcggtcgcagagtaaaaacaccgccgcgcatctccttaaagtggtgactgggaggttctccgtttgggagggagagggcgctgattatacattttattaattggcccgtagggactgcgcgcagagatctgatcgtgtcaagatccacgggatctgaaaacctttcgacgaaagcgtctaaccagtcacagtcacaaggtaggctgagtacggcttcttgtgggcgggggtggttatgtgttcggtctgggtcttctgtttcttcttcatctcgggaaggtgagacgatgctgctggtgatgaaattaaagtaggcagttctaagacggcggatggtggcgaggagcaccaggtctttgggtccggcttgctggatacgcaggcgattggccattccccaagcattatcctgacatctagcaagatctttgtagtagtcttgcatgagccgttctacgggcacttcttcctcacccgttctgccatgcatacgtgtgagtccaaacccgcgcattggttgtaccagtgccaagtcagctacgactctttcggcgaggatggcttgctgtacttgggtgagggtggcttgaaagtcatcaaaatccacaaagcggtggtaagccccggtattaatggtgtaagcacagttggccatgactgaccagttaactgtctggtgaccagggcgcacgagctcggtgtatttaaggcgcgaataggcgcgggtgtcaaagatgtaatcgttgcaggtgcgcaccagatactggtaacctataagaaaatgcggcggtggttggcggtagagaggccatcgttctgtagctggagcgccgggggcgaggtcttccaacataaggcggtgatagccgtagatgtacctggacatccaggtgattcctgcggcggtagtagaagcccgaggaaactcgcgtacgcggttccaaatgttgcgtagcggcatgaagtagttcattgtaggcacggtttgaccagtgaggcgcgcgcagtcattgatgctctatagacacggagaaaatgaaagcgttcagcgactcgactccgtagcctggaggaacgtgaacgggttgggtcgcggtgtaccccggttcgagacttgtactcgagccggccggagccgcggctaacgtggtattggcactcccgtctcgacccagcctacaaaaatccaggatacggaatcgagtcgttttgctggttgccgaatggcagggaagtgagtcctattttttttttttgccgctcagatgcatcccgtgctgcgacagatgcgtccccaacaacagcccccctcgcagcagcagcaaccacaaaaggctgtccctgcaactactgcaactgccgctgtgagcggtgcgggacagcccgcctatgatctggacttggaagagggcgaaggactggcacgtctaggtgcgccttcgcccgagcggcatccgcgagttcaactgaaaaaagattctcgcgaggcgtatgtgccccaacagaacctatttagagacagaagcggcgaggagccggaggagatgcgagcttcccgctttaacgcgggtcgtgagctgcgtcacggtttggacagaagacgagtgttgcgggacgaggatttcgaagttgatgaagtgacagggatcagtcctgccagggcacacgtggctgcagccaaccttgtatcggcttacgaacagacagtaaaggaagagcgtaatttccaaaagtcttttaataatcatgtgcgaaccctcattgcccgcgaagaagtcacccttggtttgatgcatttgtgggatttgatggaagctatcattcagaaccctactagcaaacctctgaccgcacagctgtttctggtggtgcaacacagcagagacaatgaggctttcagagaggcgctgctcaacatcaccgaacccgaggggagatggttgtatgatcttatcaacattctacagagtatcatagtgcaggagcggagcctgggcctggccgagaaggtggctgccatcaattactcggttttgagcttgggaaagtattacgctcgcaagatctacaagactccatacgttcccatagacaaggaggtgaagatagatgggttctacatgcgcatgacgctgaaggtgttgaccctgagcgatgatcttggggtgtaccgcaatgacagaatgcatcgcgcggtgagcgccagcaggaggcgcgagttaagcgacagggaactgatgcacagtttgcaaagagctctaactggagctggaaccgagggtgagaattactttgatatgggagctgacttgcagtggcagcctagtcgcagggctctgaacgccgcgacggcaggatgtgagcttccttacatagaagaggcggatgaaggcgaggaggaagagggcgagtacttggaagactgatggcacaacccgtgttttttgctagatggaacagcaagcaccggatcccgcaatgcgggcggcgctgcagagccagccgtccggcattaactcctcggacgattggacccaggccatgcaacgtatcatggcgttgacgactcgcaaccccgaagcctttagacagcaaccccaggccaaccgtctatcggccatcatggaagctgtagtgccttcccgctctaatcccactcatgagaaggtcctggccatcgtgaacgcgttggtggagaacaaagctattcgtccagatgaggccggactggtatacaacgctctcttagaacgcgtggctcgctacaacagtagcaatgtgcaaaccaatttggaccgtatgataacagatgtacgcgaagccgtgtctcagcgcgaaaggttccagcgcgatgccaacctgggttcgctggtggcgttaaatgctttcttgagtactcagcctgctaatgtgccgcgtggtcaacaggattatactaactttttaagtgctttgagactgatggtatcagaagtacctcagagcgaagtatatcagtccggtcctgattacttctttcagactagcagacagggcttgcagacggtaaatctgagccaagcttttaaaaaccttaaaggtttgtggggagtgcatgccccggtaggagaaagagcaaccgtgtctagcttgttaactccgaactcccgcctattattactgttggtagctcctttcaccgacagcggtagcatcgaccgtaattcctatttgggttacctactaaacctgtatcgcgaagccatagggcaaagtcaggtggacgagcagacctatcaagaaattacccaagtcagtcgcgctttgggacaggaagacactggcagtttggaagccactctgaacttcttgcttaccaatcggtctcaaaagatccctcctcaatatgctcttactgcggaggaggagaggatccttagatatgtgcagcagagcgtgggattgtttctgatgcaagagggggcaactccgactgcagcactggacatgacagcgcgaaatatggagcccagcatgtatgccagtaaccgacctttcattaacaaactgctggactacttgcacagagctgccgctatgaactctgattatttcaccaatgccatcttaaacccgcactggctgcccccacctggtttctacacgggcgaatatgacatgcccgaccctaatgacggatttctgtgggacgacgtggacagcgatgttttttcacctctttctgatcatcgcacgtggaaaaaggaaggcggcgatagaatgcattcttctgcatcgctgtccggggtcattggtgctaccgcggctgagcccgagtctgcaagtccttttcctagtctacccttttctctacacagtgtacgtagcagcgaagtgggtagaataagtcgcccgagtttaatgggcgaagaggagtacctaaacgattccttgctcagaccggcaagagaaaaaaatttcccaaacaatggaatagaaagtttggtggataaaatgagtagatggaagacttatgctcaggatcacagagacgagcctgggatcatggggactacaagtagagcgagccgtagacgccagcgccatgacagacagaggggtcttgtgtgggacgatgaggattcggccgatgatagcagcgtattggacttgggtgggagaggaaggggcaacccgtttgctcatttgcgccctcgcttgggtggtatgttgtaaaaaaaaataaaaaagaaaaaactcaccaaggccatggcgacgagcgtacgttcgttcttctttattatctgtgtctagtataatgaggcgagtcgtgctaggcggagcggtggtgtatccggagggtcctcctccttcgtacgagagcgtgatgcagcagcagcaggcgacggcggtgatgcaatccccactggaggctccctttgtgcctccgcgatacctggcacctacggagggcagaaacagcattcgttactcggaactggcacctcagtacgataccaccaggttgtatctggtggacaacaagtcggcggacattgcttctctgaactatcagaatgaccacagcaacttcttgaccacggtggtgcaaaacaatgactttacccctacggaagccagcacccagaccattaactttgatgaacgatcgcggtggggcggtcagctaaaaaccatcatgcatactaacatgcccaacgtgaacgagtatatgtttagtaacaagttcaaagcgcgtgtgatggtgtccagaaaacctcctgagggtgttagagtagacgataattatgatcataagcaagatattctaaaatacgagtggttcgagtttactttgccagaaggcaacttttcggtcactatgactatcgacttgatgaacaatgccatcatagacaattacttgaaagtgggcagacagaatggagtgttggaaagtgacattggtgttaagttcgacactaggaacttcaagttgggatgggatccagaaactaagttgatcatgcctggggtttacacctatgaggccttccatcctgacatcgtattgctgcctggctgcggagtggactttaccgaaagccgtctgagcaaccttcttggcattagaaagaaacacccattccaagagggttttaagatcttgtatgaggatttagaaggaggaaatattccagcccttttggatgtagatgcttatgagaacagcaagaaagatcaaaaagccaaaatagaagctgctgcagaagctaaagcaaacatagttgccaacgatccggtaagggtggctaacgctagtgaaatcaggggagacagttttgccgcaacatccgttccgactaaagaatcattattggatgatgtgtctcaaaacatagagttaaaactcactattaagcctgtggaaaaagatggcaaaaacagaagttacaatgtgttggaagataaaatcaacacggcctatcgcagttggtacctttcgtacaattatggcgaccccgaaaaaggagtgcgttcctggacattgctcaccacctcagatgtcacctgcggagcggagcaggtctactggtcgcttccagacatgatgcaggatcctgtcactttccgctccactagacaagtcagtaactaccctgtggtgggtgcagagcttatgcccgtcttttcaaagagcttctacaacgaacaagctgtgtactcccagcagctccgccagtccacctcgcttacgcacgtcttcaaccgctttcctgagaaccagattttaatccgtccgccggcgcccacaattaccaccgtcagtgaaaacgttcctgctctcacagatcacgggaccctgccgttgcgcagcagtatccggggagtccaacgtgtgaccgttactgacgccagacgccgcacctgtccctacgtgtacaaggcactgggcatagtcgcaccgcgcgtcctttcaagccgcactttctaaaaaaaaaaaaaaaatgtccgttcttatctcgcccagtaataacaccggttggggtctgcgcgctcccagcaagatgtacggaggcgcacgcaaacgttctacccaacatcccgtgcgtgttcgcgggcattttcgcgctccatggggtgccctcaagggccgcactcgcgttcgaaccaccgtcgatgatgtaatcgatcaggtggttgccgacgcccgtaattatactcctactgcgcctacatctactgtggacgcagttattgacagtgtagtggctgacgctcgcaactatgctcgacgtaagagccggcgaaggcgcattgccagacgtcaccgagctaccactgccatgcgagcagcaagagctctgctacgaagagctagacgcgtggggcgaagagccatgcttagggcggccagacgtgcagcttcgggcgccagcgccggcaggtcccgcaggcaagcagccgctgtcgcagcggcgactattgccgacatggcccaatcgcgaagaggcaatgtatactgggtgcgtgacgctgccaccggtcaacgtgtacccgtgcgcacccgtccccctcgcacttagaagatactgagcagtctccgatgttgtgtcccagcggcgaggatgtccaagcgcaaatacaaggaagaaatgctgcaggttatcgcacctgaagtctacggccaaccgttgaaggatgaaaaaaaaccccgcaaaatcaagcgggtaaaaaaggacaaaaaagaagaggaagatggcgatgatgggctggcggagtttgtgcgcgagtttgccccacggcgacgcgtgcaatggcgtgggcgcaaagttcgacatgtgttgagacctggaacttcggtggtctttacacccggcgagcgttcaagcgctacttttaagcgttcctatgatgaggtgtacggggatgatgatattcttgagcaggcagctgaccgattaggcgagtttgcttatggcaagcgtagtagaataaatcccaaggatgaaacagtgtccatacccttggatcatggaaatcccacccctagtcttaaaccggtcactttgcagcaagtgttacccgtaactccgcgaacaggtgttaaacgcgaaggtgaagatttgtatcccactatgcaactgatggtgcccaaacgccagaagttggaggacgttttggagaaagtaaaagtggatccagatattcaacctgaggttaaagtgagacccattaagcaggtagcgcctggtctgggagtacaaactgtagacattaaaattcccactgaaagtatggaagtgcaaactgaacccgcaaagcctactgccacctccactgaagtgcaaacggacccatggatgcccatgcctattacaactgacgccgtcggtcccactcgaagatcccgacgaaagtacggtccagcaagtctgttgatgcccaactatgtcgtacacccatctattattcctactcctggttaccgaggcactcgctactatcgcagccgaaacagtacttcccgccgtcgccgcaagacacctgcaaatcgcagtcgtcgccgtagacgcacaagcaaaccgattcccggcgccctggtgcggcaagtgtaccgcaatggtagtgcggaacctttgacactgccgcgtgcgcgttaccatcctagtatcatcacttaatcaatgttgccgctgcctccttgcagatatggccctcacttgtcgccttcgcgttcccatcactggttaccgaggaagaaactcgcgccgtagaagagggatgttggggcgcggaatgcgacgctacaggcgacggcgtgctatccgcaagcaattgcggggtggttttttgccagccttaattccaattatcgctgctgcgattggcgcaataccaggcatagcttccgtggcggttcaggcctcgcaacgacattgacattggaaaaaaaaaaaacgtataaataaaaaatacaatggactctgacactcctggtactgtgactatgttttcttagagatggaagacatcaatttttcatccttggctccgcgacacggcacgaagccgtacatgggcacctggagcgacatcggcacgagccaactgaacgggggcgccttcaattggagcagtatctggagcgggcttaaaaattttggctcaaccataaaaacatacgggaacaaagcttggaacagcagtacaggacaggcgcttagaaataaacttaaagaccagaacttccaacaaaaagtagtcgatgggatagcttccggtatcaatggagtggtagatttggctaaccaggctgtgcagaaaaagataaacagtcgtttggacccgccgccagcaaccccaggtgaaatgcaagtggaggaagaaattcctccgccagaaaaacgaggcgacaagcgtccgcgtcccgatttggaagagacgctggtgacgcgcgtagatgaaccgccttcttatgaggaagcaacgaagcttggaatgcccaccactagaccgatagcccctatggccaccggggtgatgaaaccttctcagttgcatcgacccgtcaccttggatttgccccctcctcctgctgctactgctgtacccgcttctaagcctgtcgctgccccgaaaccagtcgccgtagccaggtcacgtcccgggggcgctcctcgtccaaatgcacactggcaaaatactctgaacagcatcgtgggtctaggcgtgcaaagtgtaaaacgccgtcgctgcttttaattaaatatggagtagcgcttaacttgcctatctgtgtatatgtgtcattacacgccgtcacagcatcagaggaaaaaaggaagaggtcgtgcgtcgacgctgagttactttcaagatggccaccccatcgatgctgccccaatgggcatacatgcacatcgccggacaggatgcttcggagtacctgagtccgggtctggtgcagttcgcccgcgccacagacacctacttcaatctgggaaataagtttagaaatcctaccgtagcgccgacccacgatgtgaccaccgatcgtagccagcggctcatgttgcgcttcgtgcccgttgaccgggaggacaatacatactcttacaaagtgcggtacaccctggccgtgggcgacaacagagtgctggatatggccagcacgttctttgacattaggggcgtgttggacagaggtcccagttttaaaccctattctggtacggcttacaactccctggctcctaaaggcgctccaaatgcatctcagtggttggataagggagttacaagcactggcctagtggacgacggcaatactgatgatggggaagaagccaaaaaagcaacatacacttttggtaatgctccagtaaaagccgaggctgaaatcacaaaagacggattgccggtgggcttggaagtttcaactgaaggtcctaaaccaatctatgctgataagctttatcagccagaacctcaagtgggagacgaaacttggactgacctagacggaaaaaccgaagagtatggagggagggttcttaaacctgaaactaaaatgaaaccctgctacggatcttttgctaaacctactaatattaaaggaggtcaggcaaaggtaaaaccaaaagaagacgatggcactaacaacatcgagtatgacattgacatgaacttctttgacttaagatcacaaagatcagaactcaaacctaaaattgtaatgtatgcagaaaatgtggacctggaatgtccagatactcatgttgtgtacaaacctggagtttcagatgctagttctgagaccaatcttggacaacagtctatgcccaacagacccaactacattggcttcagagataacttcatcggacttatgtactataacagtactggcaacatgggggtactggctggccaagcgtctcagttgaatgcagtggttgacttgcaggacagaaacacagaactgtcttaccaactcttgcttgactctctgggcgacagaaccagatactttagcatgtggaatcaggctgtggacagttatgatcctgatgtacgtgttattgaaaatcatggtgtggaagatgaacttcccaactattgttttccgttggatggtgtcggtccgcgaacagatagttacaaggagattaagccaaatggagaccaatctacttggacaaatgtagacccaactggcagcagtgaacttgctaagggaaatccatttgccatggaaattaaccttcaagccaatctatggcgaagtttcctttattccaatgtggctctatatctcccagactcgtacaaatacaccccgtccaatgtcactcttccagaaaacaaaaacacctacgactacatgaacgggcgggtggtgccgccatctctagtagacacctatgtgaacattggtgccaggtggtctctggatgccatggacaatgtcaacccattcaaccaccaccgtaacgctggcttgcgttaccgatccatgcttctgggtaacggacgttatgtgcctttccacatacaagtgcctcaaaaattcttcgctgttaaaaacctgctgcttctcccaggctcctacacttatgagtggaactttaggaaggatgtaaacatggttctacagagttccctcggtaacgacctacgggtagatggcgccagcatcagttttacgagcatcaacctctatgctacttttttccccatggctcacaacaccgcttccacccttgaagccatgctgcggaatgacaccaatgatcagtcattcaacgactacctatctgcagctaacatgctctaccccattcctgccaatgcaaccaatattcccatttccattccttctcgcaactgggcggctttcagaggctggtcatttaccagactgaaaaccaaagaaactccctctttggggtctggatttgacccctacttcgtctattctggttctattccctacctggatggtaccttctacctgaaccacacttttaagaaggtttccatcatgtttgactcttcagtgagctggcctggaaatgacaggttactatctcctaacgaatttgaaataaagcgcactgtggatggcgaaggctacaacgtagcccaatgcaacatgaccaaagactggttcttggtacagatgctcgccaactacaacatcggctatcagggcttctacattccagaaggatacaaagatcgcatgtattcatttttcagaaacttccagcccatgagcaggcaggtggttgatgaggtcaattacaaagacttcaaggccgtcgccataccctaccaacacaacaactctggctttgtgggttacatggctccgaccatgcgtcaaggtcaaccctatcccgctaactatccctatccactcattggaacaactgccgtaaatagtgttacgcagaaaaagttcttgtgtgacagaaccatgtggcgcataccgttctcaagcaacttcatgtctatgggagcccttacagacttgggacagaacatgctctatgccaactcagctcatgctctggacatgacctttgaggtggatcccatggatgagcccaccctgctttatcttctcttcgaagttttcgacgtggtcagagtgcatcagccacaccgcggcatcatcgaggcagtctacctgcgtacaccgttctcggccggtaacgctaccacgtaagaagcttcttgcttcttgcaaacagcagctgcaaccatggcctgcggatcccaaaacggctccagcgagcaagagctcagagccattgtccaagacctgggttgcggaccatattttttgggaacctttgataagcgcttcccggggttcatggcccccgataagctcgcctgtgccattgtaaatacggccggacgtgagacggggggagagcactggttggctttcggttggaacccacgttctaacacctgctacctttttgatccttttggattctcggatgatcgtctcaaacagatttaccagtttgaatatgagggtctcctgcgccgcagcgctcttgctaccaaggaccggtgtattacgctggaaaaatctacccagaccgtgcagggcccccgttctgccgcctgcggacttttctgctgcatgttccttcatgcctttgtgcactggcctgaccgtcccatggacggaaaccccaccatgaaattgctaactggagtgccaaacaacatgcttcattctcctaaagtccagcccaccctgtgtgacaatcaaaaagcactctaccattttctcaatacccattcgccttattttcgctctcatcgtacacacatcgaaagggccactgcgttcgaccgtatggatgtgcaataatgattcatgtaaacaacgtgttcaataaacagcactttattttttacatgtatcgaggctctggattacttatttatttacaagtcgaatgggttctgacgagaatcagaatgacccgcaggcagtgatacgttgcggaactgatacttgggttgccacttgaattcgggaatcaccaacttgggaaccggtatatcgggcaggatgtcactccacagctttctggtcagctgcaaagctcccagcaggtcaggagccgaaatcttgaaatcacaattaggaccagtgctctgagcgcgagagttgcggtacaccggattgcagcactgaaacaccatcagcgacggatgtcttacgcttgccagcacggtgggatctgcaatcatgcccacatccagatcttcagcattggcaatgctgaacggggtcatcttgcaggtctgcctacccatggcgggcacccaattaggcttgtggttacaatcgcagtgcagggggatcagtatcatcttggcctgatcctgtctgattcctggatacacggctctcatgaaagcatcatattgcttgaaagcctgctgggctttactaccctcggtataaaacatcccgcaggacctgctcgaaaactggttagctgcgcagccggcatcattcacacagcagcgggcgtcattgttggctatttgcaccacacttctgccccagcggttttgggtgattttggttcgctcgggattctccttcaaggctcgttgtccgttctcgctggccacatccatctcgataatctgctccttctgaatcataatattgccatgcaagcacttcagcttgccctcataatcattgcagccatgaggccacaacgcacagcctgtacattcccaattatggtgggcgatctgagaaaaagaatgtatcattccctgcagaaatcttcccatcatcgtgctcagtgtcttgtgactagtgaaagttaactggatgcctcggtgctcctcgttcacgtactggtgacagatgcgcttgtattgttcgtgctgctcaggcattagtttaaaagaggttctaagttcgttatccagcctgtacttctccatcagcagacacatcacttccatgcctttctcccaagcagacaccaggggcaagctaatcggattcttaacagtgcaggcagcagctcctttagccagagggtcatctttggcgatcttctcaatgcttcttttgccatccttctcaacgatgcgcacgggcgggtagctgaaacccactgctacaagttgcgcctcttctctttcttcttcgctgtcttgactgatgtcttgcatggggacatgtttggtcttccttggcttctttttcgggggtatcggaggaggaggactgtcgctccgttccggagacagggaggattgtgacgtttcgctcaccattaccaactgactgtcggtagaagaacctgaccccacacggcgacaggtgtttctcttcgggggcagaggtggaggcgattgcgaagggctgcggtccgacctggaaggcggatgactggcagaaccccttccgcgttcgggggtgtgctccctgtggcggtcgcttaactgatttccttcgcggctggccattgtgttctcctaggcagagaaacaacagacatggaaactcagccattgctgtcaacatcgccacgagtgccatcacatctcgtcctcagcgacgaggaaaaggagcagagcttaagcattccaccgcccagtcctgccaccacctctaccctagaagataaggaggtcgacgcatctcatgacatgcagaataaaaaagcgaaagagtctgagccagacatcgaacaagacccgggctatgtgacaccggtggaacacgaggaagagttgaaacgctttctagagagagaggatgaaaactgcccaaaacagcaagcggataactatcaccaagatgctggaaatagggatcagaacaccgactacctcatagggcttgacggggaagacgcgctccttaaacatctagcaagacagtcactcatagtcaaggatgcattattggacagaactgaagtgcccatcagtgtcgaagagctcagccgcgcctacgagcttaacctattttcacctcgtactccccccaaacgtcagccaaacggcacctgcgagccaaatcctcgcttaaacttttatccagcttttgctgtgccagaagtactggctacctatcacatcttttttaaaaatcaaaaaattccagtctcctgccgcgctaatcgcacccgcgccgatgccctactcaatctgggacctggttcacgcttacctgatatagcttccttggaagaggttccaaagatcttcgagggtctgggcaataatgagactcgggccgcaaatgctctgcaaaagggagaaaatggcatggatgagcatcacagcgttctggtggaattggaaggcgataatgccagactcgcagtactcaagcgaagcgtcgaggtcacacactttgcataccccgctgtcaacctgccccctaaagtcatgacggccgtcatggaccagttactcattaagcgcgcaagtcccctttcagaagacatgcatgacccagatgcctgtgatgagggtaaaccagtggtcagtgatgagcagctaacccgatggctgggcaccgactctccccgggatttggaagagcgtcgcaagcttatgatggccgtggtgctggttaccgtagaactagagtgtcttcggcgtttctttaccgattcagaaaccttgcgcaaactcgaagagaatctgcactacacttttagacacggctttgtgcggcaggcatgcaagatatctaacgtggaactcaccaacctggtttcctacatgggtattctgcatgagaatcgcctaggacaaagcgtgctgcacagcacccttaagggggaagcccgccgtgattacatccgcgattgtgtttatctctacctgtgccacacgtggcaaaccggcatgggtgtatggcagcaatgtttagaagaacagaacctgaaagagctaaacaagctcttacagaaatctcttaaggttctgtggacagggttcgacgagcgcaccgtcgcttccgacctggcagacctcatcttcccagagcgtctcagggttactttgcgaaacggactgcctgactttatgagccagagcatgcttaacaattttcgctctttcatcctggaacgctccggtatcctgcccgccacctgctgcgcactgccctccgactttgtgcctctcacctaccgcgaatgccccccgccgctatggagtcactgctacctgttccgtctggccaactacctctcctaccactcggatgtgatcgaggatgtgagcggagacggcttgctggagtgtcactgccgctgcaatctgtgcacgccccaccggtccctagcttgcaacccccagttgatgagcgaaacccagataataggcacctttgaattgcaaggccccagcagccaaggcgatgggtcttctcctgggcaaagtttaaaactgaccccgggactgtggacctccgcctacttgcgcaagtttgccccggaagattaccacccctatgaaatcaagttctatgaggaccaatcacagcctccgaaagccgaactttcggcctgcgtcatcacccagggggcaattctggcccaattgcaagccatccaaaaatcccgccaagaatttctactgaaaaagggtaagggggtctaccttgacccccagaccggcgaggaactcaacacaaggttccctcaggatgtcccaacgacgagaaagcaagaagttgaaggtgcagccgccgcccccagaagatatggaggaagattgggacagtcaggcagaggaagcggaggaggaggacagtctggaggacagtctggaggaagacagtttggaggaggaaaacgaggaggcagaggaggtggaagaagtaaccgccgacaaacagttatcctcggctgcggagacaagcaacagcgctaccatctccgctccgagtcgaggaacccggcggcgtcccagcagtagatgggacgagaccggacgcttcccgaacccaaccagcgcttccaagaccggtaagaaggatcggcagggatacaagtcctggcgggggcataagaatgccatcatctcctgcttgcatgagtgcgggggcaacatatccttcacgcggcgctacttgctattccaccatggggtgaactttccgcgcaatgttttgcattactaccgtcacctccacagcccctactatagccagcaaatcccggcagtctcgacagataaagacagcggcggcgacctccaacagaaaaccagcagcggcagttagaaaatacacaacaagtgcagcaacaggaggattaaagattacagccaacgagccagcgcaaacccgagagttaagaaatcggatctttccaaccctgtatgccatcttccagcagagtcggggccaagagcaggaactgaaaataaaaaaccgatctctgcgttcgctcaccagaagttgtttgtatcacaagagcgaagatcaacttcagcgcactctcgaggacgccgaggctctcttcaacaagtactgcgcgctgactcttaaagagtaggcagcgaccgcgcttattcaaaaaaggcgggaattacatcatcctcgacatgagtaaagaaattcccacgccttacatgtggagttatcagccccaaatgggattggcggcaggcgcctcccaggactactccacccgcatgaattggctcagcgccgggccttctatgatttctcgagttaatgatatacgcgcctaccgaaaccaaatacttttggaacagtcagctcttaccaccacgccccgccaacaccttaatcccagaaattggcccgccgccctagtgtaccaggaaagtcccgctcccaccactgtattacttcctcgagacgcccaggccgaagtccaaatgactaatgcaggtgcgcagttagcgggcggctccaccctatgtcgtcacaggcctcggcataatataaaacgcctgatgatcagaggccgaggtatccagctcaacgacgagtcggtgagctctccgcttggtctacgaccagacggaatctttcagattgccggctgcgggagatcttccttcacccctcgtcaggctgttctgactttggaaagttcgtcttcgcaaccccgctcgggcggaatcgggaccgttcaatttgtggaggagtttactccctctgtctacttcaaccccttctccggatctcctgggcactacccggacgagttcataccgaacttcgacgcgattagcgagtcagtggacggctacgattgatgtctggtgacgcggctgagctatctcggctgcgacatctagaccactgccgccgctttcgctgctttgcccgggaactcattgagttcatctacttcgaactccccaaggatcaccctcaaggtccggcccacggagtgcggattactatcgaaggcaaaatacactctcgcctgcaacgaattttctcccagcggcccgtgctgatcgagcgagaccagggaaacaccacggtttccatctactgcatttgtaatcaccccggattgcatgaaagcctttgctgtcttatgtgtactgagtttaataaaaactgaattaagactctcctacggactgccgcttcttcaacccggattttacaaccagaagaacgaaacttttcctgtcgtccaggactctgttaacttcacctttcctactcacaaactagaagctcaacgactacaccgcttttccagaagcattttccctactaatactactttcaaaaccggaggtgagctccaaggtcttcctacagaaaacccttgggtggaagcgggccttgtagtgctaggaattcttgcgggtgggcttgtgattattctttgctacctatacacaccttgcttcactttcctagtggtgttgtggtattggtttaaaaaatggggcccatactagtcttgcttgttttactttcgcttttggaaccgggttctgccaattacgatccatgtctagacttcgacccagaaaactgcacacttacttttgcacccgacacaagccgcatctgtggagttcttattaagtgcggatgggaatgcaggtccgttgaaattacacacaataacaaaacctggaacaataccttatccaccacatgggagccaggagttcccgagtggtacactgtctctgtccgaggtcctgacggttccatccgcattagtaacaacactttcattttttctgaaatgtgcgatctggccatgttcatgagcaaacagtattctctatggcctcctagcaaggacaacatcgtaacgttctccattgcttattgcttgtgcgcttgccttcttactgctttactgtgcgtatgcatacacctgcttgtaaccactcgcatcaaaaacgccaataacaaagaaaaaatgccttaacctctttctgtttacagacatggcttctcttacatctctcatatttgtcagcattgtcactgccgctcacggacaaacagtcgtctctatccctctaggacataattacactctcataggacccccaatcacttcagaggtcatctggaccaaactgggaagcgttgattactttgatataatctgcaacaaaacaaaaccaataatagtaacttgcaacatacaaaatcttacattgattaatgttagcaaagtttacagcggttactattatggttatgacagatacagtagtcaatatagaaattacttggttcgtgttacccagttaaaaaccacgaaaatgccaaatatggcaaagattcgatccgatgacaattctctagaaacttttacatctcccaccacacccgacgaaaaaaacatcccagattcaatgattgcaattgttgcagcggtggcagtggtgatggcactaataataatatgcatgcttttatatgcttgtcgctacaaaaagtttcatcctaaaaaacaagatctcctactaaggcttaacatttaatttctttttatacagccatggtttccactaccacattccttatgcttactagtcttgcaactctgacttctgctcgctcacacctcactgtaactataggctcaaactgcacactaaaaggacctcaaggtggtcatgtcttttggtggagaatatatgacaatggatggtttacaaaaccatgtgaccaacctggtagatttttctgcaacggcagagacctaaccattatcaacgtgacagcaaatgacaaaggcttctattatggaaccgactataaaagtagtttagattataacattattgtactgccatctaccactccagcaccccgcacaactactttctctagcagcagtgtcgctaacaatacaatttccaatccaacctttgccgcgcttttaaaacgcactgtgaataattctacaacttcacatacaacaatttccacttcaacaatcagcattatcgctgcagtgacaattggaatatctattcttgtttttaccataacctactacgcctgctgctatagaaaagacaaacataaaggtgatccattacttagatttgatatttaatttgttctttttttttttatttacagtatggtgaacaccaatcatggtacctagaaatttcttcttcaccatactcatttgtgcatttaatgtttgcgctactttcacagcagtagccacagcaaccccagactgtataggagcatttgcttcctatgcactttttgcttttgttacttgcatctgcgtatgtagcatagtctgcctggttattaattttttccaacttctagactggatccttgtgcgaattgcctacctgcgccaccatcccgaataccgcaaccaaaatatcgcggcacttcttagactcatctaaaaccatgcaggctatactaccaatatttttgcttctattgcttccctacgctgtctcaaccccagctgcctatagtactccaccagaacaccttagaaaatgcaaattccaacaaccgtggtcatttcttgcttgctatcgagaaaaatcagaaattcccccaaatttaataatgattgctggaataattaatataatctgttgcaccataatttcatttttgatataccccctatttgattttggctggaatgctcccaatgcacatgatcatccacaagacccagaggaacacattcccctacaaaacatgcaacatccaatagcgctaatagattacgaaagtgaaccacaacccccactactccctgctattagttacttcaacctaaccggcggagatgactgaaacactcaccacctccaattccgccgaggatctgctcgatatggacggccgcgtctcagaacagcgacttgcccaactacgcatccgccagcagcaggaacgcgcggccaaagagctcagagatgtcatccaaattcaccaatgcaaaaaaggcatattctgtttggtaaaacaagccaagatatcctacgagatcaccgctactgaccatcgcctctcttacgaacttggcccccaacgacaaaaatttacctgcatggtgggaatcaaccccatagttatcacccagcaaagtggagatactaagggttgcattcactgctcctgcgattccatcgagtgcacctacaccctgctgaagaccctatgcggcctaagagacctgctaccaatgaattaaaaaatgattaataaaaaatcacttacttgaaatcagcaataaggtctctgttgaaattttctcccagcagcacctcacttccctcttcccaactctggtattctaaaccccgttcagcggcatactttctccatactttaaaggggatgtcaaattttagctcctctcctgtacccacaatcttcatgtctttcttcccagatgaccaagagagtccggctcagtgactccttcaaccctgtctacccctatgaagatgaaagcacctcccaacacccctttataaacccagggtttatttccccaaatggcttcacacaaagcccagacggagttcttactttaaaatgtttaaccccactaacaaccacaggcggatctctacagctaaaagtgggagggggacttacagtggatgacactgatggtaccttacaagaaaacatacgtgctacagcacccattactaaaaataatcactctgtagaactatccattggaaatggattagaaactcaaaacaataaactatgtgccaaattgggaaatgggttaaaatttaacaacggtgacatttgtataaaggatagtattaacaccttatggactggaataaaccctccacctaactgtcaaattgtggaaaacactaatacaaatgatggcaaacttactttagtattagtaaaaaacggagggcttgttaatggctacgtgtctctagttggtgtatcagacactgtgaaccaaatgttcacacaaaagacagcaaacatccaattaagattatattttgactcttctggaaatctattaactgatgaatcagacttaaaaattccacttaaaaataaatcttctacagcgaccagtgaaactgtagccagcagcaaagcctttatgccaagtactacagcttatcccttcaacaccactactagggatagtgaaaactacattcatggaatatgttactacatgactagttatgatagaagtctatttcccttgaacatttctataatgctaaacagccgtatgatttcttccaatgttgcctatgccatacaatttgaatggaatctaaatgcaagtgaatctccagaaagcaacatagctacgctgaccacatccccctttttcttttcttacattacagaagacgacaactaaaataaagtttaagtgtttttatttaaaatcacaaaattcgagtagttattttgcctccaccttcccatttgacagaatacaccaatctctccccacgcacagctttaaacatttggataccattagagatagacattgttttagattccacattccaaacagtttcagagcgagccaatctggggtcagtgatagataaaaatccatcgcgatagtcttttaaagcgctttcacagtccaactgctgcggatgcgaatccggagtctggatcacggtcatctggaagaagaacgatgggaatcataatccgaaaacggtatcggacgattgtgtctcatcaaacccacaagcagccgctgtctgcgtcgctccgtgcaactgctgtttatgggatcagggtccacagtgtcctgaagcatgattttaatagcccttaacatcaactttctggtgcgatgcgcgcagcaacgcattctgatttcactcaaatctttgcagtaggtacaacacattattacaatattgtttaataaaccataattaaaagcgctccagccaaaactcatatctgatataatcgcccctgcatgaccatcataccaaagtttaatataaattaaatgacgttccctcaaaaacacactacccacatacatgatctcttttggcatgtgcatattaacaatctgtctgtaccatggacaacgttggttaatcatgcaacccaatataaccttccggaaccacactgccaacaccgctcccccagccatgcattgaagtgaaccctgctgattacaatgacaatgaagaacccaattctctcgaccgtgaatcacttgagaatgaaaaatatctatagtggcacaacatagacataaatgcatgcatcttctcataatttttaactcctcaggatttagaaacatatcccagggaataggaagctcttgcagaacagtaaagctggcagaacaaggaagaccacgaacacaacttacactatgcatagtcatagtatcacaatctggcaacagcgggtggtcttcagtcatagaagctcgggtttcattttcctcacaacgtggtaactgggctctggtgtaagggtgatgtctggcgcatgatgtcgagcgtgcgcgcaaccttgtcataatggagttgcttcctgacattctcgtattttgtatagcaaaacgcggccctggcagaacacactcttcttcgccttctatcctgccgcttagcgtgttccgtgtgatagttcaagtacagccacactcttaagttggtcaaaagaatgctggcttcagttgtaatcaaaactccatcgcatctaattgttctgaggaaatcatccacggtagcatatgcaaatcccaaccaagcaatgcaactggattgcgtttcaagcaggagaggagagggaagagacggaagaaccatgttaatttttattccaaacgatctcgcagtacttcaaattgtagatcgcgcagatggcatctctcgcccccactgtgttggtgaaaaagcacagctaaatcaaaagaaatgcgattttcaaggtgctcaacggtggcttccaacaaagcctccacgcgcacatccaagaacaaaagaataccaaaagaaggagcattttctaactcctcaatcatcatattacattcctgcaccattcccagataattttcagctttccagccttgaattattcgtgtcagttcttgtggtaaatccaatccacacattacaaacaggtcccggagggcgccctccaccaccattcttaaacacaccctcataatgacaaaatatcttgctcctgtgtcacctgtagcgaattgagaatggcaacatcaattgacatgcccttggctctaagttcttctttaagttctagttgtaaaaactctctcatattatcaccaaactgcttagccagaagccccccgggaacaagagcaggggacgctacagtgcagtacaagcgcagacctccccaattggctccagcaaaaacaagattggaataagcatattgggaaccgccagtaatatcatcgaagttgctggaaatataatcaggcagagtttcttgtaaaaattgaataaaagaaaaatttgccaaaaaaacattcaaaacctctgggatgcaaatgcaataggttaccgcgctgcgctccaacattgttagttttgaattagtctgcaaaaataaaaaaaaaaacaagcgtcatatcatagtagcctgacgaacaggtggataaatcagtctttccatcacaagacaagccacagggtctccagctcgaccctcgtaaaacctgtcatggtgattaaacaacagcaccgaaagttcctcgcggtgaccagcatgaataattcttgatgaagcatacaatccagacatgttagcatcagttaacgagaaaaaacagccaacatagcctttgggtataattatgcttaatcgtaagtatagcaaagccacccctcgcggatacaaagtaaaaggcacaggagaataaaaaatataattatttctctgctgctgttcaggcaacgtcgcccccggtccctctaaatacacatacaaagcctcatcagccatggcttaccagacaaagtacagcgggcacgcacaagctctaaagtcactctccaacctctccacaatatatatacacaagccctaaactgacgtaatgggagtaaagtgtaaaaaatcccgccaaacccaacacacaccccgaaactgcgtcaccagggaaaagtacagtttcacttccgcaatcccaacaagcgtcacttcctctttctcacggtacgtcacatcccattaacttgcaacgtcattttcccacggccgcgccgccccgtttagccgttaaccccacagccaatcaccacacaccccacaatttttaaaatcacctcatttacatattggcaccattccatctataaggtatattattgatgatg

SEQ ID NO: 216 - DNA, 34794 bp, Human adenovirus
  misc_feature 1..34794: note = Reference Ad35 Genome Sequence: GenBank accession no. AY128640 (SEQ ID NO: 216); Human adenovirus 35
  source 1..34794: mol_type = genomic DNA
catcatcaataatataccttatagatggaatggtgccaatatgtaaatgaggtgattttaaaaagtgtgggccgtgtggtgattggctgtggggttaacggttaaaaggggcggcgcggccgtgggaaaatgacgttttatgggggtggagtttttttgcaagttgtcgcgggaaatgttacgcataaaaaggcttcttttctcacggaactacttagttttcccacggtatttaacaggaaatgaggtagttttgaccggatgcaagtgaaaattgctgattttcgcgcgaaaactgaatgaggaagtgtttttctgaataatgtggtatttatggcagggtggagtatttgttcagggccaggtagactttgacccattacgtggaggtttcgattaccgtgttttttacctgaatttccgcgtaccgtgtcaaagtcttctgtttttacgtaggtgtcagctgatcgctagggtatttatacctcagggtttgtgtcaagaggccactcttgagtgccagcgagaagagttttctcctctgcgccggcagtttaataataaaaaaatgagagatttgcgatttctgcctcaggaaataatctctgctgagactggaaatgaaatattggagcttgtggtgcacgccctgatgggagacgatccggagccacctgtgcagctttttgagcctcctacgcttcaggaactgtatgatttagaggtagagggatcggaggattctaatgaggaagctgtgaatggcttttttaccgattctatgcttttagctgctaatgaaggattagaattagatccgcctttggacactttcaatactccaggggtgattgtggaaagcggtacaggtgtaagaaaattacctgatttgagttccgtggactgtgatttgcactgctatgaagacgggtttcctccgagtgatgaggaggaccatgaaaaggagcagtccatgcagactgcagcgggtgagggagtgaaggctgccaatgttggttttcagttggattgcccggagcttcctggacatggctgtaagtcttgtgaatttcacaggaaaaatactggagtaaaggaactgttatgttcgctttgttatatgagaacgcactgccactttatttacagtaagtgtgtttaagttaaaatttaaaggaatatgctgtttttcacatgtatattgagtgtgagttttgtgcttcttattataggtcctgtgtctgatgctgatgaatcaccatctcctgattctactacctcacctcctgatattcaagcacctgttcctgtggacgtgcgcaagcccattcctgtgaagcttaagcctgggaaacgtccagcagtggagaaacttgaggacttgttacagggtggggacggacctttggacttgagtacacggaaacgtccaagacaataagtgttccatatccgtgtttacttaaggtgacgtcaatatttgtgtgagagtgcaatgtaataaaaatatgttaactgttcactggtttttattgctttttgggcggggactcaggtatataagtagaagcagacctgtgtggttagctcataggagctggctttcatccatggaggtttgggccattttggaagaccttaggaagactaggcaactgttagagagcgcttcggacggagtctccggtttttggagattctggttcgctagtgaattagctagggtagtttttaggataaaacaggactataaacaagaatttgaaaagttgttggtagattgcccaggactttttgaagctcttaatttgggccatcaggttcactttaaagaaaaagttttatcagttttagacttttcaaccccaggtagaactgctgctgctgtggcttttcttacttttatattagataaatggatcccgcagactcatttcagcaggggatacgttttggatttcatagccacagcattgtggagaacatggaaggttcgcaagatgaggacaatcttaggttactggccagtgcagcctttgggtgtagcgggaatcctgaggcatccaccggtcatgccagcggttctggaggaggaacagcaagaggacaacccgagagccggcctggaccctccagtggaggaggcggagtagctgacttgtctcctgaactgcaacgggtgcttactggatctacgtccactggacgggataggggcgttaagagggagagggcatccagtggtactgatgctagatctgagttggctttaagtttaatgagtcgcagacgtcctgaaaccatttggtggcatgaggttcagaaagagggaagggatgaagtttctgtattgcaggagaaatattcactggaacaggtgaaaacatgttggttggagccagaggatgattgggaggtggccattaaaaattatgccaagatagctttgaggcctgataaacagtataagatcagtagacggattaatatccggaatgcttgttacatatctggaaatggggctgaggtggtaatagatactcaagacaagacagttattagatgctgcatgatggatatgtggcctggagtagtcggtatggaagcagtcacttttgtaaatgttaagtttaggggagatggttataatggaatagtgtttatggccaataccaaacttatattgcatggttgtagcttttttggtttcaacaatacctgtgtagatgcctggggacaggttagtgtacgggggtgtagtttctatgcgtgttggattgccacagctggcagaaccaagagtcaattgtctctgaagaaatgcatattccaaagatgtaacctgggcattctgaatgaaggcgaagcaagggtccgtcactgcgcttctacagatactggatgttttattttaattaagggaaatgccagcgtaaagcataacatgatttgtggtgcttccgatgagaggccttatcaaatgctcacttgtgctggtgggcattgtaatatgctggctactgtgcatattgtttcccatcaacgcaaaaaatggcctgtttttgatcacaatgtgttgaccaagtgcaccatgcatgcaggtgggcgtagaggaatgtttatgccttaccagtgtaacatgaatcatgtgaaagtgttgttggaaccagatgccttttccagaatgagcctaacaggaatctttgacatgaacacgcaaatctggaagatcctgaggtatgatgatacgagatcgagggtgcgcgcatgcgaatgcggaggcaagcatgccaggttccagccggtgtgtgtagatgtgaccgaagatctcagaccggatcatttggttattgcccgcactggagcagagttcggatccagtggagaagaaactgactaaggtgagtattgggaaaactttggggtgggattttcagatggacagattgagtaaaaatttgttttttctgtcttgcagctgacatgagtggaaatgcttcttttaaggggggagtcttcagcccttatctgacagggcgtctcccatcctgggcaggagttcgtcagaatgttatgggatctactgtggatggaagacccgttcaacccgccaattcttcaacgctgacctatgctactttaagttcttcacctttggacgcagctgcagccgctgccgccgcctctgtcgccgctaacactgtgcttggaatgggttactatggaagcatcgtggctaattccacttcctctaataacccttctacactgactcaggacaagttacttgtccttttggcccagctggaggctttgacccaacgtctgggtgaactttctcagcaggtggccgagttgcgagtacaaactgagtctgctgtcggcacggcaaagtctaaataaaaaaaattccagaatcaatgaataaataaacgagcttgttgttgatttaaaatcaagtgtttttatttcatttttcgcgcacggtatgccctggaccaccgatctcgatcattgagaactcggtggattttttccagaatcctatagaggtgggattgaatgtttagatacatgggcattaggccgtctttggggtggagatagctccattgaagggattcatgctccggggtagtgttgtaaatcacccagtcataacaaggtcgcagtgcatggtgttgcacaatatcttttagaagtaggctgattgccacagataagcccttggtgtaggtgtttacaaaccggttgagctgggaggggtgcattcgaggtgaaattatgtgcattttggattggatttttaagttggcaatattgccgccaagatcccgtcttgggttcatgttatgaaggactaccaagacggtgtatccggtacatttaggaaatttatcgtgcagcttggatggaaaagcgtggaaaaatttggagacacccttgtgtcctccgagattttccatgcactcatccatgataatagcaatggggccgtgggcagcggcgcgggcaaacacgttccgtgggtctgacacatcatagttatgttcctgagttaaatcatcataagccattttaatgaatttggggcggagcgtaccagattggggtatgaatgttccttcgggccccggagcatagttcccctcacagatttgcatttcccaagctttcagttctgagggtggaatcatgtccacctggggggctatgaagaacaccgtttcgggggcgggggtgattagttgggatgatagcaagtttctgagcaattgagatttgccacatccggtggggccataaataattccgattacaggttgcaggtggtagtttagggaacggcaactgccgtcttctcgaagcaagggggccacctcgttcatcatttcccttacatgcatattttcccgcaccaaatccattaggaggcgctctcctcctagtgatagaagttcttgtagtgaggaaaagtttttcagcggttttagaccgtcagccatgggcattttggaaagagtttgctgcaaaagttctagtctgttccacagttcagtgatgtgttctatggcatctcgatccagcagacctcctcgtttcgcgggtttggacggctcctggagtagggtatgagacgatgggcgtccagcgctgccagggttcggtccttccagggtctcagtgttcgagtcagggttgtttccgtcacagtgaaggggtgtgcgcctgcttgggcgcttgccagggtgcgcttcagactcattctgctggtggagaacttctgtcgcttggcgccctgtatgtcggccaagtagcagtttaccatgagttcgtagttgagcgcctcggctgcgtggcctttggcgcggagcttacctttggaagttttcttgcataccgggcagtataggcatttcagcgcatacagcttgggcgcaaggaaaatggattctggggagtatgcatccgcgccgcaggaggcgcaaacagtttcacattccaccagccaggttaaatccggttcattggggtcaaaaacaagttttccgccatattttttgatgcgtttcttacctttggtctccataagttcgtgtcctcgttgagtgacaaacaggctgtccgtatctccgtagactgattttacaggcctcttctccagtggagtgcctcggtcttcttcgtacaggaactctgaccactctgatacaaaggcgcgcgtccaggccagcacaaaggaggctatgtgggaggggtagcgatcgttgtcaaccagggggtccaccttttccaaagtatgcaaacacatgtcaccctcttcaacatccaggaatgtgattggcttgtaggtgtatttcacgtgacctggggtccccgctgggggggtataaaagggggcggttctttgctcttcctcactgtcttccggatcgctgtccaggaacgtcagctgttggggtaggtattccctctcgaaggcgggcatgacctctgcactcaggttgtcagtttctaagaacgaggaggatttgatattgacagtgccggttgagatgcctttcatgaggttttcgtccatttggtcagaaaacacaatttttttattgtcaagtttggtggcaaatgatccatacagggcgttggataaaagtttggcaatggatcgcatggtttggttcttttccttgtccgcgcgctctttggcggcgatgttgagttggacatactcgcgtgccaggcacttccattcggggaagatagttgttaattcatctggcacgattctcacttgccaccctcgattatgcaaggtaattaaatccacactggtggccacctcgcctcgaaggggttcattggtccaacagagcctacctcctttcctagaacagaaagggggaagtgggtctagcataagttcatcgggagggtctgcatccatggtaaagattcccggaagtaaatccttatcaaaatagctgatgggagtggggtcatctaaggccatttgccattctcgagctgccagtgcgcgctcatatgggttaaggggactgccccagggcatgggatgggtgagagcagaggcatacatgccacagatgtcatagacgtagatgggatcctcaaagatgcctatgtaggttggatagcatcgcccccctctgatacttgctcgcacatagtcatatagttcatgtgatggcgctagcagccccggacccaagttggtgcgattgggtttttctgttctgtagacgatctggcgaaagatggcgtgagaattggaagagatggtgggtctttgaaaaatgttgaaatgggcatgaggtagacctacagagtctctgacaaagtgggcataagattcttgaagcttggttaccagttcggcggtgacaagtacgtctagggcgcagtagtcaagtgtttcttgaatgatgtcataacctggttggtttttcttttcccacagttcgcggttgagaaggtattcttcgcgatccttccagtactcttctagcggaaacccgtctttgtctgcacggtaagatcctagcatgtagaactgattaactgccttgtaagggcagcagcccttctctacgggtagagagtatgcttgagcagcttttcgtagcgaagcgtgagtaagggcaaaggtgtctctgaccatgactttgagaaattggtatttgaagtccatgtcgtcacaggctccctgttcccagagttggaagtctacccgtttcttgtaggcggggttgggcaaagcgaaagtaacatcattgaagagaatcttaccggctctgggcataaaattgcgagtgatgcggaaaggctgtggtacttccgctcgattgttgatcacctgggcagctaggacgatttcgtcgaaaccgttgatgttgtgtcctacgatgtataattctatgaaacgcggcgtgcctctgacgtgaggtagcttactgagctcatcaaaggttaggtctgtggggtcagataaggcgtagtgttcgagagcccattcgtgcaggtgaggatttgcatgtaggaatgatgaccaaagatctaccgccagtgctgtttgtaactggtcccgatactgacgaaaatgccggccaattgccattttttctggagtgacacagtagaaggttctggggtcttgttgccatcgatcccacttgagtttaatggctagatcgtgggccatgttgacgagacgctcttctcctgagagtttcatgaccagcatgaaaggaactagttgtttgccaaaggatcccatccaggtgtaagtttccacatcgtaggtcaggaagagtctttctgtgcgaggatgagagccgatcgggaagaactggatttcctgccaccagttggaggattggctgttgatgtgatggaagtagaagtttctgcggcgcgccgagcattcgtgtttgtgcttgtacagacggccgcagtagtcgcagcgttgcacgggttgtatctcgtgaatgagctgtacctggcttcccttgacgagaaatttcagtgggaagccgaggcctggcgattgtatctcgtgctcttctatattcgctgtatcggcctgttcatcttctgtttcgatggtggtcatgctgacgagcccccgcgggaggcaagtccagacctcggcgcgggaggggcggagctgaaggacgagagcgcgcaggctggagctgtccagagtcctgagacgctgcggactcaggttagtaggtagggacagaagattaacttgcatgatcttttccagggcgtgcgggaggttcagatggtacttgatttccacaggttcgtttgtagagacgtcaatggcttgcagggttccgtgtcctttgggcgccactaccgtacctttgttttttcttttgatcggtggtggctctcttgcttcttgcatgctcagaagcggtgacggggacgcgcgccgggcggcagcggttgttccggacccgggggcatggctggtagtggcacgtcggcgccgcgcacgggcaggttctggtattgcgctctgagaagacttgcgtgcgccaccacgcgtcgattgacgtcttgtatctgacgtctctgggtgaaagctaccggccccgtgagcttgaacctgaaagagagttcaacagaatcaatttcggtatcgttaacggcagcttgtctcagtatttcttgtacgtcaccagagttgtcctggtaggcgatctccgccatgaactgctcgatttcttcctcctgaagatctccgcgacccgctctttcgacggtggccgcgaggtcattggagatacggcccatgagttgggagaatgcattcatgcccgcctcgttccagacgcggctgtaaaccacggccccctcggagtctcttgcgcgcatcaccacctgagcgaggttaagctccacgtgtctggttaagaccgcatagttgcataggcgctgaaaaaggtagttgagtgtggtggcaatgtgttcggcgacgaagaaatacatgatccatcgtctcagcggcatttcgctaacatcgcccagagcttccaagcgctccatggcctcgtagaagtccacggcaaaattaaaaaactgggagtttcgcgcggacacggtcaattcctcctcgagaagacggatgagttcggctatggtggcccgtacttcgcgttcgaaggctcccgggatctcttcttcctcttctatctcttcttccactaacatctcttcttcgtcttcaggcgggggcggagggggcacgcggcgacgtcgacggcgcacgggcaaacggtcgatgaatcgttcaatgacctctccgcggcggcggcgcatggtttcagtgacggcgcggccgttctcgcgcggtcgcagagtaaaaacaccgccgcgcatctccttaaagtggtgactgggaggttctccgtttgggagggagagggcgctgattatacattttattaattggcccgtagggactgcgcgcagagatctgatcgtgtcaagatccacgggatctgaaaacctttcgacgaaagcgtctaaccagtcacagtcacaaggtaggctgagtacggcttcttgtgggcgggggtggttatgtgttcggtctgggtcttctgtttcttcttcatctcgggaaggtgagacgatgctgctggtgatgaaattaaagtaggcagttctaagacggcggatggtggcgaggagcaccaggtctttgggtccggcttgctggatacgcaggcgattggccattccccaagcattatcctgacatctagcaagatctttgtagtagtcttgcatgagccgttctacgggcacttcttcctcacccgttctgccatgcatacgtgtgagtccaaatccgcgcattggttgtaccagtgccaagtcagctacgactctttcggcgaggatggcttgctgtacttgggtaagggtggcttgaaagtcatcaaaatccacaaagcggtggtaagcccctgtattaatggtgtaagcacagttggccatgactgaccagttaactgtctggtgaccagggcgcacgagctcggtgtatttaaggcgcgaataggcgcgggtgtcaaagatgtaatcgttgcaggtgcgcaccagatactggtaccctataagaaaatgcggcggtggttggcggtagagaggccatcgttctgtagctggagcgccaggggcgaggtcttccaacataaggcggtgatagccgtagatgtacctggacatccaggtgattcctgcggcggtagtagaagcccgaggaaactcgcgtacgcggttccaaatgttgcgtagcggcatgaagtagttcattgtaggcacggtttgaccagtgaggcgcgcgcagtcattgatgctctatagacacggagaaaatgaaagcgttcagcgactcgactccgtagcctggaggaacgtgaacgggttgggtcgcggtgtaccccggttcgagacttgtactcgagccggccggagccgcggctaacgtggtattggcactcccgtctcgacccagcctacaaaaatccaggatacggaatcgagtcgttttgctggtttccgaatggcagggaagtgagtcctatttttttttttttttgccgctcagaatgcatcccgtgctgcgacagatgcgcccccaacaacagcccccctcgcagcagcagcagcagcaaccacaaaaggctgtccctgcaactactgcaactgccgccgtgagcggtgcgggacagcccgcctatgatctggacttggaagagggcgaaggactggcacgtctaggtgcgccttcgcccgagcggcatccgcgagttcaactgaaaaaagattctcgcgaggcgtatgtgccccaacagaacctatttagagacagaagcggcgaggagccggaggagatgcgagcttcccgctttaacgcgggtcgtgagctgcgtcacggtttggaccgaagacgagtgttgcgagacgaggatttcgaagttgatgaagtgacagggatcagtcctgccagggcacacgtggctgcagccaaccttgtatcggcttacgagcagacagtaaaggaagagcgtaacttccaaaagtcttttaataatcatgtgcgaaccctgattgcccgcgaagaagttacccttggtttgatgcatttgtgggatttgatggaagctatcattcagaaccctactagcaaacctctgaccgcccagctgtttctggtggtgcaacacagcagagacaatgaggctttcagagaggcgctgctgaacatcaccgaacccgaggggagatggttgtatgatcttatcaacattctacagagtatcatagtgcaggagcggagcctgggcctggccgagaaggtagctgccatcaattactcggttttgagcttgggaaaatattacgctcgcaaaatctacaagactccatacgttcccatagacaaggaggtgaagatagatgggttctacatgcgcatgacgctcaaggtcttgaccctgagcgatgatcttggggtgtatcgcaatgacagaatgcatcgcgcggttagcgccagcaggaggcgcgagttaagcgacagggaactgatgcacagtttgcaaagagctctgactggagctggaaccgagggtgagaattacttcgacatgggagctgacttgcagtggcagcctaatcgcagggctctgagcgccgcgacggcaggatgtgagcttccttacatagaagaggcggatgaaggcgaggaggaagagggcgagtacttggaagactgatggcacaacccgtgttttttgctagatggaacagcaagcaccggatcccgcaatgcgggcggcgctgcagagccagccgtccggcattaactcctcggacgattggacccaggccatgcaacgtatcatggcgttgacgactcgcaaccccgaagcctttagacagcaaccccaggccaaccgtctatcggccatcatggaagctgtagtgccttcccgatctaatcccactcatgagaaggtcctggccatcgtgaacgcgttggtggagaacaaagctattcgtccagatgaggccggactggtatacaacgctctcttagaacgcgtggctcgctacaacagtagcaatgtgcaaaccaatttggaccgtatgataacagatgtacgcgaagccgtgtctcagcgcgaaaggttccagcgtgatgccaacctgggttcgctggtggcgttaaatgctttcttgagtactcagcctgctaatgtgccgcgtggtcaacaggattatactaactttttaagtgctttgagactgatggtatcagaagtacctcagagcgaagtgtatcagtccggtcctgattacttctttcagactagcagacagggcttgcagacggtaaatctgagccaagcttttaaaaaccttaaaggtttgtggggagtgcatgccccggtaggagaaagagcaaccgtgtctagcttgttaactccgaactcccgcctgttattactgttggtagctcctttcaccgacagcggtagcatcgaccgtaattcctatttgggttacctactaaacctgtatcgcgaagccatagggcaaagtcaggtggacgagcagacctatcaagaaattacccaagtcagtcgcgctttgggacaggaagacactggcagtttggaagccactctgaacttcttgcttaccaatcggtctcaaaagatccctcctcaatatgctcttactgcggaggaggagaggatccttagatatgtgcagcagagcgtgggattgtttctgatgcaagagggggcaactccgactgcagcactggacatgacagcgcgaaatatggagcccagcatgtatgccagtaaccgacctttcattaacaaactgctggactacttgcacagagctgccgctatgaactctgattatttcaccaatgccatcttaaacccgcactggctgcccccacctggtttctacacgggcgaatatgacatgcccgaccctaatgacggatttctgtgggacgacgtggacagcgatgttttttcacctctttctgatcatcgcacgtggaaaaaggaaggcggtgatagaatgcattcttctgcatcgctgtccggggtcatgggtgctaccgcggctgagcccgagtctgcaagtccttttcctagtctacccttttctctacacagtgtacgtagcagcgaagtgggtagaataagtcgcccgagtttaatgggcgaagaggagtacctaaacgattccttgctcagaccggcaagagaaaaaaatttcccaaacaatggaatagaaagtttggtggataaaatgagtagatggaagacttatgctcaggatcacagagacgagcctgggatcatggggactacaagtagagcgagccgtagacgccagcgccatgacagacagaggggtcttgtgtgggacgatgaggattcggccgatgatagcagcgtgttggacttgggtgggagaggaaggggcaacccgtttgctcatttgcgccctcgcttgggtggtatgttgtgaaaaaaaataaaaaagaaaaactcaccaaggccatggcgacgagcgtacgttcgttcttctttattatctgtgtctagtataatgaggcgagtcgtgctaggcggagcggtggtgtatccggagggtcctcctccttcgtacgagagcgtgatgcagcagcagcaggcgacggcggtgatgcaatccccactggaggctccctttgtgcctccgcgatacctggcacctacggagggcagaaacagcattcgttactcggaactggcacctcagtacgataccaccaggttgtatctggtggacaacaagtcggcggacattgcttctctgaactatcagaatgaccacagcaacttcttgaccacggtggtgcagaacaatgactttacccctacggaagccagcacccagaccattaactttgatgaacgatcgcggtggggcggtcagctaaagaccatcatgcatactaacatgccaaacgtgaacgagtatatgtttagtaacaagttcaaagcgcgtgtgatggtgtccagaaaacctcccgacggtgctgcagttggggatacttatgatcacaagcaggatattttggaatatgagtggttcgagtttactttgccagaaggcaacttttcagttactatgactattgatttgatgaacaatgccatcatagataattacttgaaagtgggtagacagaatggagtgcttgaaagtgacattggtgttaagttcgacaccaggaacttcaagctgggatgggatcccgaaaccaagttgatcatgcctggagtgtatacgtatgaagccttccatcctgacattgtcttactgcctggctgcggagtggattttaccgagagtcgtttgagcaaccttcttggtatcagaaaaaaacagccatttcaagagggttttaagattttgtatgaagatttagaaggtggtaatattccggccctcttggatgtagatgcctatgagaacagtaagaaagaacaaaaagccaaaatagaagctgctacagctgctgcagaagctaaggcaaacatagttgccagcgactctacaagggttgctaacgctggagaggtcagaggagacaattttgcgccaacacctgttccgactgcagaatcattattggccgatgtgtctgaaggaacggacgtgaaactcactattcaacctgtagaaaaagatagtaagaatagaagctataatgtgttggaagacaaaatcaacacagcctatcgcagttggtatctttcgtacaattatggcgatcccgaaaaaggagtgcgttcctggacattgctcaccacctcagatgtcacctgcggagcagagcaggtttactggtcgcttccagacatgatgaaggatcctgtcactttccgctccactagacaagtcagtaactaccctgtggtgggtgcagagcttatgcccgtcttctcaaagagcttctacaacgaacaagctgtgtactcccagcagctccgccagtccacctcgcttacgcacgtcttcaaccgctttcctgagaaccagattttaatccgtccgccggcgcccaccattaccaccgtcagtgaaaacgttcctgctctcacagatcacgggaccctgccgttgcgcagcagtatccggggagtccaacgtgtgaccgttactgacgccagacgccgcacctgtccctacgtgtacaaggcactgggcatagtcgcaccgcgcgtcctttcaagccgcactttctaaaaaaaaaatgtccattcttatctcgcccagtaataacaccggttggggtctgcgcgctccaagcaagatgtacggaggcgcacgcaaacgttctacccaacatcccgtgcgtgttcgcggacattttcgcgctccatggggtgccctcaagggccgcactcgcgttcgaaccaccgtcgatgatgtaatcgatcaggtggttgccgacgcccgtaattatactcctactgcgcctacatctactgtggatgcagttattgacagtgtagtggctgacgctcgcaactatgctcgacgtaagagccggcgaaggcgcattgccagacgccaccgagctaccactgccatgcgagccgcaagagctctgctacgaagagctagacgcgtggggcgaagagccatgcttagggcggccagacgtgcagcttcgggcgccagcgccggcaggtcccgcaggcaagcagccgctgtcgcagcggcgactattgccgacatggcccaatcgcgaagaggcaatgtatactgggtgcgtgacgctgccaccggtcaacgtgtacccgtgcgcacccgtccccctcgcacttagaagatactgagcagtctccgatgttgtgtcccagcggcgaggatgtccaagcgcaaatacaaggaagaaatgctgcaggttatcgcacctgaagtctacggccaaccgttgaaggatgaaaaaaaaccccgcaaaatcaagcgggttaaaaaggacaaaaaagaagaggaagatggcgatgatgggctggcggagtttgtgcgcgagtttgccccacggcgacgcgtgcaatggcgtgggcgcaaagttcgacatgtgttgagacctggaacttcggtggtctttacacccggcgagcgttcaagcgctacttttaagcgttcctatgatgaggtgtacggggatgatgatattcttgagcaggcggctgaccgattaggcgagtttgcttatggcaagcgtagtagaataacttccaaggatgagacagtgtcaatacccttggatcatggaaatcccacccctagtcttaaaccggtcactttgcagcaagtgttacccgtaactccgcgaacaggtgttaaacgcgaaggtgaagatttgtatcccactatgcaactgatggtacccaaacgccagaagttggaggacgttttggagaaagtaaaagtggatccagatattcaacctgaggttaaagtgagacccattaagcaggtagcgcctggtctgggggtacaaactgtagacattaagattcccactgaaagtatggaagtgcaaactgaacccgcaaagcctactgccacctccactgaagtgcaaacggatccatggatgcccatgcctattacaactgacgccgccggtcccactcgaagatcccgacgaaagtacggtccagcaagtctgttgatgcccaattatgttgtacacccatctattattcctactcctggttaccgaggcactcgctactatcgcagccgaaacagtacctcccgccgtcgccgcaagacacctgcaaatcgcagtcgtcgccgtagacgcacaagcaaaccgactcccggcgccctggtgcggcaagtgtaccgcaatggtagtgcggaacctttgacactgccgcgtgcgcgttaccatccgagtatcatcacttaatcaatgttgccgctgcctccttgcagatatggccctcacttgtcgccttcgcgttcccatcactggttaccgaggaagaaactcgcgccgtagaagagggatgttgggacgcggaatgcgacgctacaggcgacggcgtgctatccgcaagcaattgcggggtggttttttaccagccttaattccaattatcgctgctgcaattggcgcgataccaggcatagcttccgtggcggttcaggcctcgcaacgacattgacattggaaaaaaaacgtataaataaaaaaaaatacaatggactctgacactcctggtcctgtgactatgttttcttagagatggaagacatcaatttttcatccttggctccgcgacacggcacgaagccgtacatgggcacctggagcgacatcggcacgagccaactgaacgggggcgccttcaattggagcagtatctggagcgggcttaaaaattttggctcaaccataaaaacatacgggaacaaagcttggaacagcagtacaggacaggcgcttagaaataaacttaaagaccagaacttccaacaaaaagtagtcgatgggatagcttccggcatcaatggagtggtagatttggctaaccaggctgtgcagaaaaagataaacagtcgtttggacccgccgccagcaaccccaggtgaaatgcaagtggaggaagaaattcctccgccagaaaaacgaggcgacaagcgtccgcgtcccgatttggaagagacgctggtgacgcgcgtagatgaaccgccttcttatgaggaagcaacgaagcttggaatgcccaccactagaccgatagccccaatggccaccggggtgatgaaaccttctcagttgcatcgacccgtcaccttggatttgccccctccccctgctgctactgctgtacccgcttctaagcctgtcgctgccccgaaaccagtcgccgtagccaggtcacgtcccgggggcgctcctcgtccaaatgcgcactggcaaaatactctgaacagcatcgtgggtctaggcgtgcaaagtgtaaaacgccgtcgctgcttttaattaaatatggagtagcgcttaacttgcctatctgtgtatatgtgtcattacacgccgtcacagcagcagaggaaaaaaggaagaggtcgtgcgtcgacgctgagttactttcaagatggccaccccatcgatgctgccccaatgggcatacatgcacatcgccggacaggatgcttcggagtacctgagtccgggtctggtgcagttcgcccgcgccacagacacctacttcaatctgggaaataagtttagaaatcccaccgtagcgccgacccacgatgtgaccaccgaccgtagccagcggctcatgttgcgcttcgtgcccgttgaccgggaggacaatacatactcttacaaagtgcggtacaccctggccgtgggcgacaacagagtgctggatatggccagcacgttctttgacattaggggcgtgttggacagaggtcccagtttcaaaccctattctggtacggcttacaactctctggctcctaaaggcgctccaaatgcatctcaatggattgcaaaaggcgtaccaactgcagcagccgcaggcaatggtgaagaagaacatgaaacagaggagaaaactgctacttacacttttgccaatgctcctgtaaaagccgaggctcaaattacaaaagagggcttaccaataggtttggagatttcagctgaaaacgaatctaaacccatctatgcagataaactttatcagccagaacctcaagtgggagatgaaacttggactgacctagacggaaaaaccgaagagtatggaggcagggctctaaagcctactactaacatgaaaccctgttacgggtcctatgcgaagcctactaatttaaaaggtggtcaggcaaaaccgaaaaactcggaaccgtcgagtgaaaaaattgaatatgatattgacatggaattttttgataactcatcgcaaagaacaaacttcagtcctaaaattgtcatgtatgcagaaaatgtaggtttggaaacgccagacactcatgtagtgtacaaacctggaacagaagacacaagttccgaagctaatttgggacaacagtctatgcccaacagacccaactacattggcttcagagataactttattggactcatgtactataacagtactggtaacatgggggtgctggctggtcaagcgtctcagttaaatgcagtggttgacttgcaggacagaaacacagaactttcttaccaactcttgcttgactctctgggcgacagaaccagatactttagcatgtggaatcaggctgtggacagttatgatcctgatgtacgtgttattgaaaatcatggtgtggaagatgaacttcccaactattgttttccactggacggcataggtgttccaacaaccagttacaaatcaatagttccaaatggagaagataataataattggaaagaacctgaagtaaatggaacaagtgagatcggacagggtaatttgtttgccatggaaattaaccttcaagccaatctatggcgaagtttcctttattccaatgtggctctgtatctcccagactcgtacaaatacaccccgtccaatgtcactcttccagaaaacaaaaacacctacgactacatgaacgggcgggtggtgccgccatctctagtagacacctatgtgaacattggtgccaggtggtctctggatgccatggacaatgtcaacccattcaaccaccaccgtaacgctggcttgcgttaccgatctatgcttctgggtaacggacgttatgtgcctttccacatacaagtgcctcaaaaattcttcgctgttaaaaacctgctgcttctcccaggctcctacacttatgagtggaactttaggaaggatgtgaacatggttctacagagttccctcggtaacgacctgcgggtagatggcgccagcatcagtttcacgagcatcaacctctatgctacttttttccccatggctcacaacaccgcttccacccttgaagccatgctgcggaatgacaccaatgatcagtcattcaacgactacctatctgcagctaacatgctctaccccattcctgccaatgcaaccaatattcccatttccattccttctcgcaactgggcggctttcagaggctggtcatttaccagactgaaaaccaaagaaactccctctttggggtctggatttgacccctactttgtctattctggttctattccctacctggatggtaccttctacctgaaccacacttttaagaaggtttccatcatgtttgactcttcagtgagctggcctggaaatgacaggttactatctcctaacgaatttgaaataaagcgcactgtggatggcgaaggctacaacgtagcccaatgcaacatgaccaaagactggttcttggtacagatgctcgccaactacaacatcggctatcagggcttctacattccagaaggatacaaagatcgcatgtattcatttttcagaaacttccagcccatgagcaggcaggtggttgatgaggtcaattacaaagacttcaaggccgtcgccataccctaccaacacaacaactctggctttgtgggttacatggctccgaccatgcgccaaggtcaaccctatcccgctaactatccctatccactcattggaacaactgccgtaaatagtgttacgcagaaaaagttcttgtgtgacagaaccatgtggcgcataccgttctcgagcaacttcatgtctatgggggcccttacagacttgggacagaatatgctctatgccaactcagctcatgctctggacatgacctttgaggtggatcccatggatgagcccaccctgctttatcttctcttcgaagttttcgacgtggtcagagtgcatcagccacaccgcggcatcatcgaggcagtctacctgcgtacaccgttctcggccggtaacgctaccacgtaagaagcttcttgcttcttgcaaatagcagctgcaaccatggcctgcggatcccaaaacggctccagcgagcaagagctcagagccattgtccaagacctgggttgcggaccctattttttgggaacctacgataagcgcttcccggggttcatggcccccgataagctcgcctgtgccattgtaaatacggccggacgtgagacggggggagagcactggttggctttcggttggaacccacgttctaacacctgctacctttttgatccttttggattctcggatgatcgtctcaaacagatttaccagtttgaatatgagggtctcctgcgccgcagcgctcttgctaccaaggaccgctgtattacgctggaaaaatctacccagaccgtgcagggcccccgttctgccgcctgcggacttttctgctgcatgttccttcacgcctttgtgcactggcctgaccgtcccatggacggaaaccccaccatgaaattgctaactggagtgccaaacaacatgcttcattctcctaaagtccagcccaccctgtgtgacaatcaaaaagcactctaccattttcttaatacccattcgccttattttcgctctcatcgtacacacatcgaaagggccactgcgttcgaccgtatggatgttcaataatgactcatgtaaacaacgtgttcaataaacatcactttatttttttacatgtatcaaggctctggattacttatttatttacaagtcgaatgggttctgacgagaatcagaatgacccgcaggcagtgatacgttgcggaactgatacttgggttgccacttgaattcgggaatcaccaacttgggaaccggtatatcgggcaggatgtcactccacagctttctggtcagctgcaaagctccaagcaggtcaggagccgaaatcttgaaatcacaattaggaccagtgctctgagcgcgagagttgcggtacaccggattgcagcactgaaacaccatcagcgacggatgtctcacgcttgccagcacggtgggatctgcaatcatgcccacatccagatcttcagcattggcaatgctgaacggggtcatcttgcaggtctgcctacccatggcgggcacccaattaggcttgtggttgcaatcgcagtgcagggggatcagtatcatcttggcctgatcctgtctgattcctggatacacggctctcatgaaagcatcatattgcttgaaagcctgctgggctttactaccctcgggataaaacatcccgcaggacctgctcgaaaactggttagcctgcacagccggcatcattcacacagcagcgggcgtcattgttggctatttgcaccacacttctgccccagcggttttgggtgattttggttcgctcgggattctcctttaaggctcgttgtccgttctcgctggccacatccatctcgataatctgctccttctgaatcataatattgccatgcaggcacttcagcttgccctcataatcattgcagccatgaggccacaacgcacagcctgtacattcccaattatggtgggcgatctgagaaaaagaatgtatcattccctgcagaaatcttcccatcatcgtgctcagtgtcttgtgactagtgaaagttaactggatgcctcggtgctcttcgtttacgtactggtgacagatgcgcttgtattgttcgtgttgctcaggcattagtttaaaacaggttctaagttcgttatccagcctgtacttctccatcagcagacacatcacttccatgcctttctcccaagcagacaccaggggcaagctaatcggattcttaacagtgcaggcagcagctcctttagccagagggtcatctttagcgatcttctcaatgcttcttttgccatccttctcaacgatgcgcacgggcgggtagctgaaacccactgctacaagttgcgcctcttctctttcttcttcgctgtcttgactgatgtcttgcatggggatatgtttggtcttccttggcttctttttggggggtatcggaggaggaggactgtcgctccgttccggagacagggaggattgtgacgtttcgctcaccattaccaactgactgtcggtagaagaacctgaccccacacggcgacaggtgtttttcttcgggggcagaggtggaggcgattgcgaagggctgcggtccgacctggaaggcggatgactggcagaaccccttccgcgttcgggggtgtgctccctgtggcggtcgcttaactgatttccttcgcggctggccattgtgttctcctaggcagagaaacaacagacatggaaactcagccattgctgtcaacatcgccacgagtgccatcacatctcgtcctcagcgacgaggaaaaggagcagagcttaagcattccaccgcccagtcctgccaccacctctaccctagaagataaggaggtcgacgcatctcatgacatgcagaataaaaaagcgaaagagtctgagacagacatcgagcaagacccgggctatgtgacaccggtggaacacgaggaagagttgaaacgctttctagagagagaggatgaaaactgcccaaaacagcgagcagataactatcaccaagatgctggaaatagggatcagaacaccgactacctcatagggcttgacggggaagacgcgctccttaaacatctagcaagacagtcgctcatagtcaaggatgcattattggacagaactgaagtgcccatcagtgtggaagagctcagctgcgcctacgagcttaaccttttttcacctcgtactccccccaaacgtcagccaaacggcacctgcgagccaaatcctcgcttaaacttttatccagcttttgctgtgccagaagtactggctacctatcacatcttttttaaaaatcaaaaaattccagtctcctgccgcgctaatcgcacccgcgccgatgccctactcaatctgggacctggttcacgcttacctgatatagcttccttggaagaggttccaaagatcttcgagggtctgggcaataatgagactcgggccgcaaatgctctgcaaaagggagaaaatggcatggatgagcatcacagcgttctggtggaattggaaggcgataatgccagactcgcagtactcaagcgaagcgtcgaggtcacacacttcgcatatcccgctgtcaacctgccccctaaagtcatgacggcggtcatggaccagttactcattaagcgcgcaagtcccctttcagaagacatgcatgacccagatgcctgtgatgagggtaaaccagtggtcagtgatgagcagctaacccgatggctgggcaccgactctccccgggatttggaagagcgtcgcaagcttatgatggccgtggtgctggttaccgtagaactagagtgtctccgacgtttctttaccgattcagaaaccttgcgcaaactcgaagagaatctgcactacacttttagacacggctttgtgcggcaggcatgcaagatatctaacgtggaactcaccaacctggtttcctacatgggtattctgcatgagaatcgcctaggacaaagcgtgctgcacagcacccttaagggggaagcccgccgtgattacatccgcgattgtgtctatctctacctgtgccacacgtggcaaaccggcatgggtgtatggcagcaatgtttagaagaacagaacttgaaagagcttgacaagctcttacagaaatctcttaaggttctgtggacagggttcgacgagcgcaccgtcgcttccgacctggcagacctcatcttcccagagcgtctcagggttactttgcgaaacggattgcctgactttatgagccagagcatgcttaacaattttcgctctttcatcctggaacgctccggtatcctgcccgccacctgctgcgcactgccctccgactttgtgcctctcacctaccgcgagtgccccccgccgctatggagtcactgctacctgttccgtctggccaactatctctcctaccactcggatgtgatcgaggatgtgagcggagacggcttgctggagtgccactgccgctgcaatctgtgcacgccccaccggtccctagcttgcaacccccagttgatgagcgaaacccagataataggcacctttgaattgcaaggccccagcagccaaggcgatgggtcttctcctgggcaaagtttaaaactgaccccgggactgtggacctccgcctacttgcgcaagtttgctccggaagattaccacccctatgaaatcaagttctatgaggaccaatcacagcctccaaaggccgaactttcggcttgcgtcatcacccagggggcaattctggcccaattgcaagccatccaaaaatcccgccaagaatttctactgaaaaagggtaagggggtctaccttgacccccagaccggcgaggaactcaacacaaggttccctcaggatgtcccaacgacgagaaaacaagaagttgaaggtgcagccgccgcccccagaagatatggaggaagattgggacagtcaggcagaggaggcggaggaggacagtctggaggacagtctggaggaagacagtttggaggaggaaaacgaggaggcagaggaggtggaagaagtaaccgccgacaaacagttatcctcggctgcggagacaagcaacagcgctaccatctccgctccgagtcgaggaacccggcggcgtcccagcagtagatgggacgagaccggacgcttcccgaacccaaccagcgcttccaagaccggtaagaaggatcggcagggatacaagtcctggcgggggcataagaatgccatcatctcctgcttgcatgagtgcgggggcaacatatccttcacgcggcgctacttgctattccaccatggggtgaactttccgcgcaatgttttgcattactaccgtcacctccacagcccctactatagccagcaaatcccgacagtctcgacagataaagacagcggcggcgacctccaacagaaaaccagcagcggcagttagaaaatacacaacaagtgcagcaacaggaggattaaagattacagccaacgagccagcgcaaacccgagagttaagaaatcggatctttccaaccctgtatgccatcttccagcagagtcggggtcaagagcaggaactgaaaataaaaaaccgatctctgcgttcgctcaccagaagttgtttgtatcacaagagcgaagatcaacttcagcgcactctcgaggacgccgaggctctcttcaacaagtactgcgcgctgactcttaaagagtaggcagcgaccgcgcttattcaaaaaaggcgggaattacatcatcctcgacatgagtaaagaaattcccacgccttacatgtggagttatcaaccccaaatgggattggcagcaggcgcctcccaggactactccacccgcatgaattggctcagcgccgggccttctatgatttctcgagttaatgatatacgcgcctaccgaaaccaaatacttttggaacagtcagctcttaccaccacgccccgccaacaccttaatcccagaaattggcccgccgccctagtgtaccaggaaagtcccgctcccaccactgtattacttcctcgagacgcccaggccgaagtccaaatgactaatgcaggtgcgcagttagctggcggctccaccctatgtcgtcacaggcctcggcataatataaaacgcctgatgatcagaggccgaggtatccagctcaacgacgagtcggtgagctctccgcttggtctacgaccagacggaatctttcagattgccggctgcgggagatcttccttcacccctcgtcaggctgttctgactttggaaagttcgtcttcgcaaccccgctcgggcggaatcgggaccgttcaatttgtagaggagtttactccctctgtctacttcaaccccttctccggatctcctgggcactacccggacgagttcataccgaacttcgacgcgattagcgagtcagtggacggctacgattgatgtctggtgacgcggctgagctatctcggctgcgacatctagaccactgccgccgctttcgctgctttgcccgggaacttattgagttcatctacttcgaactccccaaggatcaccctcaaggtccggcccacggagtgcggattactatcgaaggcaaaatagactctcgcctgcaacgaattttctcccagcggcccgtgctgatcgagcgagaccagggaaacaccacggtttccatctactgcatttgtaatcaccccggattgcatgaaagcctttgctgtcttatgtgtactgagtttaataaaaactgaattaagactctcctacggactgccgcttcttcaacccggattttacaaccagaagaacaaaacttttcctgtcgtccaggactctgttaacttcacctttcctactcacaaactagaagctcaacgactacaccgcttttccagaagcattttccctactaatactactttcaaaaccggaggtgagctccacggtctccctacagaaaacccttgggtggaagcgggccttgtagtactaggaattcttgcgggtgggcttgtgattattctttgctacctatacacaccttgcttcactttcctagtggtgttgtggtattggtttaaaaaatggggcccatactagtcttgcttgttttactttcgcttttggaaccgggttctgccaattacgatccatgtctagactttgacccagaaaactgcacacttacttttgcacccgacacaagccgcatctgtggagttcttattaagtgcggatgggaatgcaggtccgttgaaattacacacaataacaaaacctggaacaataccttatccaccacatgggagccaggagttcccgagtggtacactgtctctgtccgaggtcctgacggttccatccgcattagtaacaacactttcattttttctgaaatgtgcgatctggccatgttcatgagcaaacagtattctctatggcctcctagcaaggacaacatcgtaacgttctccattgcttattgcttgtgcgcttgccttcttactgctttactgtgcgtatgcatacacctgcttgtaaccactcgcatcaaaaacgccaataacaaagaaaaaatgccttaacctctttctgtttacagacatggcttctcttacatctctcatatttgtcagcattgtcactgccgctcacggacaaacagtcgtctctatcccactaggacataattacactctcataggacccccaatcacttcagaggtcatctggaccaaactgggaagcgttgattactttgatataatctgtaacaaaacaaaaccaataatagtaacttgcaacatacaaaatcttacattgattaatgttagcaaagtttacagcggttactattatggttatgacagatacagtagtcaatatagaaattacttggttcgtgttacccagttgaaaaccacgaaaatgccaaatatggcaaagattcgatccgatgacaattctctagaaacttttacatctcccaccacacccgacgaaaaaaacatcccagattcaatgattgcaattgttgcagcggtggcagtggtgatggcactaataataatatgcatgcttttatatgcttgtcgctacaaaaagtttcatcctaaaaaacaagatctcctactaaggcttaacatttaatttctttttatacagccatggtttccactaccacattccttatgcttactagtctcgcaactctgacttctgctcgctcacacctcactgtaactataggctcaaactgcacactaaaaggacctcaaggtggtcatgtcttttggtggagaatatatgacaatggatggtttacaaaaccatgtgaccaacctggtagatttttctgcaacggcagagacctaaccattatcaacgtgacagcaaatgacaaaggcttctattatggaaccgactataaaagtagtttagattataacattattgtactgccatctaccactccaccaccccgcacaactactttctctagcagcagtgtcgctaacaatacaatttccaatccaacctttgccgcgcttttaaaacgcactgtgaataattctacaacttcacatacaacaatttccacttcaacaatcagcatcatcgctgcagtgacaattggaatatctattcttgtttttaccataacctactacgcctgctgctatagaaaagacaaacataaaggtgatccattacttagatttgatatttaatttgttctttttttttatttacagtatggtgaacaccaatcatggtacctagaaatttcttcttcaccatactcatctgtgcttttaatgtttgcgctactttcacagcagtagccacagcaaccccagactgtataggagcatttgcttcctatgcactttttgcttttgttacttgcatctgcgtatgtagcatagtctgcctggttattaattttttccaacttctagactggatccttgtgcgaattgcctacctgcgccaccatcccgaataccgcaaccaaaatatcgcggcacttcttagactcatctaaaaccatgcaggctatactaccaatatttttgcttctattgcttccctacgctgtctcaaccccagctgcctatagtactccaccagaacaccttagaaaatgcaaattccaacaaccgtggtcatttcttgcttgctatcgagaaaaatcagaaatccccccaaatttaataatgattgctggaataattaatataatctgttgcaccataatttcatttttgatataccccctatttgattttggctggaatgctcccaatgcacatgatcatccacaagacccagaggaacacattcccccacaaaacatgcaacatccaatagcgctaatagattacgaaagtgaaccacaacccccactactccctgctattagttacttcaacctaaccggcggagatgactgaaacactcaccacctccaattccgccgaggatctgctcgatatggacggccgcgtctcagaacaacgacttgcccaactacgcatccgccagcagcaggaacgcgtggccaaagagctcagagatgtcatccaaattcaccaatgcaaaaaaggcatattctgtttggtaaaacaagccaagatatcctacgagatcaccgctactgaccatcgcctctcttacgaacttggcccccaacgacaaaaatttacctgcatggtgggaatcaaccccatagttatcacccaacaaagtggagatactaagggttgcattcactgttcctgcgattccatcgagtgcacctacaccctgctgaagaccctatgcggcctaagagacctgctaccaatgaattaaaaaaaaatgattaataaaaaatcacttacttgaaatcagcaataaggtctctgttgaaattttctcccagcagcacctcacttccctcttcccaactctggtattctaaaccccgttcagcggcatactttctccatactttaaaggggatgtcaaattttagctcctctcctgtacccacaatcttcatgtctttcttcccagatgaccaagagagtccggctcagtgactccttcaaccctgtctacccctatgaagatgaaagcacctcccaacaccccttttataacccagggtttatttccccaaatggcttcacacaaagcccagacggagttcttactttaaaatgtttaaccccactaacaaccacaggcggatctctacagctaaaagtgggagggggacttacagtggatgacactgatggtaccttacaagaaaacatacgtgctacagcacccattactaaaaataatcactctgtagaactatccattggaaatggattagaaactcaaaacaataaactatgtgccaaattgggaaatgggttaaaatttaacaacggtgacatttgtataaaggatagtattaacaccttatggactggaataaaccctccacctaactgtcaaattgtggaaaacactaatacaaatgatggcaaacttactttagtattagtaaaaaatggagggcttgttaatggctacgtgtctctagttggtgtatcagacactgtgaaccaaatgttcacacaaaagacagcaaacatccaattaagattatattttgactcttctggaaatctattaactgaggaatcagacttaaaaattccacttaaaaataaatcttctacagcgaccagtgaaactgtagccagcagcaaagcctttatgccaagtactacagcttatcccttcaacaccactactagggatagtgaaaactacattcatggaatatgttactacatgactagttatgatagaagtctatttcccttgaacatttctataatgctaaacagccgtatgatttcttccaatgttgcctatgccatacaatttgaatggaatctaaatgcaagtgaatctccagaaagcaacatagctacgctgaccacatccccctttttcttttcttacattacagaagacgacaactaaaataaagtttaagtgtttttatttaaaatcacaaaattcgagtagttattttgcctccaccttcccatttgacagaatacaccaatctctccccacgcacagctgttaaacatttggataccattagagatagacattgttttagattccacattccaaacagtttcagagcgagccaatctggggtcagtgatagataaaaatccatcgcgatagtcttttaaagcgctttcacagtccaactgctgcggatgcgactccggagtttggatcacggtcatctggaagaagaacgatgggaatcataatccgaaaacggtatcggacgattgtgtctcatcaaacccacaagcagccgctgtctgcgtcgctccgtgcgactgctgtttatgggatcagggtccacagtttcctgaagcatgattttaatagcccttaacatcaactttctggtgcgatgcgcgcagcaacgcattctgatttcactcaaatctttgcagtaggtacaacacattattacaatattgtttaataaaccataattaaaagcgctccagccaaaactcatatctgatataatcgcccctgcatgaccatcataccaaagtttaatataaattaaatgacgttccctcaaaaacacactacccacatacatgatctcttttggcatgtgcatattaacaatctgtctgtaccatggacaacgttggttaatcatgcaacccaatataaccttccggaaccacactgccaacaccgctcccccagccatgcattgaagtgaaccctgctgattacaatgacaatgaagaacccaattctctcgaccgtgaatcacttgagaatgaaaaatatctatagtggcacaacatagacataaatgcatgcatcttctcataatttttaactcctcaggatttagaaacatatcccagggaataggaagctcttgcagaacagtaaagctggcagaacaaggaagaccacgaacacaacttacactatgcatagtcatagtatcacaatctggcaacagcgggtggtcttcagtcatagaagctcgggtttcattttcctcacaacgtggtaactgggctctggtgtaagggtgatgtctggcgcatgatgtcgagcgtgcgcgcaaccttgtcataatggagttgcttcctgacattctcgtattttgtatagcaaaacgcggccctggcagaacacactcttcttcgccttctatcctgccgcttagcgtgttccgtgtgatagttcaagtacagccacactcttaagttggtcaaaagaatgctggcttcagttgtaatcaaaactccatcgcatctaattgttctgaggaaatcatccacggtagcatatgcaaatcccaaccaagcaatgcaactggattgcgtttcaagcaggagaggagagggaagagacggaagaaccatgttaatttttattccaaacgatctcgcagtacttcaaattgtagatcgcgcagatggcatctctcgcccccactgtgttggtgaaaaagcacagctaaatcaaaagaaatgcgattttcaaggtgctcaacggtggcttccaacaaagcctccacgcgcacatccaagaacaaaagaataccaaaagaaggagcattttctaactcctcaatcatcatattacattcctgcaccattcccagataattttcagctttccagccttgaattattcgtgtcagttcttgtggtaaatccaatccacacattacaaacaggtcccggagggcgccctccaccaccattcttaaacacaccctcataatgacaaaatatcttgctcctgtgtcacctgtagcgaattgagaatggcaacatcaattgacatgcccttggctctaagttcttctttaagttctagttgtaaaaactctctcatattatcaccaaactgcttagccagaagccccccgggaacaagagcaggggacgctacagtgcagtacaagcgcagacctccccaattggctccagcaaaaacaagattggaataagcatattgggaaccaccagtaatatcatcgaagttgctggaaatataatcaggcagagtttcttgtagaaattgaataaaagaaaaatttgccaaaaaaacattcaaaacctctgggatgcaaatgcaataggttaccgcgctgcgctccaacattgttagttttgaattagtctgcaaaaataaaaaaaaaacaagcgtcatatcatagtagcctgacgaacaggtggataaatcagtctttccatcacaagacaagccacagggtctccagctcgaccctcgtaaaacctgtcatcgtgattaaacaacagcaccgaaagttcctcgcggtgaccagcatgaataagtcttgatgaagcatacaatccagacatgttagcatcagttaaggagaaaaaacagccaacatagcctttgggtataattatgcttaatcgtaagtatagcaaagccacccctcgcggatacaaagtaaaaggcacaggagaataaaaaatataattatttctctgctgctgtttaggcaacgtcgcccccggtccctctaaatacacatacaaagcctcatcagccatggcttaccagagaaagtacagcgggcacacaaaccacaagctctaaagtcactctccaacctctccacaatatatatacacaagccctaaactgacgtaatgggactaaagtgtaaaaaatcccgccaaacccaacacacaccccgaaactgcgtcaccagggaaaagtacagtttcacttccgcaatcccaacaagcgtcacttcctctttctcacggtacgtcacatcccattaacttacaacgtcattttcccacggccgcgccgccccttttaaccgttaaccccacagccaatcaccacacggcccacactttttaaaatcacctcatttacatattggcaccattccatctataaggtatattattgatgatg

SEQ ID NO: 217 - DNA, 35213 bp, Human adenovirus
  misc_feature 1..35213: note = Reference Ad37 Genome Sequence: GenBank accession no. DQ900900 (SEQ ID NO: 217); Human adenovirus 37
  source 1..35213: mol_type = genomic DNA
catcatcataatataccccacaaagtaaacaaaagttaatatgcaaatgagcttttgaattttaacggttttggggcggagccaacgctgattggacgagaagcggtgatgcaaataacgtcacgacgcacggctaacggccggcgcggaggcgtggcctaggccggaagcaagtcgcggggctaatgacgtataaaaaagcggactttagacccggaaacggccgattttcccgcggccacgcccggatatgaggtaattctgggcggatgcaagtgaaattaggtcattttggcgccaaaactgaatgaggaagtgaaaagtgaaaaatacctgtcccgcccagggcggaatatttaccgagggccgagagactttgaccgattacgtggggtttcgattgcggtgtttttttcgcgaatttccgcgtccgtgtgaaagtccggtgtttatgtcacagatcagctgatccacagggtatttaaaccagttgagcccgtcaagaggccactcttgagtgccagcgagtagagatttctctgagctccgctcccaaagtgtgagaaaaatgagacacctgcgcctcctgtcttcaactgtgcctattaacatggccgcattattgctggaggactatgtgagtacagtattggaggacgaactacatccatctccatttgagctgggacctacacttcaggacctttatgatttggaggtagatgcccatgatgacgacccaaacgaagaggctgtgaatttaatatttccagaatctctgattcttcaggctgacatagccagcgaagctgtacctacaccacttcatacaccgactttgtcacccatacctgaattggaagaggaggacgagttagacctccgatgttatgaggaaggttttcctcccagcgattcagaggacgaacagggtgagcagagcatggctctaatctcagaatatgcttgtgtggttgtggaagagcattttgtgttggacaatcctgaggtgcccgggcaaggctgtagatcctgccagtaccaccgggataagaccggagacacaaacgcctcctgcgctctgtgttacatgaaaaagaacttcagctttatttacagtaagtggagtgaatgtgagagaggctgagtgcttaacacataactgggtgatgcttaaacagctgtgctaagtgtggtttatttttgtttctaggtccggtgtcagaggatgagtcatcaccctcagaagaaaaccacccgtgtccccctgagctgtcaggcgaaacgcccctgcaagtgcacaaacccaccccagtcagacccagtggcgagaggcgagcagctgttgaaaaaattgaggacttgttacatgacatgggtggggatgaacctttggacctgagcttgaaacgccccaggaactaggcgcagctgtgcttagtcatgtgtaaataaagttgtacaataaaagtatatgtgacgcatgcaaggtgtggtttatgactcatgggcggggcttagtcctatataagtggcaacacctgggcactgggcacagaccttcagggagttcctgatggatgtgtggactatccttgcagactttagcaagacacgccggcttgtagaggatagttcagacgggtgctccgggttctggagacactggtttggaactcctctatctcgactggtgtacacagttaagaaggattataacgaggaatttgaaaatctttttgctgattgctctggcctgctagattctctgaatctcggccaccagtcccttttccaggaaagggtactccacagccttgatttttccagcccagggcgcactacagccggggttgcttttgtggtttttctggttgacaaatggagccagaacacccaactgagcaggggctacattctggacttcgcagccatgcacctgtggagggcatgggtgaggcagcggggacagagaatcttgaactactggcttatacagccagcagctccgggtcttcttcgtctacacagacaaacatccatgttggaggaagaaatgaggcaggccatggacgagaacccgaggagcggcctggaccctccgtcggaagaggagctggattgaatcaggtatccagcttgtacccagagcttagcaaggtgctgacatccatggctaggggagtgaagagggagaggagcgatgggggcaataccgggatgatgaccgagctgacggccagcctgatgaatcgcaagcgcccagagcgcattacctggcacgagctacagatggagtgcagggatgagttgggcctgatgcaggataaatatggcctggagcagataaaaacacattggttgaacccagatgaggattgggaggaggccattaagaaatatgccaagatagccctgcgcccagattgcaagtacatagtgaccaagaccgtgaatattagacatgcctgctacatttcagggaacggggcagaggtggtcatcgataccctggacaaggccgccttcaggtgttgcatgatgggaatgagagcaggagtgatgaatatgaattccatgatcttcatgaacatgaagttcaatggagagaagtttaatggggtgctgttcatggccaacagccacatgaccctgcatggctgcagtttctttggcttcaacaatatgtgcgccgaggtctggggcgcttccaagatcaggggatgtaagttttatggctgctggatgggcgtggtcggaagacctaagagcgagatgtctgtgaagcagtgtgtgtttgagaaatgctacctgggagtctctaccgagggcaatgctagagtgagacactgctcttccctggatacgggctgcttctgcctggtgaagggtacggcctctctgaagcataatatggtgaagggctgcacagatgagcgcatgtacaacatgctaacatgcgactcgggggtctgtcatatcctgaagaacatccatgtgacctcccaccccagaaagaagtggccagtgtttgagaataacctgctgatcaagtgccatatgcacctgggtgccagaaggggcaccttccagccgtaccagtgcaactttagccagaccaagctgctgttggaaaacgatgccttctccagggtgaacctgaacggcatctttgacatggatgtctcggtgtacaagatcctgagatacgatgagaccaagtccagggtgcgcgcttgcgagtgcgggggcagacacaccaggatgcagccagtggccctggatgtgaccgaggagctgagaccagaccacctggtgatggcctgtaccgggaccgagttcagctccagtggggaggacacagattagaggtaggtttgagtagtgggcgtggctaatgtgagtataaaggcgggtgtcttacgagggtctttttgcttttctgcagacatcatgaacgggaccggcggggccttcgaaggggggctttttagcccttatttgacaacccgcctgccgggatgggccggagttcgtcagaatgtgatgggatctacggtggatgggcgtccagtgcttccagcaaattcctcgaccatgacctacgcgaccgtggggagctcgtcgcttgacagcaccgccgcagccgcggcagccgcagccgccatgacagcgacgagactggcctcgagctatatgcccagcagcggtagcagcccctctgtgcccagttccatcatcgccgaggagaaactgctggccctgctggccgagctggaagccctgagccgccagctggccgccctgacccagcaggtgtccgatctccgcgagcaacagcagcagcaaaataaatgattcaataaacacagattctgattcaaacagcaaagcatctttattatttattttttcgcgcgcggtaggccctggtccacctctcccgatcattgagagtgcggtggattttttccaggacccggtagaggtgggattggatgttgaggtacatgggcatgagcccgtcccgggggtggaggtagcaccactgcatggcctcgtgctctggggtcgtgttgtagataatccagtcatagcaggggcgctgggcgtggtgctggatgatgtccttgaggaggagactgatggccacggggagccccttggtgtaggtgttggcaaagcggttaagctgggagggatgcatgcggggggagatgatgtgcagtttggcctggatcttgaggttggcgatgttgccacccagatcccgccgggggttcatattgtgcaggaccaccagaacggtgtagcccgtgcacttggggaacttatcatgcaacttggaagggaatgcgtggaagaatttggagacgcccttgtgcccgcccaggttttccatgcactcatccatgatgatggcaatgggcccgtgggctgcggctttggcaaaaacgtttctggggtcagagacatcataattatgctcctgggtgagatcatcataagacattttaatgaatttggggcgaagggtgccagattgggggacgatcgttccctcgggccccggggcgaagttcccctcgcagatctgcatctcccaggctttcatctcggagggggggatcatgtccacctgcggggcgatgaaaaaaacggtttccggggcgggggtgatgagctgcgaggagagcaggtttcttaacagctgggacttgccgcacccggtcgggccgtagatgaccccgatgacgggttgcaggtggtagttcaaggagatgcagctgccgtcgtcccggaggaggggggccacctcgttgagcatgtctctcacttggaggttttcccggacgagctcgccgaggaggcggtccccgcccagcgagagcagctcttgcagggaagcaaagtttttcaggggcttgagcccgtcggccatgggcatcttggcaagggtctgcgagaggagctccaggcggtcccatagctcggtgacgtgctctacggcatctcgatccagcagacttcctcgtttcgggggttgggacgactgcgactgtagggcacgagacgatgggcgtccagcgcggccagcgtcatgtccttccagggtctcagggtccgagtgagggtggtctccgtcacggtgaaggggtgggccccgggctgggcgcttgcaagggtgcgcttgagactcatcctgctggtgctgaaacgggcacggtcttcgccctgcgcgtcggcgagatagcagttgaccatgagcttgtagttaagggcctcggcggcgtggcccttggcacggagcttgcctttggaagagcgcccgcaggcgggacagaggagggattgcagggcgtagagcttgggtgcgagaaagacggactcgggagcgaaggcgtccgctccgcagtgggcgcagacggtttcgcactcgacgagccaggtgagctcgggctgctcggggtcaaaaaccagttttcccccgttctttttgatgcgcttcttacctcgcgtctccatgagtctgtgtccgcgttcggtgacaaacaggctgtctgtgtccccgtagacggacttgattggcctgtcctgcaggggcgtcccgcggtcctcctcgtagagaaactcggaccactctgagacaaaggcgcgcgtccacgccaagacaaaggaggccacgtgcgaggggtagcggtcgttgtccaccagggggtccaccttttccaccgtgtgcagacacatgtccccctcctccgcatccaagaaggtgattggcttgtaggtgtaggccacgtgaccgggggtccccgacgggggggtataaaagggggcgggtctgtgctcgtcctcactctcttccgcgtcgctgtccacgagcgccagctgttggggtaggtattccctctcgagagcgggcatgacctcggcactcaggttgtcagtttctagaaacgaggaggatttgatgttggcctgccctgccgcaatgctttttaggagactttcatccatctggtcagaaaagactatttttttattgtcaagcttggtggcaaaggagccatagagggcgttggagagaagcttggcgatggatctcatggtctgatttttgtcacggtcggcgcgctccttggccgcgatgttgagctggacatactcgcgcgcgacacacttccattctgggaagacggtggtgcgctcgtcgggcacgatcctgacgcgccagccgcgattatgcagggtgaccaggtccacgctggtggccacctcgccgcgcaggggctcgttggtccagcagaggcgtccgcccttgcgcgagcagaacgggggcagcacatcaagcagatgctcgtcaggggggtccgcatcgatggtgaagatgcccggacagagttccttgtcaaaataatcgatttttgaggatgcatcatccaaggccatctgccactcgcgggcggccagcgctcgctcgtaggggttgaggggcggaccccagggcatgggatgcgtgagggcggaggcgtacatgccgcagatgtcgtagacatagatgggctccgagaggatgccgatgtaggtgggataacagcgccccccgcggatgctggcgcgcacatagtcatacaactcgtgcgagggggccaagaaagcggggccgagattggtgcgctggggctgctcggcgcggaagacgatctggcgaaagatggcatgcgagttggaggagatggtgggccgttggaagatgttaaagtgggcgtggggcaagcggaccgagtcgcggatgaagtgcgcgtaggagtcttgcagcttggcaacgagctcggcggtgacaaggacgtccatggcgcagtagtccagcgtttcacggatgatgtcataacccgcctcttctttcttctcccacagcgcgcggttgagggcgtactcctcgtcatccttccagtactcccggagcgggaatcctcgatcgtccgcacggtaagagcccagcatgtagaaatggttcacggccttgtagggacagcagcccttctccacggggagggcgtaagcttgagcggccttgcggagcgaggtgtgcgtcagggcgaaggtatccctaaccatgactttcaagaactggtacttgaaatccgagtcgtcgcagccgccgtgctcccagagctcgaaatcggtgcgcttcttcgagagggggttaggcagagcgaaagtgacgtcattgaagagaatcttgcctgcccgcggcatgaaattgcgggtgatgcggaaagggcccggaacggaggctcggttgttgatgacctgggcggcgaggacgatctcgtcgaagccgttgatgttgtgcccgacgatgtagagttccatgaatcgcgggcggcctttgatgtgcggcagctttttgagttcctcgtaggtgaggtcctcggggcattgcaggccgtgctgctcgagcgcccactcctggagatgtgggttggcttgcatgaatgaagcccagagctcgcgggccatgagggtctggagctcgtcgcgaaagaggcggaactgctggcccacggccatcttttctggggtgacgcagtagaaggtgagggggtcccgctcccagcgatcccagcgtaagcgcacggcgagatcgcgagcgagggcgaccagctcggggtccccggagaatttcatgaccagcatgaaggggacgagctgcttgccgaaggaccccatccaggtgtaggtttctacatcgtaggtgacaaagagccgctccgtgcgaggatgagagccgattgggaagaactggatttcctgccaccagttggtcgagtggctgttgatgtgatgaaagtagaaatcccgccggcgaaccgagcactcgtgctgatgcttgtaaaagcgtccgcagtactcgcagcgctgcacgggctgtacctcatccacgagatacacagcgcgtcccttgaggaggaacttcaggagtggcggccctggctggtggttttcatgttcgcctgcgtgggactcaccctggggctcctcgaggacggagaggctgacgagcccgcgcgggagccaggtccagatctcggcgcggcgggggcggagagcgaaaacgagggcgcgcagttgggagctgtccatggtgtcgcggagatccaggtccgggggcagggttctgaggttgacctcgtagaggcgggtgagggcgtgcttgagatgcagatggtacttgatctccacgggtgagttggtggtcgtgtccacgcattgcatgagcccgtagctgcgcggggccacgaccgtgccgcggtgcgcttttagaagcggtgtcgcggacgcgctcccggcggcagcggcggttccggccccgcgggcagtggcggtagaggcacgtcggcgtggcgctcgggcaggtcccggtgctgcgccctgagagcgctggcgtgcgcgacgacgcggcggttgacatcctggatctgccgcctttgcgtgaagaccacgggccccgtgactttgaacctgaaagacagttcaacagaatcaatctcggcgtcattgacggcggcctgacgcaggatctcttgcacgtcgcccgagttgtcctggtaggcgatctcggacatgaactgctcgatttcctcctcctggagatcgccgcggcccgcgcgctctacggtggcggcaaggtcattcgagatgcgacccatgagctgcgagaaggcgcccaggccgctctcgttccagacgcggctgtaaaccacgtccccgtcggcgtcgcgcgcgcgcatgaccacctgcgcgaggttgagctccacgtgccgcgcgaagacggcatagttgcgcaggcgttggaagaggtagttgagggtggtggcgatgtgctcggtgacgaagaagtacataatccagcggcgcaggggcatttcgctgatgtcgccaatggcctccagcctttccatggcctcgtagaaatccacggcgaagttgaaaaactgggcgttgcgggccgagaccgtgagctcgtcttccaggagcctgatgagttcggcgatggtggcgcgcacctcgcgctcgaaatccccgggggcctcctcctcttcctcttcttccatgacgacctcttcttctatttcttcctctgggggcggtggtggtggcggggcccgacgacgacggcgacgcaccgggagacggtcgacgaagcgctcgatcatctccccgcggcggcgacgcatggtttcggtgacggcgcgaccccgttcgcgaggacgcagcgtgaagacgccgccggtcatctcccggtaatggggtgggtccccgttgggcagcgatagggcgctgacaatgcatcttatcaattgcggtgtagggcacgtgagcgcgtcgagatcgaccggatcggagaatctttcgaggaaagcgtctagccaatcgcagtcgcaaggtaagctcaaacacgtagcagccctgtggacgctgttagaattgcggttgctgatgatgtaattgaagtaggcgtttttgaggcggcggatggtggcgaggaggaccaggtccttgggtcccgcttgctggatgcggagccgctcggccatgccccaggcctggccctgacaccggctcaggttcttgtagtagtcatgcatgagcctctcgatgtcatcactggcggaggcggagtcttccatgcgggtgaccccgacgcccctgaacggctgcacgagcgccaggtcggcgacgacgcgctcggcgaggatggcctgttgcacgcgggtgagggtgtcctggaagtcgtccatgtcgacgaagcggtggtaggcccctgtgttgatggtgtaagtgcagttggccataagcgaccagttgacggtctgcaggccgggttgcacgacctcggagtacctgagccgcgagaaggcgcgcgagtcgaagacatagtcgttgcaggtgcgcacgaggtactggtatccgactagaaagtgcggcggcggctggcggtagagcggccagcgctgggtggccggcgcgcccggggccaggtcctcaagcatgagtcggtggtagccgtagaggtagcgggacatccaggtgatgccggcggcggtggtggaggcgcgcgggaactcgcggacgcggttccagatgttgcgcaggggcaggaaatagtccatggtcggcacggtctggccggtgagacgcgcgcagtcattgatgctctagaggcaaaaacgaaagcggttgagcgggctcttcctccgtagcctggcggaacgcaaacgggttaggccgcgtgtgtaccccggttcgagtcccctcgaatcaggctggagccgcgactaacgtggtattggcactcccgtctcgacccaagcccgatagccgccaggatacggcggagagccctttttgtcggccgaggggagtcgctagacttgaaagcggccgaaaaccctgccgggtagtggctcgcgcccgtagtctggagaagcatcgccagggttgagtcgcggcagaacccggttcaaggacggccgcggcgagcgggacttggtcaccccgccgatttaaagacccacagccagccgacttctccagttacgggagcgagcccccttttttctttttgccagatgcatcccgtcctgcgccaaatgcgtcccacccccccggcgaccaccgcgaccgcggccgtagcaggcgccggcgctagccagccacagccacagacagagatggacttggaagagggcgaagggctggcgagactgggggcgccgtccccggagcgacatccccgcgtgcagctgcagaaggacgtgcgcccggcgtacgtgcctgcgcagaacctgttcagggaccgcagcggggaggagcccgaggagatgcgcgactgccggtttcgggcgggcagggagctgcgcgagggcctggaccgccagcgcgtgctgcgcgacgaggatttcgagccgaacgagcagacggggatcagccccgcgcgcgcgcacgtggcggcggccaacctggtgacggcctacgagcagacggtgaagcaggagcgcaacttccaaaagagtttcaacaaccacgtgcgcaccctgatcgcgcgcgaggaggtggccctgggcctgatgcacctgtgggacctggcggaggccatcgtgcagaacccggacagcaagcctctgacggcacagctgttcctggtggtgcagcacagcagggacaacgaggcgttcagggaggcactgctgaacatcgccgagcccgagggtcgctggctgctggagctgattaacatcttgcagagcatcgtagtgcaggagcgcagcctgagcctggccgagaaggtggcggcgatcaactactcggtgctgagcctgggcaagttttacgcgcgcaagatttacaagacgccgtatgtgcccatagacaaggaggtgaagatagacagcttttacatgcgcatggcgctcaaggtgctgacgctgagcgacgacctgggcgtgtaccgcaacgaccgcatccacaaggccgtgagcacaagccggcggcgcgagctgagcgaccgcgagctgatgctgagtctgcgccgggcgctggtaggaggcgccaccggcggtgaggagtcctactttgacatgggggcggacctgcattggcagccgagccgacgcgccttggaggccgcctacggtccagaggacttggatgaggaagaggaagaggaggaggatgcacccgttgcggggtactgacgcctccgtgatgtgtttttagatgcagcaagccccggaccccgccataagggcggcgctgcaaagccagccgtccggtctagcatcggacgactgggaggccgcgatgcaacgcatcatggccctgacgacccgcaaccccgagtcctttagacaacagccgcaggccaacagactctcggccattctggaggcggtggttccttctcggaccaaccccacgcacgagaaggtgctggcgatcgtgaacgcgctggcggagaacaaggccatccgtcccgacgaggccgggctagtgtacaacgccctgctggagcgcgtgggccgctacaacagcacaaacgtgcagtccaacctggaccggctggtgacggacgtgcgcgaggccgtggcgcagcgcgagcggttcaagaacgagggcctgggttcgctggtggcgctgaacgccttcctggcgacgcagccggcgaacgtgccgcgcgggcaggatgattataccaactttataagcgcgctgcggctgatggtgaccgaggtgccccagagcgaggtgtaccagtcgggcccggactactttttccagacgagcagacagggcctgcagacggtgaacctgagtcaggctttcaagaacctgcgcgggctgtggggcgtgcaggcgcccgtgggcgaccggtcgacggtgagcagcttgctgacgcccaactcgcggctgctgctgctgctgatcgcgcccttcaccgacagtggcagcgtgaaccgcaactcgtacctgggtcacctgctgacgctgtaccgcgaggccataggccaggcgcaggtggatgagcagaccttccaggagatcactagcgtgagccgcgcgctgggtcagaacgacaccgacagtctgagggccaccctgaacttcttgctgaccaatagacagcagaagatcccggcgcagtacgcgctgtcggccgaggaggagcgcatcctgagatatgtgcagcagagcgtagggctgttcctgatgcaggagggggccacccccagcgccgcgctggacatgaccgcgcgcaacatggaacctagcatgtacgccgccaaccggccgtttattaataagctgatggactacctgcaccgcgcggcgtccatgaactcggactactttaccaatgccatcttgaacccgcactggctcccgccgccggggttctacacgggcgagtacgacatgcctgaccccaacgacgggtttttgtgggacgacgtggacagcgcggtgttctcaccgaccttgcaaaagcgccaggaggcggtgcgcacgcccgcgagcgagggcgcggtgggtcggagcccctttcctagcttagggagtttgcatagcttgccgggctcggtgaacagcggcagggtgagccggccgcgcttgctgggcgaggacgagtacctgaacgactcgctgctgcagccgccgcgggtcaagaacgccatggtcaataacgggatagagagtctggtggacaaactgaaccgctggaaaacctacgctcaggaccatagggaacctgcgcccgcgccgcggcgacagcgtcacgaccggcagcggggcctggtgtgggacgacgaggactcggccgacgatagcagcgtgttggacttgggcgggagcggtggggccaacccgttcgcgcatctgcagcccagactggggcgacggatgttttgaatgcaaaataaaactcaccaaggccatagcgtgcgttctcttccttgttagagatgaggcgcgcggtggtgtcttcctctcctcctccctcgtacgagagcgtgatggcgcaggcgaccctggaggttccgtttgtgcctccgcggtatatggctcctacggagggcagaaacagcattcgttactcggagctggctccgctgtacgacaccactcgcgtgtatttggtggacaacaagtcggcggacatcgcttccctgaactaccaaaacgaccacagcaacttcctgaccacggtggtgcagaacaacgatttcacccctgccgaggccagcacgcagacgataaattttgacgagcggtcgcggtggggcggtgatctgaagaccattctgcacaccaacatgcctaatgtgaacgagtacatgttcaccagcaagtttaaggcgcgggtgatggtggctagaaaaaaggcggaaggggctgatgcaaatgataggagcaaggatatcttagagtatcagtggtttgagtttaccctgcccgagggcaacttttccgagaccatgaccatagacctaatgaacaacgccatcttggaaaactacttgcaagtggggcggcaaaatggcgtgctggagagtgatatcggagtcaagtttgacagcagaaatttcaagctgggctgggacccggtgaccaagctggtgatgccaggggtctacacctacgaggccttccacccggacgtggtgctgctgccgggctgcggggtggatttcaccgagagccgcctgagcaacctcctgggcattcgcaagaagcaaccttttcaagagggcttcagaatcatgtatgaggacctagtagggggcaacatccccgctctcctgaatgtcaaggagtatctgaaggataaggaagaagctggcaaagcagatgcaaatactattaaggctcagaatgatgccgtcccaagaggagataactatgcatcagcggcagaagccaaagcagcaggaaaagaaattgagttgaaggccattttgaaagatgattcagacagaagctacaatgtgatcgagggaaccacagacaccctgtaccgcagttggtacctgtcctatacctacggggatcccgagaagggggtgcagtcgtggacgctgctcaccaccccggacgtcacctgcggcgcggagcaagtctactggtcgctgccggacctcatgcaagaccccgtcaccttccgctctacccagcaagtcagcaactaccccgtggtcggcgccgagctcatgcccttccgcgccaagagcttttacaacgacctcgccgtctactcccagctcatccgcagctacacctccctcacccacgtcttcaaccgcttccccgacaaccagatcctttgccgcccgcccgcgcccaccatcaccaccgtcagtgaaaacgtgcctgctctcacagatcacgggacgctaccgctgcgcagcagtatccgcggagtccagcgagtgaccgtcactgacgcccgtcgccgcacctgtccctacgtctacaaggccctgggcatagtcgcgccgcgcgtgctttccagtcgcaccttctaaaaaatgtctattctcatctcgcccagcaataacaccggctggggtcttactaggcccagcaccatgtacggaggagccaagaaacgctcccagcagcaccccgtccgcgtccgcggtcacttccgcgctccctggggcgcttacaagcgggggcggacctctgctcctgccgccgtgcgcaccaccgtcgacgacgtcatcgactcggtggtcgccgatgcgcgcaactacacccccgccccctcgaccgtggacgcggtcatcgacagcgtggtggcagacgcgcgtgactatgccagacgcaagagccggcggcgacggatcgccaggcgccaccggagcacgcccgccatgcgcgccgcccgagctctgctgcgccgcgccagacgcacgggccgccgggccatgatgcgagccgcgcgccgcgctgccactgcacccacccccgcaggcaggactcgcagacgagcggccgctgccgccgccgcggccatctctagcatgaccagacccaggcgcggaaacgtgtactgggtgcgcgactccgtcacgggcgtgcgcgtgcccgtgcgcacccgtcctcctcgtccctgatctaatgcttgtgtcctcccccgcaagcgacgatgtcaaagcgcaaaatcaaggaggagatgctccaggtcgtcgccccggagatttacggaccaccccaggcggaccagaaaccccgcaaaatcaagcgggttaaaaaaaaggatgaggtggacgagggggcagtagagtttgtgcgcgagttcgctccgcggcggcgcgtaaattggaaggggcgcagggtgcagcgtgtgttgcggcccggcacggcggtggtgttcacgcccggcgagcggtcctcggtcaggagcaagcgtagctatgacgaggtgtacggcgacgacgacatcctggaccaggcggcggagcgggcgggcgagttcgcctacgggaagcggtcgcgcgaagaggagctgatctcgctgccgctggacgaaagcaaccccacgccgagcctaaagcccgtgaccctgcagcaggtgctgccccaggcagtgctgctgccgagccgcggggtcaagcgcgagggcgagagcatgtacccgaccatgcagatcatggtgcccaagcgccggcgcgtggaggacgtgctggacaccgtaaaaatggatgtggagcccgaggtcaaggtgcgccccatcaagcaggtggcgccgggcctgggcgtgcaaaccgtggacattcagatccccaccgacatggatgtcgacaaaaaaccctcgaccagcatcgaggtgcaaaccgacccctggctcccagcctccaccgctaccgcgtccacttctaccgccgccacggctaccgagcctcccaggaggcgaagatggggcgccgccagccggctgatgcccaactacgtgttgcatccttccatcatcccgacgccaggctaccgcggcacccggtactacgccagccgcaggcgcccagccagcaaacgccgccgccgcaccgccacccgccgccgtctggcccccgcccgcgtgcgccgcgtgaccacgcggcggggccgctcgctcgttctgcccaccgtgcgctaccaccccagcatcctttaatccgtgtgctgtgatactgttgcagagagatggctctcacttgccgcctgcgcatccccgtcccgaattaccgaggaagatcccgccgcaggagaggcatggcaggcagtggcctgaaccgccgccggcggcgggccatgcgcaggcgcctgagtggcggctttctgcccgcgctcatccccataatcgccgcggccatcggcacgatcccgggcatagcttccgttgcgctgcaggcgtcgcagcgccgttgatgtgcgaataaagcctctttagactctgacacacctggtcctgtatatttttagaatggaagacatcaattttgcgtccctggctccgcggcacggcacgcggccgttcatgggcacctggaacgagatcggcaccagccagctgaacgggggcgccttcaattggagcagtgtctggagcgggcttaaaaatttcggctcgacgctccggacctatgggaacaaggcctggaatagtagcactgggcagttgttaagggaaaagctcaaagaccagaacttccagcaaaaggtggtggacgggctggcctcgggcattaacggggtggtggacatcgcgaaccaggccgtgcagcgcgagataaacagccgcctggacccgcggccgcccacggtggtggagatggaagatgcaactcttccgccgcccaagggcgagaagcgaccgcggcccgacgcggaggagacaatcctgcaagtggacgagccgccctcgtacgaggaggccgtcaaggccggcatgcccaccacgcgcatcatcgcgccgctggccacgggtgtaatgaaacccgctacccttgacctgcctccaccacccacgcccgctccaccaaaagcagctccggttgtgcagccccctccggtggcgaccgccgtgcgccgcgtccccgcccgccgccaggcccagaactggcagagcacgctgcacagtatcgtgggcctgggagtgaaaagtctgaagcgccgccgatgctattgagagagagtaaagaggacactaaagggagagcttaacttgtatgtgccttaccgccagagaacgcgcgaagatggccaccccctcgatgatgccgcagtgggcgtacatgcacatcgccgggcaggacgcctcggagtacctgagcccgggtctggtgcagtttgcccgcgccaccgacacgtacttcagcctgggcaacaagtttaggaaccccacggtggctcccacccacgatgtgaccacggaccggtcccagcgtctgacgctgcgctttgtgcccgtggatcgcgaggacaccacgtactcgtacaaggcgcgcttcactctggccgtgggcgacaaccgggtgctagacatggccagcacttactttgacatccgcggcgtcctggaccgcggcccaagcttcaaaccctactcgggcacggcttacaacagcctggcccccaagggcgcccccaatcccagtcagtggactaccaaagaaaagcaaaacggaggaactggagcagaaaaagatgttacaaagacatttggacttgccgccatgggaggcagtaatatttctaaagacggtttgcagattggaactgacaaaacagcaaatgctgaaaaaccaatctatgcagacaaaactttccagccagaacctcaagttggagaagaaaactggcaggataatgatgaatattatggcggcagggctcttaaaaaagataccaaaatgaagccatgctatggttcatttgctaaacccacaaacaaggaaggtgggcaggctaaattgaaagaaacacccaatggtaccgatcctcaatacgatgtggacatggctttctttgactcaagcactataaatataccagatgtggtgttgtacactgaaaatgtagatttggaaactccagatacacatgtggtgtacaaaccaggcaaagaggatgacagttctgaagctaatttaactcagcagtccatgcctaacagaccaaactacattggcttcagagacaactttgtggggctattgtactacaacagcactggcaacatgggtgtgctggctggtcaggcttctcagttgaatgccgtggtcgacttgcaagacagaaacaccgaactgtcttaccagctcttgctagattctcttggtgacagaaccagatattttagtatgtggaactctgcggtggacagctatgatcccgatgtcaggatcattgagaaccacggtgtggaagatgaacttcctaactattgcttccccttggacggtgttcaaactaattcagcctatcaaggtgttaaactaaagcctgatcaaacaggaggcggagttaatggagattgggtaaaggatgatgacatttcagcccataatcaaattggaaagggcaacatctttgccatggagatcaacctccaggccaacctgtggaagagttttctgtactcgaacgtggccctgtacctgcccgactcctacaagtacacgccggccaacgtcacgctgcccgccaacaccaacacctatgagtacatgaacggccgcgtggtagccccctcgctggtggacgcctacattaacatcggcgcccgctggtcgctggaccccatggacaacgtcaacccctttaaccaccaccgcaatgcgggcctgcgctaccgctccatgcttttgggcaatggccgctacgtgcccttccacatccaagtgccccaaaagttctttgccatcaagaacctgctcctgctccccggctcctacacctacgagtggaacttccgcaaggatgtcaacatgatcctgcagagttccctcggaaacgacctgcgcgtcgacggcgcctccgtccgcttcgacagcgtcaacctctacgccaccttcttccccatggcgcacaacaccgcctccaccctggaagccatgctgcgcaacgacaccaacgaccagtccttcaacgactacctctcggccgccaacatgctctaccccatcccggccaaggccaccaacgtgcccatttccatcccctcgcgcaactgggccgccttccgcggctggagtttcacccggctcaagaccaaggaaactccctcccttggctcgggttttgacccctactttgtctactcgggctccatcccctacctcgacgggaccttctacctcaaccacaccttcaagaaggtttccatcatgttcgactcctcggtcagctggcccggcaacgaccggctgcttacgccgaacgagttcgagatcaagcgcagcgtcgacggggagggctacaacgtggcccaatgcaacatgaccaaggactggttcctcgtccagatgctctcccactacaacatcggctaccagggcttccatgtgcccgagggctacaaggaccgcatgtactccttcttccgcaacttccagcccatgagcaggcaggtggtcgatgagatcaactacaaggactacaaggcagtcaccctgcccttccagcacaacaactctggcttcaccggctacctggcacccaccatgcgtcaggggcagccctaccccgccaacttcccctacccgctcatcggctccaccgcagtgccatccgtcacccagaaaaagttcctctgcgacagggtcatgtggcgcatccccttctccagcaacttcatgtccatgggcgccctcaccgacctgggtcagaacatgctctacgccaactcggcccacgcgctcgacatgaccttcgaggtggaccccatggatgagcccaccctcctctatcttctcttcgaagttttcgacgtggtcagagtgcaccagccgcaccgcggcgtcatcgaggccgtctacctgcgcacgcccttctccgccggcaacgccaccacctaagcatgagcggctccagcgaacgagagctcgcggccatcgtgcgcgacctgggctgcgggccctactttttgggcacccacgacaagcgcttcccgggcttcctcgccggcgacaagctggcctgcgccatcgtcaacacggccggccgcgagaccgggggcgtgcactggctcgcctttggctggaacccgcgctcgcgcacctgctacatgttcgaccccttcgggttctcggaccgccggctcaagcagatttacagcttcgagtacgaggccatgctgcgccgaagcgccctggcctcctcgcccgatcgctgtcttagcctcgaacagtccacccagaccgtgcaggggcccgactccgccgcctgcggactcttctgttgcatgttcttgcatgccttcgtgcactggcccgaccgacccatggacgggaaccccaccatgaacttgctgacgggggtgcccaacggcatgctacaatcgccacaggtgctgcccaccctcaggcgcaaccaggaggagctctaccgcttcctcgcgcgccactccccctactttcgctcccaccgcgccgccatcgaacacgccaccgcttttgataaaatgaaacaactgcgtgtatgactcaaataaacagcacttttattttacacatgcgctggagtatatgcaagttatttaaaagtcgaaggggttctcgcgctcgtcgttgtgcgccgcgctggggagggccacgttgcggtactggaacttgggctgccacttgaactcggggatcaccagtttgggcactggagtctcggggaaggtctcgctccacatgcgccggctcatttgcagggcgcccagcatgtcagggccggagatcttgaaatcgcagttgggaccggtgctctgcgcgcgcgagttgcggtacacggggttgcagcactggaacaccatcagactggggtacttcacactggcaagcacgctcttgtcgctaatctgatccttgtccaggtcctcggcgttgctcaggccgaacggggtcatcttgcacagctggcggcccaggaagggcacgctctgaggcttgtggttacactcgcagtgcacgggcatcagcatcatccccgcgccgcgctgcatattcgggtagagggccttgacgaaggccgcgatctgcttgaaagcttgctgggccttggccccctcgctaaaaaacaggccgcagctcttcccgctgaactggttattcccgcacccggcatcatgcacgcagcagcgcgcgtcatggctggtcagttgcaccacgctccgtccccagcggttctgggtcaccttagccttgctgggctgctccttcagcgcgcgctgtccgttctcgctggtcacatccatctccaccacgtggtccttgtgaatcatcaccgttccatgcagacacttgagctgaccttccacctcggtgcagccgtgatcccacaggacgcagccggtgcactcccaattcttgtgcgcgatcccgctgtggctgaaaatgtaaccttgcaacaggcgacccataatggtgctaaatgctttctgggtggtgaatgtcagttgcatcccgcgggcctcctcgttcatccaggtctggcacatcttctggaagatctcggtctgctccggcatgagcttgtaagcatcgcgcaagccgctgtcgacgcggtagcgttccatcagcacgttcatggtatccatgcccttctcccatgacgagaccagaggcagactcagggggttgcgcacgttcaggacaccaggggtcgcgggctcgacgatgcgttttccgtccttgccttccttcaacagaaccggaggctggctgaatcccactcccacgatcacggcgtcttcctggggcatctcttcgtcggggtctaccttggtcacatgcttggtctttctggcttgcttcttttttggagggctgtccacggggaccacgtcctcctcggaagacccggagcccacccgctgatactttcggcgcttggtgggcagaggaggtggcggcggcgaggggctcctctcctgctccggcggatagcgcgccgacccgtggccccggggcggagtggcctctcgctccatgaaccggcgcacgtcctgactgccgccggccattgtttcctaggggaagatggaggagcagccgcgtaagcaggagcaggaggaggacttaaccacccacgagcaacccaaaatcgagcaggacctgggcttcgaagagccggctcgtctaaaacccccacaggatgaacaggagcacgagcaagacgcaggccaggaggagaccgacgctgggctcgagcatggctacctgggaggagaggaggatgtgctgctaaaacacctgcagcgccagtccctcatcctccgggacgccctggccgaccggagcgaaacccccctcagcgtcgaggagctgtgtcgggcctacgagctcaacctcttctcgccgcgcgtgccccccaaacgccagcccaacggcacctgcgagcccaacccgcgtctcaacttctatcccgtctttgcggtccccgaggcccttgccacctatcacatctttttcaagaaccaaaagatccccatctcctgtcgcgccaatcgcactcgcgccgacgcgctcctcgctctggggcccggcgcgcgcatacctgatatcgcttccctggaagaggtgcccaagatcttcgaagggctcggtcgggacgagacgcgcgcggcaaacgctctgaaagaaacagcagaggaagagggttacactagcgccctggtagagttggaaggcgacaacgccaggctggccgtgcttaagcgcagcgtcgagctcacccatttcgcctaccccgccgtcaacctcccgcccaaggtcatgcgtcgcatcatggatcagctcatcatgccccacatcgaggcccttgatgaaagtcaggaacagcgccccgagaacgcccagcccgtggtcagcgacgagatgctcgcgcgctggctcgggacccgcgacccccaggccctggagcagcggcgcaagctcatgctggccgtggtcctggtcacccttgagctcgaatgcatgcgccgcttttttaccgaccccgagaccctgcgcaaggtcgaggagaccctgcactacactttcagacacggtttcgtcaggcaggcctgcaagatctccaacgtggagctgaccaacctggtctcctgcctggggatcctacacgagaaccgcttgggacagaccgtgctccactctaccctgaagggcgaggcgcggcgggactacatccgcgactgcgtctttctctttctctgccacacatggcaagcggccatgggcgtgtggcagcagtgtctcgaggacgagaacctgaaggagctggacaagcttcttgctagaaaccttaaaaagctgtggacgggcttcgacgagcgcaccgtcgcctcggacctggccgagatcgtcttccccgagcgcctgaggcagacgctgaaaggagggctgcccgacttcatgagccagagcatgttgcaaaactaccgcactttcattctcgagcgatctgggatgctgcccgccacctgcaacgccttcccctccgactttgtcccgctgagctaccgcgagtgtcccccgccgctgtggagccactgctacctcttgcagctggccaactacattgcccaccactcggatgtgatcgaggacgtgagcggcgaggggctgctcgagtgccactgtcgctgcaacctatgctccccgcaccgctccctggtctgcaacccccagctactgagcgagacccaggtcatcggtacctttgagctgcaaggtccgcaggagtccaccgctccgctgaaactcacgccggggttgtggacttccgcgtacctgcgcaaatttgtacccgaggactactacgcccatgagataaagttcttcgaggaccaatcgcgtccgcagcacgcggatctcacggcctgcgtcatcacccagggcgcgatcctcgcccaattgcacgccatccaaaaatcccgccaagagtttcttctgaaaaagggtagaggggtctacctggacccccagacgggcgaggtgctcaacccgggtctcccccagcatgccgaggaagaagcaggagccgctagtggaggagatggaagaagaatgggacagccaggcagaggaggacgaatgggaggaggagacagaggaggaagacttggaagaggtggaagaggagcaggcaacagagcagcccgtcgccgcaccatccgcgccggcagcccctccggtcacggatacaacctccgcagctccggccaagcctcctcgtagatgggatcgagtgaagggtgacggtaagcacgagcgacagggctaccgatcatggagggcccacaaagccgcgatcatcgcctgcttgcaagactgcggggggaacatcgctttcgcccgccgctacctgctcttccaccgcggggtgaacatcccccgcaacgtgttgcattactaccgtcaccttcacagctaagaaaaagcaagtcaaaggagtcgccggaggaggaggcctgaggatcgcggcgaacgagcccttgaccaccagggagctgaggaaccggatcttccccactctttatgccatttttcagcaaagtcgaggtcagcagcaagagctcaaagtaaaaaaccggtctctgcgctcgctcacccgcagttgcttgtaccacaaaaacgaagatcagctgcagcgcactctcgaagacgccgaggctctgttccacaagtactgcgcgctgactcttaaagactaaggcgcgcccacccggaaaaaaggcgggaattacctcatcgccaccatgagcaaggagattcccaccccttacatgtggagctatcagccccagatgggcctggccgcgggcgcctcccaggactactccacccgcatgaactggcttagtgccggcccctcgatgatctcacgggtcaacggggtccgtaaccatcgaaaccagatattgttgcagcaggcggcggtcacctccacgcccagggcaaagctcaacccgcgtaattggccctccaccctggtgtatcaggaaatccccgggccgactaccgtactacttccgcgtgacgcactggccgaagtccgcatgactaactcaggtgtccagctggccggcggcgcttcccggtgcccgctccgcccacaatcgggtataaaaaccctggtgatccgaggcagaggcacacagctcaacgacgagttggtgagctcttcaatcggtctgcgaccggacggagtgttccaactagccggagccgggagatcgtccttcactcccaaccaggcctacctgaccttgcagagcagctcttcggagcctcgctcgggaggcatcggaaccctccagttcgtggaggagtttgtgccctcggtctacttcaaccccttctcgggctcgccaggcctctacccggacgagtttataccgaacttcgacgcagtgagagaagcggtggacggctacgactgaatgtcctatggtgactcggctgagctcgctcggttgaggcatctggaccactgccgccgcctgcgctgctttgcccgggagagctacggcctcatctactttgagctgcccgaggagcaccccaacggccctgcacacggagtgcggatcaccgtagagggcaccaccgagtctcacctggtcaggttcttcacccagcaacccttcctggtcgagcgggaccggggcgccaccacctacaccgtctactgcatttgtcctaccccgaagttgcatgagaatttttgttgtactctttgtggtgagtttaataaaagctaaactcttgcaatactctggaccttgtcgtcatcaactcaacgagaccgtctacctcaccaaccagactgaggtaaaacttacctgcagaccacacaagacctatatcatctggttcttcgagaacacctcatttgcagtctccaacactcactgcaacgacggtgttgaacttcccaacaacctttccagtggactgagttacaatacacgtagagctaagctcatcctctacaatccttttgtagagggaacctaccagtgccagagcggaccttgcttccacagttttactttggtgaacgttaccggcagcagcacagccgctccagaaactaaccttccttctgatactatcaaaccttgtttcggaggtgagctaaggcttcccccttctcaggagggggttagcccatacgaagtggtcgggtatttgattttaggggtggtcctgggtgggtgcatagcggtgctagctcagctgccttgctgggtggaaatcaaaatctttatatgctgggtaagacattgtggggaggaactatgaaggggctcttgctgattatcctttccctggtggggggtgtgctgtcatgccacgaacagccacgatgtaacatcaccacaggcaatgagaggaacgactgctctgtagttatcaaatgcgagcaccattgtcctctcaacattacattcaaaaataagaccatgggaaatgtatgggtgggattctggcaaccaggagatgagcagaactacacggtcactgtccatggtagcaatggcaatcacactttcggtttcaaattcatttttgaagtcatgtgtgatatcacactacatgtggctagacttcatggcttgtggccccctaccaaggataacatggtgggtttttctttggcttttgtgatcatggcctgcttgatgtcaggtctgctggtaggggctctagtgtggtttctgaaacgcaagcccaggtatggaaatgaagagaaggaaaaattgctataaattctttttctttttcgcagaaccatgaatacagtgatccgtatcgtgctgctctctcttcttgtagcttttagtcaggcaggatttcatactatcaatgctacatggtgggctaatataactttagtgggacccccagacacaccagtcacttggtatgatactcaaggattgtggttttgcaatggcagtagagttaagaatcctcaaatcagacatacatgtaatgatcaaaaccttactttgatccatgtgaacaaaacttatgaaagaacatacatgggttataatagacaagggactaaaaaagaagactacaaagttgtagttataccacctcctcctgctactgtaaaaccacagccagagccagagtatgtgtttgtttatatgggagagaacaaaactctagaaggtcctccgggaactccagtcacatggtttaatcaggatggaaagaaattttgtgaaggagaaaaagttcttcatccagaatttaaccacacctgtgacaaacaaaaccttatactactgtttgtgaattttacacatgatggagcttaccttgggtacaatcatcaaggaacccagagaacacactatgaagttacagtattagatctttttccagattctggccaaatgaaaattgaaaatcatagtgaggaaacagagcaaaaaaatgatgaacatcataactggcagaaacagggtgggcaaaaacagggtgggcaaaaaacaaatcaaacaaaagttaatgacaggagaaaaacagcgcaaaaaagaccatcaaagctaaagccggcaactattgaggcaatgctggttacagtgactgccgggtctaacttaactttggttggacctaaagcagaaggaaaagttacttggtttgatggagatttaaaaagaccatgtgagcctaattacagactaagacacgaatgtaataatcaaaacttaactctgattaatgtaactaaagattatgagggaacttactatggtacaaatgacaaagatgagggcaaaaggtacagagtgaaagtaaatactacaaattctcaatctgtgaaaattcagccatataccagacaaactactcctgatcaagagcacaaatttgaattacagttcgaaactaatggaaattatgattcaaaaattccctcaaccactgtggcaatcgtggtgggtgtgattgcgggcttcataactctgatcattgtcttcatatgctacatctgctgccgcaagcgtcccagggcatacaatcatatggtagacccactactcagcttctcttactaagactcagtcactttcatttcagaaccatgaaggctttcacagcttgcgttctgattagcctagtcacacttagtgtagctattaaaaatcaatatcatgttcataatgttaccagagatggatatatcacattaaatgtaacaattgataatactacctggacaagatatcatttaaataagtggcatcaaatttgtacgtggtcagacccatcatacaaatgtcacagcaatggcagcattaccattcatgctttcaatattacttctggccagtacaaagctgaaagttttactaactggtttagatattacggtaatcataaacatgaaattcatatttttaacataactgtaattgagcatcctacaacaaaagcacccaccactgctaatacagctacatcaattaaatcaacaaccacacagcctactactagggagacaactcaacctaccaccacagtcagtacaactactgagaccactactcaaactacacagctagacacaacagtgcagaatagcactgtgttggttaggtatctgttgagggaggaaagtactactgaacagacagaggctacctcaagtgcctttagcagcactgcaaatttaacttcgcttgcttggactaatgaaaccggagtatcattgatgaatcatcagcctttctcaggtttggatattcaaattacttttctggttgtttgtgggatctttattcttgtggttcttctgtactttgtctgctgcaaagccagagagaaatctaggaggcccatctacaggccagtaatcggggaacctcagccactccaagtggaagggggtctaaggaatcttcttttctctttttcagtatggtgatcagccatgattcctaggttcttcctatttaacatcctcttctgtctcttcaacatctgcgctgcctttgcagccgtctcgcacgcctcgcccgactgtctcgggcccttcccaacctacctcctctttgccctgctcacctgcacctgcgtctgcagcattgtctgcctggtcatcaccttcctgcagcttatcgactggtgctgtgcgcgctacaattatctccatcacagtcccgaatacagggacaagaacgtagccagaatcttaaggctcatctgaccatgcagactctgctcatgctgctatccctcctatcccctgccctagccacttatgctgattactctaaatgcaaattcgcagacatatggaatttcttagattgctatcaggaaaaaattgatatgccctcctattacttggtgattgtgggaatagtcatggtctgctcctgcactttctttgccatcatgatttacccctgttttgatctcggctggaactctgttgaagcattcacatacacactagaaagcagttcactagcctccacgccaccacccacaccgcctcctcgcagaaatcagttccccctgatacagtacttagaagagccccctccccgacccccttccactgttagctactttcacataaccggcggcgatgactgaccaccacctggacctcgagatggacggccaggcctccgagcagcgcatcctgcaactgcgcgtccgtcagcagcaggagcgggccgccaaggagctccttgatgccatcaacatccaccagtgcaagaagggcatcttctgcctggtcaaacaggcaaagatcacctacgagctcgtgtccaacggcaaacagcatcgccttacctatgagatgccccagcagaagcagaagttcacctgcatggtgggcgtcaaccccatagtcatcacccagcagtcgggcgagaccaacggctgcatccactgctcctgcgaaagccccgagtgcatctactcccttctcaagaccctttgcggactccgcgacctcctccccatgaactgatgttgattaaaagcccagaaaccaatcagacccttcctcatttccccatcccaatactcataagaataaatcattggaattaatcattcaataaagatcacttacttgaaatctgaaagtatgtctctggtgtagttgctcagcaacacctcggtaccctcctcccagctctggtactccagtccccggcgggcggcgaacttcctccacaccttgaaagggatgtcaaattcctggtccacaattttcattgtcttccctcttagatgtcaaagaggctccgggtggaagatgacttcaaccccgtctacccctatggctacgcgcggaatcagaatatccccttcctcactcccccctttgtctcctccgatggattcaaaaacttcccccctggggtactgtcactcaaactggctgatccaatcaccattaccaatggggatgtatccctcaaggtgggaggtggtctcactttgcaagatggaagcctaactgtaaaccctaaggctccactgcaagttaatactgataaaaaacttgagcttgcatatgataatccatttgaaagtagtgctaataaacttagtttaaaagtaggacatggattaaaagtattagatgaaaaaagtgctgcggggttaaaagatttaattggcaaacttgtggttttaacaggaaaaggaataggcactgaaaatttagaaaatacagatggtagcagcagaggaattggtataaatgtaagagcaagagaagggttgacatttgacaatgatggatacttggtagcatggaacccaaagtatgacacgcgcacactttggacaacaccagacacatctccaaactgcacaattgctcaagataaggactctaaactcactttggtacttacaaagtgtggaagtcaaatattagctaatgtgtctttgattgtggtcgcaggaaagtaccacatcataaataataagacaaatccaaaaataaaaagttttactattaaactgctatttaataagaacggagtgcttttagacaactcaaatcttggaaaagcttattggaactttagaagtggaaattccaatgtttcgacagcttatgaaaaagcaattggttttatgcctaatttggtagcgtatccaaaacccagtaattctaaaaaatatgcaagagacatagtttatggaactatatatcttggtggaaaacctgatcagccagcagtcattaaaactacctttaaccaagaaactggatgtgaatactctatcacatttaactttagttggtccaaaacctatgaaaatgttgaatttgaaaccacctcttttaccttctcctatattgcccaagaatgaaagaccaataaacgtgtttttcatttgaaattttcatgtatctttattgatttttacaccagcacgagtagacagtctcccaccaccagcccattttacagtgtacacggttctctcagcacgggtagccttaaatagggaaatattctcattagtgcgggaattggacttggggtctataatccacacagtttcctggcgagccaaacgggggtcggtgattgaaataaagccgtcctctgaaaagtcatccaagcgggcctcacagtccaaggtcacagtctggtggaacgagaagaacgcacagattcatactcggaaaacaggatgggtctgtgcctctccatcagcgccctcagcagtctctgccgccggggctcggtgcggctgctgcaaatgggatcgggatcacaagtctctctgactatgatcccaacagccttcagcatcagtctcctggtgcgacgggcacagcaccgcatcctgatctctgccatgttctcacagtaagtgcagcacataatcaccatgttattcagcagcccataattcagggcgctccagccaaagctcatgttgggaatgatggaacccacgtgaccatcgtaccagatgcgacagtatatcaggtgcctgcccctcatgaacacactgcccatgtacatgatctctttgggcatgtttctgtttacaatctggcggtaccaggggaagcgctggttgaacatgcacccgtaaatgactctcctgaaccacacggccagcagggtgcctcccgcccgacactgcagggagccaggggatgaacagtggcaatgcaggatccagcgctcgtacccgctcaccatttgagctcttaccaagtccagggtagcggggcacaggcacactgacatacatctttttaaaatttttatttcctctgtggtgaggatcatatcccaggggactggaaactcttggagcagggtaaagccagcagcacatggtaatccacggacagaacttacattatgataatctgcatgatcacaatcgggcaacaggggatgttgttcagtcagtgaagccctggtttcctcatcagatcgtggtaaacgggccctgcgatatggatgatggcggagcgagctggattgaatctcggtttgcattgtagtggattctcttgcgtaccttgtcgtacttctgccagcagaaatgggcccttgaacagcatatacccctcctacggccgtcctttcgctgctgccgctcagtcatccaactaaagtacatccattctcgaagattctggagaagttcctctgcatctgataaaataaaaaacccgtccatgcgaattcccctcatcacatcagccaggactctgtaggccatccccatccagttaatgctgccttgtctatcattcagagggggcggtggcaggactggaagaaccatttttattccaaacggtctcgaaggacgataaagtgcaagtcacgcaggtgacagcgttcccctccgctgtgctggtggaaacagacagccaggtcaaaacccactctattttcaaggtgctcgaccgtggcttcgagcagtggctctacgcgcacatccagcataagaatcacattaaaggctggccctccatcgatttcatcaatcatcaggttacattcctgcaccatccccaggtaattctcatttttccagccttggattatctctacaaattgttggtgtaagtccactccgcacatgtggaaaagctcccacagtgccccctccactttcataatcaggcagaccttcataatagaaacagatcctgctgctccaccacctgcagcgtgttcaaaacaacaagattcaataaggttctgccctccgccctgagctcgcgcctcaatgtcagctgcaaaaagtcacttaagtcctgggccactacagctgacaattcagagccagggctaagcgtgggactggcaagcgtaagggaaaactttaatgctccaaagctagcacccaaaaactgcatgctggaataagctctctttgtgtctccggtgatgccttccaaaatgtgagtgataaagcgtggtagtttttctttaatcatttgcgtaatagaaaagtcctctaaataagtcactaggaccccagggaccacaatgtggtagcttacaccgcgtcgctgaagcatggttagtagagatgagagtctgaaaaacagaaagcatgcactaaactaaggtggctattttcactgaaggaaaaatcactctctccagcagcagggtacccactgggtggcccttgcggacatacaaaaatcggtccgtgtgattaaaaagcagcacagtaagttcctgtcttcttccggcaaaaatcacatcagactgggttagtatgtccctggcatggtagtcattcaaggccataaatctgccctgatatccagtaggaaccagcacactcacttttaggtgaagcaataccaccccatgcggaggaatgtggaaagattcagggcaaaaaaattatatctattgctagccccttcctggacgggagcaatccctccaggactatctataaaagcatacagagattcagccatagcttagcccgcttaccagtagacagaaagcacagcagtacaagcgccaacagcagcaactgactacccactgacccagctccctatttaaaggcaccttacactgacgtaatgaccaaaggtctaaaaaccccgccaaaaaaaacacacacgccctgggtgtttttcacaaaaacacttccgcgttctcacttcctcgtatcgattttgtgactcaacttccgggttcccacgttacgtcacttctgcccttacatgtaacttggccgtatggcgccatcttgcccacgtccaaaatggctttcatgaccggccacgcctccgcgccggccgttagccgtgcgtcgtgacgttatttgcatcaccgcttctcgtccaatcagcgttggctccgccccaaaaccgttaaaattcaaaagctcatttgcatattaacttttgtttactttgtggggtatattatgatgatg

SEQ ID NO: 218 - DNA, 35385 bp, Human adenovirus
  misc_feature 1..35385: note = Reference Ad50 Genome Sequence: GenBank accession no. AY737798 (SEQ ID NO: 218); Human adenovirus 50
  source 1..35385: mol_type = genomic DNA
caatcaatataatataccttatagatggaatggtgccaatatgtaaatgaggtaatttaaaaaagtgcgcgctgtgtggtgattggctgcggggtgaacggctaaaaggggcggacatgctgggaggtgacgtgacttatgggggaggagttatgttgcaagttatcgcggtaaaggtgacgtaaaacgaggtgtggtttggacacggaagtagacagttttcccacgcttactgacaggatatgaggtagttttgggcggatgcaagtgaaaattctccattttcgcgcgaaaactgaatgaggaagtgaatttctgagtcatttcgcggttatgacagggtggagtatttgccgagggccgagtagactttgaccgtttacgtggaggtttcgattaccgtgtttttcacctaaatttccgcgtacggtgtcaaagtcctgtgtttttacgtaggtgtcagctgatcgctagggtatttaaacctgtcgagttccgtcaagaggccactcttgagtgccagcgagaagagttttctcctccgcgccgcgagtcagttttgcgctttgaaaatgagacacctgcgattcctgccacaggagattatctccagcgagaccgggatagaaatactggagtttgtggtaaataccctgatgggagatgacccggaaccgccagcgcagcctttcgatccacctacgctgcacgatctgtatgatttagaggtagacgggccggacgatcccaatgaggaagctgtaaatgggttttttactgattctatgctactagctgccgatgaaggattggacataaaccctcctcctgagacccttgataccccaggggtggttgtggaaagcggcagaggtgggataaaattgcctgatctgggagcagctgaaatggacttgcgttgttatgaagagggttttcctccgagtgatgatgaagatggggaaactgaacagtccatccataccgcagtgaatgagggagtaaaagctgccagcgatgtttttaagttggactgtccggagctgcctggacatggctgtaagtcttgtgaatttcacaggaataacactggaatgaaagaactattgtgctcgctttgctatatgagaatgcactgccattttatttacagtaagtgtatttaagtgaaatttaaaggaatagtgtagctgtttaataactgttgaatggtagatttatgtttttacttgtgattttttgtaggtcctgtgtctgatgatgagtcgccttctcctgattcaactacctcacctcctgaaattcaggcgcccgtacctgcaaacgtatgcaagcccattcctgtgaagcctaagtctgggaaacgccctgctgtggataagcttgaggacttgttggagggtggggatggacctttggaccttagtacccggaaactgccaaggcaatgagtgccctgcagctgtgtttatttaatgtgacgtcatgtaataaaattatgtcagctgctgagtgttttattgcttcttgggtggggacttggatatataagtaggagcagatctgtgtggttagcttatagcaacctgctgccatccatggaggtttgggctatcttggaagacctgagacagactaggctactgctagaaaacgcctcggacggagtctctggcttttggagattctggttcggtggtgatctagctaggctagtgtttaggataaaacaggactacagggaagaatttgaaaagttattggacgacagtccaggactttttgaagctcttaacttgggccatcaggctcattttaaggagaaggttttatcagttttagatttttctactcctggtagaactgctgctgctgtagcttttcttacttttatattggataaatggatccgacaaacccacttcagcaagggatacgttttggatttcatagcagcagctttgtggagaacatggaaggctcgcagcatgaggacaatcttagattactggccagtgcagcctctgggagtagcagggatactgagacacccaccgaccatgccagcggttctggaggaggagcagcaggaggacaatccgagagccggcctggaccctccggtggaggagtagctgacctgtttcctgaactgcgacgggtgcttactaggtctacgtccagtggacaggacaggggcattaagagggaaaggaatcctagtgggaataattcaagaaccgagttggctttaagtttaatgagccgtaggcgtcctgaaactgtttggtggcatgaggttcagagcgaaggcagggatgaagtttcaatattgcaggagaaatattcactagaacaacttaagacctgttggttggaacctgaggatgattgggaggtggccattaggaattatgctaagatatctctgaggcctgataaacagtatagaattactaaaaagattaatattagaaatgcatgctacatatcagggaatggggcagaggttataatagatacccaagataaagcagcttttagatgttgtatgatgggtatgtggccaggggttgtcggcatggaagcagtaacatttatgaatattaggtttaaaggggatgggtataatggcattgtatttatggctaacactaagctgattctacatggttgtagcttttttgggtttaataatacttgtgtagaagcttgggggcaagttggtgtgaggggttgtagtttttatgcatgctggattgcaacatcaggtagggtcaagagtcagttgtctgtgaagaaatgcatgtttgagagatgtaatcttggcatactgaatgaaggtgaagcaagggtccgccactgcgcagctacagaaactggctgcttcattctaataaagggaaatgccagtgtgaagcataatatgatctgtggacattcgaatgagaggccttatcagatgctgacttgcgctggtggacattgcaatattcttgctaccgtgcatatcgtttcccatgcacgcaagaaatggcctgtatttgaacataatgtgattaccaagtgcaccatgcacataggtggtcgcaggggaatgtttatgccttaccagtgtaacatgaatcatgtgaaggtgatgttggaaccagatgccttttccagagtgagcttaacaggaatctttgatatgaatattcaactatggaagatactgagatatgatgacactaaaccgagggtgcgcgcatgcgaatgcggaggcaagcatgctagattccagccggtgtgcgtggatgtgactgaagacctgagacccgatcatttggtgcttgcctgcactggagcggagttcggttctagtggtgaagaaactgactaaagtgagtagtggggcaagatgtggatggagactttcaggttggtaaggtggacagattgggtaaattttgttaatttctgtcttgcagctgccatgagtggaagcgcttcttttgaggggggagtatttagcccttatctgacgggcaggctcccatcatgggcaggagttcgtcagaatgtcatgggatccactgtggatgggagacccgtccagcccgccaattcctcaacgctgacctatgccactttgagttcgtcaccattggatgcagctgcagccgccgccgctactgctgccgccaacaccatccttggaatgggctattacggaagcatcgttgccaattccagttcctctaataacccttcaaccctggctgaggacaagctacttgttctcttggctcagctcgaggccttaacccaacgcttaggcgaactgtctaagcaggtggcccagttgcgtgagcaaactgagtctgctgttgccacagcaaagtctaaataaagatctcaaatcaataaataaagaaatacttgttataaaaacaaatgaatgtttatttggtttttcgcgcgcggtatgccctggaccatcggtctcgatcattgagaactcggtggatcttttccagtaccctgtaaaggtgggattgaatgtttagatacatgggcattagtccgtctcgggggtggagatagctccattgaagagcctcttgctccggggtagtgttataaatcacccagtcatagcaaggtcggagtgcatggtgttgcacaatatcttttaggagcagactaattgcaacggggaggcccttagtgtaggtgtttacaaatctgttgagctgggacgggtgcatcctgggggaaattatatgcattttggactggatcttgaggttggcaatgttgccgcctagatcccgtctcgggttcatattgtgcagaaccaccaagacagtgtatccggtgcacttgggaaatttatcatgcagcttagagggaaaagcatgaaaaaatttggagacgcctttgtgaccccccagattctccatgcactcatccataatgatagcgatggggccgtgggcagcggcacgggcgaacacgttccgggggtctgaaacatcatagttatgctcctgagtcaggtcatcataagccattttaataaactttgggcggagggtgccagattgggggatgaaagttccctctggcccgggagcatagtttccctcacatatttgcatttcccaggctttcagttccgagggggggatcatgtccacctgcggggctataaaaaataccgtttctggagccggggtgattaactgggatgagagcaaattcctaagcagctgagacttgccgcacccagtgggaccgtaaatgaccccaattacgggttgcagatggtagtttagggagcgacagctgccgtcctcccggagcaggggggccacttcgttcatcatttcccttacatggatattttcccgcaccaagtccgttaggaggcgctctcccccaagggatagaagctcctggagcgaggagaagtttttcaacggtttcagcccgtcagccatgggcattttggaaagagtctgttgcaagagctcgagccggtcccagagctcggtgatgtgctctatggcatctcgatccagcagacctcctcgtttcgcgggttgggacggctcctggagtagggaatcagacgatgagcgtccagcgctgctagggtccgatccttccatggtcgcagcgtccgagtcagggttgtttccgtcacggtgaaggggtgcgcgcctggttgggcgcttgcgagggtgcgcttcagactcatcctgctggtcgagaaccgctgccgatcggcgccctgcatgtcggccaggtagcagtttaccatgagttcgtagttgagcgcctcggccgcgtggcctttggcacggagcttacctttggaagttttatggcaggcggggcagtagatacatttgagggcatacagcttgggcgcgaggaaaatggattcgggggagtatgcatccgcaccgcaggaggcgcagacggtttcgcactccacgagccaggtcagatccggctcatcggggtcaaaaacaagttttccgccatgttttttgatgcgtttcttacctttggtttccatgagttcgtgtccccgctgggtgacaaagaggctgtccgtgtccccgtagaccgactttatgggcctgtcctcgagcggagtgcctcggtcctcttcgtagaggaacccagcccactctgatacaaaagcgcgtgtccaggccagcacaaaggaggccacgtgggaggggtagcggtcgttgtcaaccagggggtccaccttctctacggtatgtaaacacatgtccccctcctccacatccaagaatgtgattggcttgtaagtgtaggccacgtgaccaggggtccccgccgggggggtataaaagtgggcgggcctctgttcgtcctcactgtcttccggatcactgtccaggagcgccagctgttggggtaggtattctctctcgaaggcgggcatgacctctgcactcaggttgtcagtttctaggaacgaggaggatttgatattgacagtaccagcagagatgcctttcataagactctcgtccatctggtcagaaaacacaatcttcttgttatccagcttggtggcaaatgatccatagagggcattggatagaagcttggcgatggagcgcatggtttggttcttttccttgtccgcgcgctccttggcggcgatgttaagctggacgtactcgcgcgccacacatttccattcagggaagatggttgtcagttcatccggaactattctgactcgccatcccctattgtgcagggttatcagatccacactggtggctacctcgcctcggaggggctcattggtccagcagagtcgacctccttttcttgaacagaaaggggggagggggtctagcatgaactcatcaggggggtccgcatctatggtaaatattcccggtagcaaatctttgtcaaaatagctgatggtggcgggatcatccaaggtcatctgccattctcgaactgccagcgcgcgctcgtaggggttaagaggggtgccccagggcatggggtgggtgagcgcggaggcatacatgccacagatatcgtagacatagaggggctcttcgaggatgccgatgtaagtgggataacagcgcccccctctgatgcttgctcgcacatagtcatagagttcatgtgagggggcgagaagacccgggcccagattggtgcggttgggtttttccgccctgtaaacgatctggcgaaagatggcatgggaattggaagagatagtaggtctctggaatatgttaaaatgggcatgaggtaggcctacagagtcccttatgaagtgggcatatgactcttgcagcttggctaccagctcggcggtgacgagtacgtccagggcacagtagtcgagagtttcctggatgatgtcataacgcggttggcttttcttttcccacagctcgcggttgagaaggtattcttcgcgatccttccagtactcttcgaggggaaacccgtctttttctgcacggtaagagcccaacatgtagaactgattgactgccttgtagggacagcatcccttctccactgggagagagtatgcttgggctgcattgcgcagcgaggtatgagtgagggcaaaagtgtccctgaccatgactttgaggaattgatacttgaagtcgatgtcatcacaggccccctgttcccagagttggaagtccacccgcttcttgtaggcggggttgggcaaagcgaaagtaacatcattgaagaggatcttgccggccctgggcatgaaatttcgggtgattctgaaaggctgagggacctctgctcggttattgataacctgagcggccaagacgatctcatcaaagccattgatgttgtgccccactatgtacagttctaagaatcgaggggtgcccctgacatgaggcagcttcttgagttcttcaaaagtgaggtctgtagggtcagtgagagcatagtgttcgagggcccattcgtgcacgtgagggttcgctttgaggaaggaggaccagaggtccactgccagtgctgtttgtaactggtcccggtactgacgaaaatgctgcccgactgccatcttttctggggtgacgcaatagaaggtttgggggtcctgccgccagcgatcccacttgagttttatggccaggtcataggcgatgttgacgagccgctggtctccagagagtttcatgaccagcatgaaggggattagctgcttgccaaaggaccccatccaggtgtaggtttccacatcgtaggtgaggaagagcctttctgtgcgaggatgagagccaatcgggaagaactggatctcctgccaccagttggaggaatggctgttgatgtgatggaagtagaactccctgcgacgcgccgagcattcatgcttgtgcttgtacagacggccgcagtactcgcatcgattcacgggatgcacctcatgaatgagttgtacctgacttcctttgacgagaaatttcagtggaaaattgaggcctggcgattgtacctcgcgctctactatgttgtctgcatcggcatgaccatcttctgtctcgatggtggtcatgctgacgagccctcgcgggaggcaagtccagacctcggcgcggcaggggcggagctcgaggacgagagcgcgcaggccggagctgtccagggtcctgagacgctgcggagtcaggttagtaggcagtgtcaggagattgacttgcatgatcttttcgagggcgtgagggaggttcagatggtacttgatctccacgggtccgttggtggagatgtcgatggcttgcagggttccgtgccccttgggcgctaccaccgtgcccttgtttttccttttgggcggcggtggctctgttgcttcttgcatgtttagaagcggtgtcgagggcgcgcaccgggcggcaggggcggttcgggacccggcggcatggccggcagtggtacgtcggcgccgcgcgcgggtaggttctggtactgcgccctcagaagactcgcatgcgccacgacgcggcggttgacatcctggatctgacgcctctgggtgaaagctaccggccccgtgagcttgaacctgaaagagagttcaacagaatcaatctcggtatcgttgacggcggcttgcctaaggatttcttgcacgtcgccagagttgtcctggtaggcgatctcggccatgaactgctcgatctcttcctcttgaagatctccgcggcccgctctctcgacggtggccgcgaggtcgttggagatacgcccaatgagttgagagaatgcattcatgcccgcctcgttccagacgcggctgtagaccacagcccccacgggatctctcgcgcgcatgaccacctgggcgaggttgagctccacgtggcgggtgaagaccgcatagttgcataggcgctggaaaaggtagttgagtgtggtggcgatgtgctcggtgacgaagaaatacatgatccatcgtctcagcggcatctcgctgacatcgcccagcgcttccaagcgctccatggcctcgtagaagtccacggcaaagttgaaaaactgggagttacgcgcggacacggtcaactcttcttccaaaagacggatgagttcggcgatggtggtgcgcacctcgagctcgaaagcccctgggatttcttcctcaatctcttcttcttccactaacatctcttcctcttcaggtggggctgcaggaggagggggaacgcggcgacgccggcggcgcacgggcagacggtcgatgaatctttcaatgacctctccgcggcggcggcgcatggtctcggtgacggcacgaccgttctccctgggtctcagagtgaagacgcctccgcgcatctccctgaagtggtgactgggaggctctccgttgggcagggacaccgcgctgattatgcattttattaattgccccgtaggtactccgcgcaaggacctgatcgtctcaagatccacgggatctgaaaacctttcgacgaaagcgtctaaccagtcgcaatcgcaaggtaggctgagcactgtttcttgcgggcgggggcggctagacgctcggtcggggttctctctttcttctccttcctcctctttggagggtgagacgatgctgctggtgatgaaattaaaataggcagttttgagacggcggatggtggcgaggagcaccaggtctttgggtccggcttgttggatgcgcaggcgatgggccattccccaagcattatcctgacatctggccagatctttatagtagtcttgcatgagtcgttccacgggcacttcttcttcgcccgctctgccatgcatgcgagtgatcccgaacccgcgcatgggctggacaagtgccaggtccgctacaaccctttctgcgaggatggcttgctgcacctgggtgagggtggcttggaagtcgtcaaagtccacgaagcggtggtaagccccggtgttgattgtgtaggagcagttggccatgactgaccagttgactgtctggtgcccagggcgcacaagctcggtatacttaaggcgcgagtatgcgcgggtgtcaaagatgtaatcgttacaggtgcgcaccaggtactggtagccgatgagaaagtgcggcggcggctggcggtataggggccatcgctctgtagccggggcgccaggggcgaggtcttccagcatgaggcggtgataaccgtagatgtacctggacatccaggtgataccggaggcggtggtggatgcccgcgggaactcgcgtacgcggttccagatgttgcgcagcggcatgaagtagttcatggtaggcacggtttggcccgtgagacgtgcacagtcgttgatgctctagacatacgggcaaaaacgaaagcggtcagcggctcgtctccgtggcctggaggctaagcgaacgggttgggctgcgcgtgtaccccggttcgaatctcggatcaggctggagccgcagctaacgtggtactggcactcccgtctcgacccaggcctgcacaaaacctccaggatacggaggcgggtcgtttttttttttttggctttttcctggatgggagccaatgctgcgtcaagctttagaacactcagttctcggggctgggagtggctcgcgcccgtagtctggagaatcaatcgccagggttgcgttgcggtgtgccccggttcgagtcttagcgcgccggatcggccggtttccgcgacaagcgagggtttggcagcctcgtcatttctaagaccccgccagccgacttctccagtttacgggagcgagccctctttttttgtttttttgttgcccagatgcatcccgtgctgcgacagatgcgcccccagcaacagcccccttctcagcagcagctacaacaacagccacaaaaggctcttcctgctcctgtaactactgcggctgcagccgtcagcggcgcggggcagcccgcctatgatctggacttggaagagggcgagggactggcgcgcctgggcgcaccatcgcccgagcggcacccgcgggtgcaactgaaaaaggactctcgcgaggcgtacgtgccccagcagaacctgttcagggacaggagcggcgaggagcctgaggaaatgcgagcttcccgctttaacgcgggtcgcgaactgcgtcacggtctggaccgaagacgggtgctgcgtgatgatgattttgaagtcgatgaagtgacaggaataagtcctgctagggcacatgtggccgcggccaacctagtatcagcttacgagcagaccgtgaaggaggagcgcaactttcaaaaatctttcaacaaccatgtgcgcaccctgattgcccgcgaggaagtgacactgggtctgatgcacctgtgggacctgatggaagccattacccagaaccccaccagcaaacctctaaccgctcagctgtttctggtggtgcaacatagtagagacaatgaggcatttagggaggcgctgttgaacattactgagcccgaggggagatggttgtatgatcttatcaatattctgcaaagtataatcgtgcaagaacgtagcctgggtctagctgagaaggtggctgctattaactactcggtcttgagcctgggcaagcactacgctcgcaagatctacaaaaccccatacgtacctatagacaaggaggtgaagatagatgggttttatatgcgcatgactctcaaggtgctgaccttgagtgacgatctgggagtgtaccgcaacgacaggatgcaccgcgcagtgagcgccagcagaaggcgtgagctgagcgacagagaacttatgcacagcttgcaaagagctctgactggggctggaaccgagggggaaaactactttgacatgggagcggacttgcagtggcagcccagtcgcagggccctggacgcagcagggtatgagcttccttacatagaagaggtggatgaaggccaggatgaggagggcgagtatctggaagactgatggcgcgaccatccatatttttgctagatggaacagcaggcaccggaccccgcaaaacgggcggcgctacagagccagccgtccggcattaactcctcggacgattggagccaggccatgcaacgcatcatggcgctgacgacccgcaaccccgaagcctttagacagcaaccccaggccaaccgcctttctgccatcctggaggccgtagtgccctcccgctccaaccccacacacgagaaggtcctggccatcgtgaacgcgctggtggagaacaaagccatacgtcccgatgaggctgggctggtatacaatgccctattggagcgcgtagcccgttacaacagcagcaacgtgcagaccaacctggaccggatggtgaccgatgtgcgcgaggccgtgtctcagcgcgagcggttccagcgagacgccaatttagggtcgctggtggctttgaacgccttcctcagcactcagcctgccaacgtgcctcgcggtcagcaagactacacaaactttctaagtgcattgagactcatggtggccgaagtccctcaaagcgaagtgtaccagtccgggccagactactttttccagaccagcagacagggcttgcagacagtgaacctgagccaggcttttaagaacctgaatggtctgtggggagtgcgcgccccagtgggagatcgggcgaccgtgtctagcttgctgacccccaactcccgcctactactgctcttggtagccccattcactgacagcggtagcatcgaccgtaattcgtacttgggctatctgttgaacctgtatcgcgaggccatagggcaaactcaggtagatgagcaaacctatcaagaaattacccaagtgagccgcgctctgggtcgggaggacactggcagcttggaagccaccttaaacttcttgctgaccaaccggtcgcagaagatccctcctcagtattcgcttaccgcggaggaggaacggatcctgagatacgtgcagcagagcgtgggactgttcctaatgcaggagggggcgactcctactgctgcgctcgatatgacagcccgaaacatggagcccagcatgtatgccagtaaccggccttttatcaataaactgctagactacttacacagggcggctgctatgaactctgattatttcaccaatgctatcctgaacccccattggctgcccccacctgggttctatacgggcgagtatgacatgcccgaccccaatgacgggtttttatgggacgatgtggacagtagtgttttctccccgcctcctggttataacacttggaagaaggaaggtggcgatagaaggcactcttccgtgtcactgtccggagcaacgggtgctgcagcggctcccgaggccgcaagtcctttccctagtttgccattttcgctaaacagtgtacgcagcagtgagctgggaagaataacccgtcctcgcttgatcggcgaggaggagtatttgaacgactccctgttgagacccgagagggagaagaatttccccaacaacgggatagaaagcttggttgacaaaatgaaccgctggaagacgtacgcgcacgatcacagggacgatccccgggcgctgggggatagccggggcatcgctacccgtaaacgccagtggcacgacaggcagcggggcctggtgtgggccgatgatgattccgccgacgacagcagcgtgttggacttgggtgggagtggtggtaacccgttcgctcacctgcgcccccgcgtcgggcgcctgatgtaagaaaccgaaaataaatactcaccaaggccatggcgaccagcgtgcgttcgtttcttctctgttatagctagtatgatgaggcgaaccgtgctaggcggagcggtggtgtatccggagggtcctcctccttcgtacgagagcgtgatgcagcaggcggcggcggcggcgatgcagccaccactggaggctccctttgtaccccctcggtacctggcacctacggaggggagaaacagcattcgttactcggagctggcaccattgtatgataccacccggttgtatttggtggacaacaagtccgcggacatcgcctcactgaactatcagaacgaccacagcaacttcctcaccacggtggtgcaaaacaatgactttacccccacggaggccagcacccagaccatcaactttgacgagcggtcgcgatggggcggtcagctgaagactatcatgcacaccaacatgcccaacgtgaacgagtacatgtttagcaacaagttcaaagctcgggtgatggtgtctagaaaggctcctgaaggtgtcacagtagatgacaattatgatcacaagcaggatattttggaatatgagtggtttgagtttactctaccggaagggaacttctcagccacaatgaccattgacctaatgaacaatgccatcattgataattaccttgaagtgggcagacagaatggagtgttggagagtgacattggtgttaaatttgacaccaggaactttagactgggttgggatccggaaactaagttgattatgcctggggtttacacctatgaggcattccatcctgacattgtattgttgcctggttgcggagttgactttactgaaagtcgccttagtaacttgcttggtatcaggaaaagacacccattccaggagggttttaagatcttgtatgaggatcttgaagggggtaatatcccggccctgttggatgtagaagcctataagaacagtaagaaagaacgagaagccaaaacagaagccgctaaagctgctgctattgctaaagccaacatagttgtcagcgaccctgtaagggtggctaatgccgaagaagtcagaggagacaactatacagcttcatctgttgcaactgaagaatcgctattggctgctgtggccgaaactacagagaccaaactcactattaaacctgtagaaaaagacagcaagagtagaagttacaatgtcttggaagataaagtgaatacagcctaccgcagctggtacctgtcctacaactatggtgaccctgaaaaaggagtccgttcctggacactgctcaccacctcggatgtcacctgtggagcagagcaggtgtactggtcgctcccagacatgatgcaggaccctgtcacattccgttccacgagacaagtcagcaactatccagtggtaggtgcagagctcatgccggtcttctcaaagagtttctacaacgagcaagccgtgtactcccagcagcttcgccagtccacctcgctcacgcacgtcttcaaccgcttccctgagaaccagatcctcatccgcccgccagcgcccaccattaccaccgtcagtgaaaacgttcctgctctcacagatcacgggaccctgccgttgcgcagcagtatccggggagtccagcgcgtgaccgttactgacgccagacgccgcacctgcccctacgtctacaaggccctgggcatagtcgcgccgcgcgtcctttcaagccgcactttctaaaaaaaaatgtccattcttatctcacctagtaataacaccggttggggcctgcgcgcgccaagcaagatgtacggaggtgctcgcaaacgctctacacagcaccctgtgcgcgtgcgcgggcacttccgcgctccatggggcgccctcaagggtcgtacccgcactagaaccaccgtcgatgatgtgatcgaccaggtggtggccgatgctcgtaattatactcctactgcacctacatctactgtggatgcagttattgacagcgtagtggctgacgcccgcgcctatgctcgccggaagagcaggcggagacgcatcgccaggcgccaccgggctactcccgctatgcgagcggcaagagctctgctgaggagggccaaacgcgtggggcgaagagctatgcttagagcggccagacgcgcggcttcaggtgccagtgccggcaggtcccgcaggcgcgcagccacggcggcagcagcggccattgccaacatggcccaaccgcgaagaggcaatgtgtactgggtgcgcgacgccaccaccggccagcgcgtgcccgtgcgcacccgcccccctcgctcttagaagatactgagcagtctccgatgttgtgtcccagcgaggatgtccaagcgcaaatacaaggaagagatgctccaggtcatcgcgcctgaaatctacggtccgccggtgaaggatgaaaaaaagccccgcaaaatcaagcgggtcaaaaaggacaaaaaggaagaagatggcaatgatggtctggcggagtttgtacgcgagttcgccccaaggcggcgagtgcagtggcgtggacgcaaagtgcagcctgtgctgagacctggaaccacggtggtctttacgcccggcgagcgctccagcactgcttttaagcggtcctatgatgaggtgtatggggatgatgatattctggagcaggcggccgaccgcctgggcgagtttgcttatggcaagcgctcccgctcgagccccaaggaggaggcggtgtccattcccttggacaatgggaatcccacccctagtctcaagccagtcaccctgcagcaagtgctgcccgtgcctccacgcagaggcaacaagcgagagggtgaggatctgtatcccactatgcaattgatggtgcccaagcgccagcggctggaggacgtgctggagaaaatgaaagtggatcccgatatacaacctgaggtcaaagtgagacccatcaagcaggtggcgccaggtttgggagtacaaaccgtagacatcaagattcccaccgagtcaatggaagtccaaaccgaacctgcaaagcccacaaccacctccattgaggtgcaaacggatccctggatgaccgcacccgttacaactccagctgctgtcaacaccactcgaagatcccggcgaaagtacggtccagcaagtttgctgatgccaaattatgctctgcacccatccattattccaactccgggttaccgaggcactcgctactaccgcagcaggagcagcacttcccgccgtcgccgcaaaacacctgcaagtcgtagtcatcgtcgtcgccgccgccccaccagcaatctgactcccgctgctctggtgcggagagtgtatcgcgatggccgcgcggatcccctgacgttaccgcgcgtacgctaccatccaagcatcacaacttaacaactgttgccgctgcctccttgcagatatggccctcacttgccgccttcgtgtccccattactggctaccgaggaagaaactcgcgccgtagaagagggatgttggggcgcggaatgcgacgccacaggcggcggcgcgctatcagcaagaggctggggggtggctttctgcctgctctgatccccatcatagccgcggcgatcggggcgataccaggcatagcttccgtggcggttcaggcctcgcagcgccactgacattggaaaaacttataaataaaacagaatggactctgatgctcctggtcctgtgactatgtttttgtagagatggaagacatcaatttttcatccctggctccgcgacacggcacgaggccgtacatgggcacctggagcgacatcggcaccagccaactgaacgggggcgccttcaattggagcagtatctggagcgggcttaaaaattttggctctaccataaaaacctatgggaacaaagcttggaacagcagcacagggcaggcattgaaaaataagcttaaagagcaaaacttccaacagaaggtggttgatggaatcgcctctggtatcaatggggtggtggatctggccaaccaggccgtgcagaaacagataaacagccgccttgacccgccgccgtcagcccctggtgaaatggaagtggaggaagatctccctccccttgaaaagcggggcgacaagcgtccgcgccccgatctggaggagacactagtcacacgctcagacgacccgccctcctacgaggaggcagtgaagcttggaatgcccaccaccagacctgtagcccccatggctaccggggtaatgaaaccttctcagtcacaccgacccgctaccttggacttgcctccccctgctgttgcagcgcctgctcgcaagcctgtcgctaccccgaagcccaccaccgtacagcccgtcgccgtagccagaccgcgtcctgggggcactccacgtccgaatgcaaactggcagagtactctgaacagcatcgtgggtctgggcgtgcaaagtgtaaagcgccgtcgctgcttttaaattaaatatggagtagcgcttaacttgcctgtctgtgtgtatgtgtcatcatcacgccgccgccgcagcaacagcagaggagcaaggaagaggtcgcgcgccgaggctgagttgatttcaagatggccaccccatcgatgctgccccagtgggcatacatgcacatcgccggacaggatgcttcggagtacctgagtccgggtctggtgcagttcgcccgcgccacagacacctacttcaatctggggaacaagtttaggaaccccaccgtggcgcccacccatgatgtgaccaccgaccgcagtcagcggctgatgctgcgctttgtgcccgttgaccgggaagacaatacctacgcatacaaagttcgatacaccttggctgtgggcgacaacagagtgctggatatggccagcactttctttgacattcggggtgtgttggatagaggtcctagcttcaagccatattctggcactgcttacaactcattggcccctaagggcgctcccaatacatctcagtggcttaataagggagatgaagaggatggggaagacgaccaacaagctacatacacttttggcaatgcgccagtaaaagccgaagctgaaattacaaaagaaggactgccaataggtttggaagttccatctgaaggtggccctaaacccatttatgctgataaactgtatcagccagaacctcaggtgggagaggaatcttggactgatacggatggcacagatgaaaaatatggaggcagagcacttaaacctgaaactaaaatgaaaccctgctacgggtctttcgctaaacctactaatgttaaaggcgggcaggcaaaagtgaagaaagaagaagaaggcaaggttgaatatgacattgacatgaactttttcgacctaagatcacaaatgactggcctcaagcctaaaattgtaatgtatgcagaaaatgtggatctagaaactcctgacactcatgtggtgtacaaacctggagcttcagatgctagctctcatgcaaaccttggtcaacagtccatgcccaatagacctaactatattggcttcagggacaacttcatcggactcatgtactacaacagtactggcaacatgggagtgctggctggacaagcgtctcagctaaatgcagtggttgacttgcaagacagaaacacagaattgtcatatcaactcttgcttgattctctgggggacagaaccagatatttcagtatgtggaatcaagcagtggatagctatgacccagatgtgcgtgttattgagaaccatggtgtggaagatgaacttcctaactattgttttccattggatggtgtaggtccgcgaatagacagttacaagggaattgagacaaatggtgatgaaaccactacttggaaagatttagagccaaagggcataagtgaaattgctaagggaaatccgtttgccatggaaattaacctccaagctaatctctggagaagttttctttattccaatgtggctctgtatctcccagactcctacaaatacaccccagccaatgtcactcttccaactaacaccaacacttatgactacatgaatgggcgggtggttcccccatccctggtggatacctacgtaaacattggcgccagatggtctttggatgccatggacaatgtcaacccctttaaccatcaccgcaacgctggcctgcgataccggtccatgcttttgggcaatggtcgttacgtgcctttccacattcaagtgcctcagaaattctttgctgtgaagaacctgctgcttctacccggttcttacacctacgagtggaacttcagaaaggatgtgaacatggtcctgcagagttcccttggtaatgatctccgggtcgatggtgccagcataagttttaccagcatcaatctctatgccaccttcttccccatggcccacaacactgcctccacccttgaagccatgctgcgcaatgacaccaatgatcaatcattcaatgactacctttctgctgccaacatgctctaccccatcccggccaacgctaccaacgttcccatctccattccctctcgcaactgggccgccttcagaggctggtccttcaccagactcaaaaccaaggagactccctctttgggatcagggttcgatccctactttgtttactctggttctataccctacctggatggtaccttctaccttaaccacactttcaagaaagtctccatcatgtttgactcttcagtgagctggcctggtaatgacagattgctaagtccaaatgagttcgaaatcaagcgcacagttgatggggaaggctacaatgtggcccaatgtaacatgaccaaagactggttcctggtccagatgcttgccaactacaacattggataccagggcttctacgttcctgagggttacaaggatcgcatgtactccttcttcagaaacttccagcccatgagtagacaggtggttgatgagattaactacaaagactataaagctgtcgccgtaccctaccagcataataactctggctttgtgggttacatggctcctaccatgcgtcagggtcaagcgtaccctgctaactacccataccccctaattggaaccactgcagtaaccagtgtcacccagaaaaaattcctgtgcgacaggaccatgtggcgcatcccattctctagcaacttcatgtccatgggtgcccttacagacctgggacagaacttgctgtatgccaactcggcccatgcgctggacatgacttttgaggtggatcccatggatgagcccaccctgctttatcttcttttcgaagtcttcgacgtggtcagagtgcaccagccacaccgcggcgtcatcgaggccgtctacctgcgcacaccgttctcggccggcaacgccaccacataagaagcctcttgcttcttgcaagcagcagctgcagccatgtcatgcgggtccggaaacggctccagcgagcaagagctcaaagccatcgtccgagacctgggctgcggaccctatttcctgggaacctttgacaagcgtttcccggggttcatggcccccgacaagctcgcctgcgccatagtcaacactgccggacgcgagacggggggagagcactggctggcttttggttggaacccgcgctccaacacctgctacctttttgatccttttgggttctcggatgagcgactcaaacagatttaccagtttgagtacgaggggctcctgcgccgcagtgcccttgctaccaaagaccgctgcatcaccctggaaaagtccacccagagcgtgcagggcccgcgctcagccgcctgtggacttttttgctgtatgttccttcatgcctttgtgcactggcccgaccgccccatgaacggaaaccccaccatgaagttgctgactggggtgtcaaacagcatgctccaatcaccccaagtccagcccaccctgcgccgcaaccaggaggcgctatatcgcttcctaaacacccactcatcttactttcgttctcaccgcgcacgcattgaaagggccaccgcgtttgaccgtatggatatgcaataagtcatgtaaaaccgtgttcaataaaaagcattttatttttacatgcactaaggctctggttttttgctcattcgttttcatcattcactcagaaatcaaatgggttctggcgggagtcagagtgacccgtgggcagggagacgttgcggaactgtaacctgttctgccacttgaactcggggatcaccagcttgggaactggaatttcgggaaaggtgtcttgccacaactttctggtcagttgcagggcgccaagcaggtcaggagcagagatcttgaaatcacagttggggccggcattctggacacgggagttgcggtacactgggttgcaacactggaacaccatcaaggctgggtgtctcacgcttgccagcacggtcgggtcactgatggtagtcacatccaagtcttcagcattggccattccaaagggggtcatcttacaggtctgcctgcccatcacgggagcgcagcctggcttgtggttgcaatcgcaatgaatggggatcagcatcatcctggcttggtcgggggttatccctgggtacacggccttcatgaaggcttcgtactgcttgaaagcttcctgagccttacttccctcggtgtaaaacatcccacaggacttgctggaaaattggttagtagcacagttggcatcattcacacagcagcgggcatcgttgttggccaactggaccacatttctgccccagcggttctgggtgatcttggctctgtctgggttctccttcatagcgcgctgcccgttttcgctcgccacatccatctcgataatgtggtccttctggatcatgatagtgccatgcaggcatttcaccttgccttcgtaatcggtgcatccatgagcccacagagcgcacccggtgcactcccaattattgtgggcgatctcagaataagaatgcaccaatccctgcatgaatcttcccatcatcgctgtcagggtcttcatgctactaaatgtcagcgggatgccacggtgctcctcgttcacatactggtggcagatacgcttgtactgctcgtgctgctctggcatcagcttgaaagaggttctcaggtcattatccagcctatacctctccattagcacagccatcacttccatgcccttctcccaggcagataccaggggcaagctcaaaggattcctaacagcaatagaagtagctcctttagctatagggtcattcttgtcgatcttctcaacacttctcttgccatccttctcaatgatgcgcaccggggggtagctgaagcccacggccaccaactgagcctgttctctttcttcttcgctgtcctggctgatgtcttgcagagggacatgcttggtcttcctgggcttcttcttgggagggatcgggggaggactgttgctccgttccggagacagggatgaccgcgaagtttcgcttaccagtaccacctggctctcgatagaagaatcggaccccacgcgacggtaggtgttcctcttcgggggcagaggtggaggcgactgagatgggctgcggtccggccttggaggcggatggctggcagagcccattccgcgttcgggggtgtgctcccgttggcggtcgcttgactgatttcctccgcggctggccattgtgttctcctaggcagagaaacaacagacatggaaactcagccatcactgccaacatcgctgcaagcgccatcacacctcgcccccagcagcgacgaggaggagagcttaaccaccccaccacccagtcccgctaccaccacctctaccctcgatgatgaggaggaggtcgacgcagcccaggagatgcaggcgcaggataatgtgaaagcggaagagattgaggcagatgtcgagcaggacccgggctatgtgacaccggcggagcacgaggaggagctgaaacgttttctagacagagaggatgacgaccgcccagagcatcaccaggaggctggcctcggggatcatgttgccgactacctctccgggcttgggagggaggacgtgctcctcaaacatctagcaaggcagtcgatcatagttaaagacgcactactcaacctcaccgaagtgcctatcagtgtggaagagcttagccgcgcctacgagctgaacctcttttcgcctcagataccccccaagcggcagcgaaacggcacctgcgaggccaaccctcgactcaacttctatccagcttttactgtccccgaagtgctggccacctaccacatcttttttaagaaccaaaagattccagtctcctgccgcgccaaccgcacccgcgcagatgcccttctcaacttgggtccgggagctcgcttacctgatatagcttccttggaagaggttccaaagatctttgagggtctgggaagtgatgagactcgggccgcaaatgctctgcaacagggagagaatggtatggatgaacatcacagcgctctagtggaactggagggtgacaatgcccggcttgcagtgctcaagcgcagtatcgtggtcacccattttgcctaccccgctgttaacctgccgcccaaagtcatgagcgctgtcatggaccatctgctcatcaaacgagcaagtccactttcagaaaaccagaacatgcaggatccagacgcctcggaggagggcaagccggtagtcagtgacgagcagctatctcgctggctgggtaccaactccccccgagatttggaagaaagacgcaagcttatgatggctgtagtgctagtaactgttgagttggagtgtctgcgccgcttttttaccgaccccgagaccctgcgcaagctagaggagaacctgcactacaccttcagacatggcttcgtgcgccaggcatgcaagatctccaacgtggagctcaccaacctggtttcatacatgggcattttgcatgagaaccggctagggcagagcgttctgcacaccaccctgaagggggaggcccgccgcgactacatccgagactgtgtctacctctacctctgccatacctggcagactggtatgggtgtgtggcaacagtgtttggaagagcagaaccttaaagagctggacaagctcttgcagagatccctcaaagccctgtggacaggttttgacgagcgcaccgtcgcctcggacctggcggacatcatcttccccgagcgtcttagggttactctgcgaaacggcctgccagacttcatgagccagagcatgcttaacaactttcgctctttcatcctggaacgctccggtatcctgcctgccacctgctgtgcgctgccctccgactttgtgcctctcacctaccgcgagtgcccaccgccgctatggagccactgctacctattccgcctggccaactacctctcctaccactcggatgtgatagaggatgtgagcggagacggcctgctggaatgccactgccgatgcaatttatgcacaccccaccgctccctcgcctgcaacccccagttgctaagcgagacccagatcatcggcaccttcgagttgcagggtcccaacagtgaaggcgaggggtcttctccggggcagagtctgaaactgacaccggggctgtggacctccgcctacctgcgcaagtttcatcccgaggactatcatccctatgagatcaggttctatgaggaccagtcacatcctcccaaagtcgagctctcagcctgcgtcatcacccagggggcaattctggcccaattgcaagccatccaaaaatcccgccaagaatttctgctgaaaaagggaagcggggtctaccttgacccccagaccggtgaggagctcaacacaaggttcccccaggatgtcccatcgccgaggaagcaagaagctgaaggtgcagctgtcacccccagaggatatggaggaagactgggacagtcaggcagaggaggagatggaagattgggacagccaggcagaggaggtggacagcctggaggaagacagtttggaggaggaagacgaggaggcagaggaggtggaagaagcaaccgccgccaaacagttgtcatcggcggcggagacaagcaagtccccagacagcagcacggctaccatctccgctccgggtcggggggcccagcggcggcccaacagtagatgggacgagaccgggcgatttccaaacccgaccaccgcttccaagaccggtaagaaggagcgacagggatacaagtcctggcgtggacataaaaacgctatcatctcctgcttgcatgaatgcgggggcaacatatccttcacccggcgatacctgcttttccaccacggtgtgaacttcccccgcaatatcttgcattactaccgtcacctccacagcccctactgcagtcagcaagtcccggcaaccccgacagaaaaagacagcagcgacaacggtgaccagaaaagcagcagttagaaaatccacaacaagtgcagcaggaggaggactgaggatcacagcgaacgagccagcgcagaccagagagctgaggaaccggatctttccaaccctctatgccatcttccagcagagtcgggggcaagagcaggaattgaaagtaaaaaaccgatctctgcgctcgctcaccagaagttgtttgtatcacaagagcgaagaccaacttcagcgcactctcgaggacgccgaggctctcttcaacaagtactgcgcgctgactcttaaagagtagcccttgcccgcgctcattcgaaaacggcgggaatcacgtcacccttggcagctgtcctttgccctcgtcatgagtaaagagattcccacgccttacatgtggagctatcagccccaaatggggttggcagcaggtgcttcccaggactactccacccgcatgaattggcttagcgccgggccctcaatgatatcacgggttaatgatatacgagcttatcgaaaccagttactcctagaacagtcagctcttaccaccacaccccgccaacaccttaatccccgaaattggcccgccgccctggtgtaccaggaaaatcccgctcccaccaccgtactacttcctcgagacgcccaggccgaagttcagatgactaacgcaggtgtacagctggcgggcggttccgccctatgtcgtcaccggcctcaacagagtataaaacgcctggtgatcagaggccgaggtatccagctcaacgacgagtcggttagctcttcgcttggtctgcgaccagacggagtcttccagatcgccggctgtgggagatcttccttcactcctcgtcaggctgtgctgactttggagagttcgtcctcgcagccccgctcgggcggcatcggaactctccagtttgtggaggagtttactccctctgtctacttcaaccccttctccggctctcctggccagtacccggacgagttcataccgaacttcgacgcaatcagcgagtcagtggatggctatgattgatgtctaatggtggcgcggctgagctagctcgactgcgacacctagaccactgccgccgctttcgctgtttcgcccgggaactcaccgagttcatctacttcgaactctccgaggagcaccctcagggtccggcccacggagtgcggattaccatcgaagggggaatagactctcgcctgcatcgcatcttctcccagcggcccgtgctgattgagcgcgaccagggaaatacaaccatctccatctactgcatctgtaaccaccccggattgcatgaaagcctttgctgtcttgtttgtgctgagtttaataaaaactgagttaagaccttcctacggactaccgcttcttcaatcaggactttacaacaccaaccagatcttccagaagacccagacccttcctcctctgatccaggactctaactctaccttaccagcaccctccactactaaccttcccgaaactaacaagcttggatctcatctgcaacaccgcctttcacgaagccttctttctgccaatactaccactcccaaaaccggaggtgagctccgcggtcttcctactgacgacccctgggtggtagcgggttttgtaacgttaggattagttgcgggtgggcttgtgctaatcctttgctacctatacacaccttgctgtgcatatttagtcatattgtgctgttggtttaagaaatgggggccatactagtcgtgcttgctttactttcgcttttgggtctgggctctgctaatctcaatcctcttgatcacaatccatgtctagacttcgacccagaaaattgcacacttacttttgcacccgacacaagccgtctctgtggagttcttattaagtgcggatgggactgcaggtccgttgaaattacacataataacaaaacatggaacaataccttatccaccacatgggagccaggagttcccgagtggtatactgtctctgtccgaggtcctgacggttccattcgcattagtaacaacactttcattttttctgaaatgtgcgatctggccatgtttatgagcaaacagtatgacctatggcctcctagcaaagagaacattgtggcattttccattgcttattgcttggtaacatgcatcatcactgctatcatttgtgtgtgcatacacttgcttatagttattcgccctagacaaagcaatgaggaaaaagagaaaatgccttaacctttttcctcataccttttctttacagcatggcttctgttacagctctaattattgccagcattgtcactgtcgctcacgggcaaacaattgtccatattaccttaggacataatcacactcttgtagggcccccaattacttcagaggttatttggaccaaacttggaagtgttgattattttgatataatttgcaacaaaactgaaccaatatttgtaatctgtaacagacaaaatctcacgttaattaatgttagcaaaatttataacggttactattatggttatgatagatccagtagccaatataaaaattacttagttcgcataactcagcccaaatcaacagtgccaactatgacaataattaaaatggctaataaagcattagaaaattttacattaccaacaacgcccaatgaaaaaaacattccaaattcaatgattgcaattattgcggcggtggcattgggaatggcactaataataatatgcatgttcctatatgcttgttgctataaaaagtttcaacataaacaggatccactactaaattttaacatttaattttttatacagatgatttccactacaatttttatcattactagccttgcagctgtaacttatggccgttcacacctaactgtacctgttggctcaacatgtacactacaaggaccccaagaaggctatgtcacttggtggagaatatatgataatggagggttcgctagaccatgtgatcagcctggtacaaaattttcatgcaacggaagagacttgaccattattaacataacattaaatgagcaaggcttctattatggaaccaactataaaaatagtttagattacaacattattgtagtgccagccaccacttctgctccccgcaaatccactttctctagcagcagtgccaaagcaagcacaattcctaaaacagcttctgctatgttaaagcttcgaaaaatcgctttaagtaattccacagcagctcccaatacaattcctaaatcaacaattggcatcattactgccgtggtagtgggattaatgattatatttttgtgcataatgtactacgcctgctgctatagaaaacatgaacaaaaaggtgatgcattactaaattttgatatttaattttttatagaattatgatattgtttcaatccaatgccactaacactatcaatgtgcagactactttaaaacatgacatggaaaaccacactacctcctatgcatacacaaatattcagcctaaatacgctatgcaactagaaatcaccatactaattgtaattggaattcttatactatctgttattctttattttatattctgccgtcaaatacccaatgttcatagaaattctaaaagacgtcccatctattctcctatgattagtcgtccccatatggctctgaatgaaatctaagatctttttttttcttttacagtatggtgaacatcaatcatgattcctagaaatttcttcttcaccatactcatctgtgctttcaatgtctgtgctactttcacagcagtagccactgcaagcccagactgtataggaccatttgcttcctatgcactttttgcctttgttacttgcatctgcgtgtgtagcatagtctgcctggttattaattttttccaactggtagactggatctttgtgcgaattgcctacctacgtcaccatcccgaataccgcaatcaaaatgttgcggcacttcttaggcttatttaaaaccatgcaggctatgctaccagttattttaattctgctactaccctgcattgccctaccttccaccgccactcgcgctacacctgaacaacttagaaaatgcaaatttcaacaaccatggtcatttcttgattgctaccatgaaaaatctgattttcccacatactggatagtgattgttggaataattaacatactttcatgtacctttttctcaatcacaatataccccacatttaattttgggtggaattctcccaatgcactgggttacccacaagagctagatgaacatatcccactacaacacatacaacaaccactagcattggtagagtatgaaaatgagccacaaccttcactgcctcctgctattagttacttcaacctaaccggcggagatgactgaaatactcaccacctccaattccgccgaggatctgcttgatatggacggccgcgcctcagaacagcgactcgcccaactacgcatccgccagcagcaggaacgcgtgaccaaagagctcagagatgtcatccaaattcaccaatgcaaaaaaggcatattttgtttggtaaaacaagccaagatatcctacgagatcaccgctactgaccatcgcctctcttacgaacttggcccccaacgacaaaaatttacatgcatggtgggaatcaaccctatagttatcacccagcaaagtggagatactaagggttgcattcactgctcttgcgattccaccgagtgcacctacaccctgctgaagaccctatgcggcctaagagacctgctacccatgaattaaaaattaataaaaaattacttacttgaaatcagcaataaggtctctgttgaaattttttcccagcagcacctcgcttccctcttcccaactctggtattctaaaccccgttcagcggcatactttctccatactttaaaggggatgtcaaattttagctcctctcctgtacccacgatcttcatgtctttcttcccagatgaccaagagagtccggctcagtgattccttcaaccctgtctacccctatgaagacgaaagcacctcccaacacccctttataaacccagggtttatttccccaaatggctttacacaaagcccagacggagttcttactttaaattgtttaaccccactaacaaccacaggcgggcctttacagttaaaagtgggagggggacttatagtggatgacactgatgggaccttacaagaaaacatacgtgttacagcacccattactaaaaataatcattctgtagaactatccattggaaatggattagaaacacaaaacaataaactatgtgccaaattgggaaatgggttaaaatttaacaacggtgacatttgtataaaggatagtattaacaccttatggactggaataaagcctccacctaactgtcaaatagtggaaaacactgatacaaacgatggcaaacttactttagtattagtaaaaaacggaggacttgttaatggctacgtatctctagttggtgtatcagacactgtgaaccaaatgttcacacaaaagtcagcaaccatacaattaagattatatttcgactcttctggaaatctattaactgatgaatcaaacttaaaaattccacttaaaaataaatcttctacagcaaccagtgaagctgcaaccagcagcaaagcctttatgccaagtactacagcttatccctttaacaccactactagggatagtgaaaactatattcatggaatatgttactatatgactagttatgatagaagtctagttcccttaaacatttctataatgctaaacagccgtacgatttcttccaatgttgcctatgccatacaatttgaatggaatctaaatgcaaaagaatctccagaaagcaacatagctacgctgaccacatccccctttttcttttcttatattagagaagacgacaactaaaaaataaagtttaagtgtttttatttaaaaatcacaaaattcgagtagttattttgcctcccccttcccatttaacagaatacaccaatctctccccacgcacagctttaaacatttggataccattagagatagacatagttttagtttccacattccaaacagtttcagagcgagccaatctggggtcagtgatacataaaaatgcatcgggatagtcttttaaagcgctttcacagtccaactgctgcggatgcgactccggagtctggatcacagtcatctggaagaagaacgatgggaatcataatccgaaaacggaatcgggcgattgtgtctcatcaaacccacaagcagccgctgtctgcgtcgctccgtgcgactgctgtttatgggatcggggtctgcagtgtcctgaagcatgattttaatagcccttaacattaactttctggtgcgatgcgcgcagcaacgcattctgatttcactgagattactacagtatgtacagcacattatcacaatattgtttaataaaccataattaaaagcgctccagccaaaactcatatctgatacaatcgcccctgcatgaccatcataccaaattttaatataaattaaatgtcgttccctcaaaaacacactacccacatacatgatctcttttggcatgtgcatattaacaatctgtctgtaccatggacaacgttggttaatcatgcaacccaatataaccttccggaaccacactgccaacaccgctcccccagccatgcattgaagtgaaccctgctgattacaatgacaatgaagaacccaattctctcgaccatgaatcacttgagactgaaaaatatctatagtagcacaacaaagacataaatgcatgcatcttctcataatttttaactcatctggatttaaaaacatatcccaaggaatgggaaactcttgcaaaacagtaaagctggcagaacaaggaagaccacgaacacaacttacactatgcatagtcatagtatcacaatctggcaacagcgggtggtcttcagtcatagaagctcgggtttcattttcctcacatcgtggtaactgggctctggtgtaagggtgatgtctggcgcatgatgtcgagcgtgcgcgcaaccttgtcataatggagttgtttcctgacattctcgtattttgtatagcaaaacgcggccctggcacaacacactcttcttcgtcttctatcctgccgcttagtgtgttccgtctgataattcaagtacagccacactcttaagttggtcaaaagaatgctggcttcagttgtaatcaaaactccatcatatttaattgttctaaggaaatcatccacggtagcatatgcaaatcccaaccaagcaatgcaactggattgcgtttcaagcagcagaggagagggaagagacggaagaatcatgttaatttttattccaaacgatctcgcagtacttcaaattgtagatcgcgcagatggcatctatcgcccccactgtgttggtgaaaaagcacagctaaatcaaaagaaatgcgattttcaaggtgctcaacggtggcttccaacaaagcctccacgcgcacatccaaaaacaaaagaataccaaaagaaggagcattttctaactcctcaaacatcatattacattcctgcaccattcccagataattttcagctttccagccttgaattattcgtgtcagttcttgtggtaaatccaaaccacacattacaaacaggtcccggagggcgccctccaccaccattcttaaacacaccctcataatgacaaaatatcttgctcctgtgtcacctgtagcaaattaagaatggcatcatcaattgacatgcccttggctctaagttcttctctaagttctagttgtaaatactctctcatattatcaccaaactgcttagccaaaagccccccgggaacaatagcaggggacgctacagtgcagtacaagcgcagacctccccaattggctccagcaaaaacaagattagaataagcatactgggaaccaccagtaatatcatcaaagttgctggaaatataatcaggcagaatttcttgtaaaaattgaataaaagaaaaattttccaaagaaacattcaaaatctctgggatgcaaatgcaataggttaccgcgctgcgctccaacattgttagttttgaattagtctgcaaaataaaagaaacaagcgtcatatcatagtagcctgtcgaacaggtggataaatcagtctttccatcacaagacaagccacagggtctccagctcgaccctcgtaaaacctgtcatcgtgattaaacaacagcaccgaaagttcctcgcggtggccagcatgaataattcttgatgaagcatataatccagacatgttagcatcagttaaagagaaaaaacagccaacatagcctctgggtataattatgcttaatcttaagtatagcaaagccacccctcgcggatacaaagtaaaaggcacaggagaataaaaaatataattatttctctgctgctgttcaggcaacgtcgcccccggtccatctaaatacacatacaaagcctcatcagccatggcttaccagacaaagtacagcgggcgcacaaagcacaagctctaaagaagctctaaagacactcttcaacctctccacaatatatacacaagccctaaactgacgtaatgggagtaaagtgtaaaaaatcccgccaagcccaacacacaccccgaaactgcgtcagcagggaaaagtacagtttcacttccgcattcccaacaagcgtaagttcctctttctcatggtacgtcacatccgattaacttgcaacgtcattttcccacggtcgcaccgccccttttagccgttcaccccgcagccaatcaccacacagcgcgcacttttttaaattacctcatttacatattggcaccattccatctataaggtatattatattgattg

SEQ ID NO: 219 - protein, 1468 aa, unidentified
  REGION 1..1468: note = ET3
MQLELSTCVFLCLLPLGFSAIRRYYLGAVELSWDYRQSELLRELHVDTRFPATAPGALPLGPSVLYKKTVFVEFTDQLFSVARPRPPWMGLLGPTIQAEVYDTVVVTLKNMASHPVSLHAVGVSFWKSSEGAEYEDHTSQREKEDDKVLPGKSQTYVWQVLKENGPTASDPPCLTYSYLSHVDLVKDLNSGLIGALLVCREGSLTRERTQNLHEFVLLFAVFDEGKSWHSARNDSWTRAMDPAPARAQPAMHTVNGYVNRSLPGLIGCHKKSVYWHVIGMGTSPEVHSIFLEGHTFLVRHHRQASLEISPLTFLTAQTFLMDLGQFLLFCHISSHHHGGMEAHVRVESCAEEPQLRRKADEEEDYDDNLYDSDMDVVRLDGDDVSPFIQIRSVAKKHPKTWVHYIAAEEEDWDYAPLVLAPDDRSYKSQYLNNGPQRIGRKYKKVRFMAYTDETFKTREAIQHESGILGPLLYGEVGDTLLIIFKNQASRPYNIYPHGITDVRPLYSRRLPKGVKHLKDFPILPGEIFKYKWTVTVEDGPTKSDPRCLTRYYSSFVNMERDLASGLIGPLLICYKESVDQRGNQIMSDKRNVILFSVFDENRSWYLTENIQRFLPNPAGVQLEDPEFQASNIMHSINGYVFDSLQLSVCLHEVAYWYILSIGAQTDFLSVFFSGYTFKHKMVYEDTLTLFPFSGETVFMSMENPGLWILGCHNSDFRNRGMTALLKVSSCDKNTGDYYEDSYEDISAYLLSKNNAIEPRSFAQNSRPPSASAPKPPVLRRHQRDISLPTFQPEEDKMDYDDIFSTETKGEDFDIYGEDENQDPRSFQKRTRHYFIAAVEQLWDYGMSESPRALRNRAQNGEVPRFKKVVFREFADGSFTQPSYRGELNKHLGLLGPYIRAEVEDNIMVTFKNQASRPYSFYSSLISYPDDQEQGAEPRHNFVQPNETRTYFWKVQHHMAPTEDEFDCKAWAYFSDVDLEKDVHSGLIGPLLICRANTLNAAHGRQVTVQEFALFFTIFDETKSWYFTENVERNCRAPCHLQMEDPTLKENYRFHAINGYVMDTLPGLVMAQNQRIRWYLLSMGSNENIHSIHFSGHVFSVRKKEEYKMAVYNLYPGVFETVEMLPSKVGIWRIECLIGEHLQAGMSTTFLVYSKKCQTPLGMASGHIRDFQITASGQYGQWAPKLARLHYSGSINAWSTKEPFSWIKVDLLAPMIIHGIKTQGARQKFSSLYISQFIIMYSLDGKKWQTYRGNSTGTLMVFFGNVDSSGIKHNIFNPPIIARYIRLHPTHYSIRSTLRMELMGCDLNSCSMPLGMESKAISDAQITASSYFTNMFATWSPSKARLHLQGRSNAWRPQVNNPKEWLQVDFQKTMKVTGVTTQGVKSLLTSMYVKEFLISSSQDGHQWTLFFQNGKVKVFQGNQDSFTPVVNSLDPPLLTRYLRIHPQSWVHQIALRMEVLGCEAQDLYV

SEQ ID NO: 220 - protein, 147 aa, unidentified
  REGION 1..147: note = Beta-globin
MVHLTPEEKSAVTALWGKVNVDEVGGEALGRLLVVYPWTQRFFESFGDLSTPDAVMGNPKVKAHGKKVLGAFSDGLAHLDNLKGTFATLSELHCDKLHVDPENFRLLGNVLVCVLAHHFGKEFTPPVQAAYQKVVAGVANALAHKYH

SEQ ID NO: 221 - protein, 147 aa, unidentified
  REGION 1..147: note = Gamma-globin
MGHFTEEDKATITSLWGKVNVEDAGGETLGRLLVVYPWTQRFFDSFGNLSSASAIMGNPKVKAHGKKVLTSLGDATKHLDDLKGTFAQLSELHCDKLHVDPENFKLLGNVLVTVLAIHFGKEFTPEVQASWQKMVTAVASALSSRYH

SEQ ID NO: 222 - DNA, 20 bp, synthetic construct
  misc_feature 1..20: note = Synthetic: Spacer
  source 1..20: mol_type = other DNA
tgtggcacgggatgaggatg

SEQ ID NO: 223 - DNA, 20 bp, synthetic construct
  misc_feature 1..20: note = Synthetic: Spacer
  source 1..20: mol_type = other DNA
ctgtggcacgggatgaggat

SEQ ID NO: 224 - DNA, 20 bp, synthetic construct
  misc_feature 1..20: note = Synthetic: Spacer
  source 1..20: mol_type = other DNA
tctgtggcacgggatgagga

SEQ ID NO: 225 - DNA, 20 bp, synthetic construct
  misc_feature 1..20: note = Synthetic: Spacer
  source 1..20: mol_type = other DNA
tggctgcccccctgtcttcc

SEQ ID NO: 226 - DNA, 20 bp, synthetic construct
  misc_feature 1..20: note = Synthetic: Spacer
  source 1..20: mol_type = other DNA
ccactctgtggcacgggatg

SEQ ID NO: 227 - DNA, 20 bp, synthetic construct
  misc_feature 1..20: note = Synthetic: Spacer
  source 1..20: mol_type = other DNA
tgcagaccactctgtggcac

SEQ ID NO: 228 - DNA, 20 bp, synthetic construct
  misc_feature 1..20: note = Synthetic: Spacer
  source 1..20: mol_type = other DNA
ctgcagaccactctgtggca

SEQ ID NO: 229 - DNA, 20 bp, synthetic construct
  misc_feature 1..20: note = Synthetic: Spacer
  source 1..20: mol_type = other DNA
cgctgctgcagaccactctg

SEQ ID NO: 230 - DNA, 20 bp, synthetic construct
  misc_feature 1..20: note = Synthetic: Spacer
  source 1..20: mol_type = other DNA
tccagatccctgactgacag

SEQ ID NO: 231 - DNA, 20 bp, synthetic construct
  misc_feature 1..20: note = Synthetic: Spacer
  source 1..20: mol_type = other DNA
tcctccggagtagttgccca

SEQ ID NO: 232 - DNA, 20 bp, synthetic construct
  misc_feature 1..20: note = Synthetic: Spacer
  source 1..20: mol_type = other DNA
ttccttcacggccagtcctc

SEQ ID NO: 233 - DNA, 20 bp, synthetic construct
  misc_feature 1..20: note = Synthetic: Spacer
  source 1..20: mol_type = other DNA
ggccagaagccattccttca

SEQ ID NO: 234 - DNA, 20 bp, synthetic construct
  misc_feature 1..20: note = Synthetic: Spacer
  source 1..20: mol_type = other DNA
actcctgtcagtcagggcct

SEQ ID NO: 235 - DNA, 20 bp, synthetic construct
  misc_feature 1..20: note = Synthetic: Spacer
  source 1..20: mol_type = other DNA
cacaggactcctgtcagtca

SEQ ID NO: 236 - DNA, 20 bp, synthetic construct
  misc_feature 1..20: note = Synthetic: Spacer
  source 1..20: mol_type = other DNA
gcacaggactcctgtcagtc

SEQ ID NO: 237 - DNA, 20 bp, synthetic construct
  misc_feature 1..20: note = Synthetic: Spacer
  source 1..20: mol_type = other DNA
ccccaaccggtggccttcat

SEQ ID NO: 238 - DNA, 20 bp, synthetic construct
  misc_feature 1..20: note = Synthetic: Spacer
  source 1..20: mol_type = other DNA
tccccaaccggtggccttca

SEQ ID NO: 239 - DNA, 20 bp, synthetic construct
  misc_feature 1..20: note = Synthetic: Spacer
  source 1..20: mol_type = other DNA
ggcccctgcttggtgggcac

SEQ ID NO: 240 - DNA, 20 bp, synthetic construct
  misc_feature 1..20: note = Synthetic: Spacer
  source 1..20: mol_type = other DNA
ggcacaggcccctgcttggt

SEQ ID NO: 241 - DNA, 20 bp, synthetic construct
  misc_feature 1..20: note = Synthetic: Spacer
  source 1..20: mol_type = other DNA
agcctggcttccccaaccgg

SEQ ID NO: 242 - DNA, 20 bp, synthetic construct
  misc_feature 1..20: note = Synthetic: Spacer
  source 1..20: mol_type = other DNA
tggcacaggcccctgcttgg

SEQ ID NO: 243 - DNA, 20 bp, synthetic construct
  misc_feature 1..20: note = Synthetic: Spacer
  source 1..20: mol_type = other DNA
ccaagcctggcttccccaac

SEQ ID NO: 244 - DNA, 20 bp, synthetic construct
  misc_feature 1..20: note = Synthetic: Spacer
  source 1..20: mol_type = other DNA
ccctggcacaggcccctgct

SEQ ID NO: 245 - DNA, 20 bp, synthetic construct
  misc_feature 1..20: note = Synthetic: Spacer
  source 1..20: mol_type = other DNA
caacagcctgcccctggcac

SEQ ID NO: 246 - DNA, 20 bp, synthetic construct
  misc_feature 1..20: note = Synthetic: Spacer
  source 1..20: mol_type = other DNA
cctgagctccctcccaagcc

SEQ ID NO: 247 - DNA, 20 bp, synthetic construct
  misc_feature 1..20: note = Synthetic: Spacer
  source 1..20: mol_type = other DNA
ccatgccaacagcctgcccc

SEQ ID NO: 248 - DNA, 10 bp, synthetic construct
  misc_feature 1..10: note = Synthetic: RT Template
  source 1..10: mol_type = other DNA
aggtcaaaat

SEQ ID NO: 249 - DNA, 11 bp, synthetic construct
  misc_feature 1..11: note = Synthetic: RT Template
  source 1..11: mol_type = other DNA
caggtcaaaat

SEQ ID NO: 250 - DNA, 12 bp, synthetic construct
  misc_feature 1..12: note = Synthetic: RT Template
  source 1..12: mol_type = other DNA
ccaggtcaaaat

SEQ ID NO: 251 - DNA, 13 bp, synthetic construct
  misc_feature 1..13: note = Synthetic: RT Template
  source 1..13: mol_type = other DNA
tccaggtcaaaat

SEQ ID NO: 252 - DNA, 14 bp, synthetic construct
  misc_feature 1..14: note = Synthetic: RT Template
  source 1..14: mol_type = other DNA
ttccaggtcaaaat

SEQ ID NO: 253 - DNA, 15 bp, synthetic construct
  misc_feature 1..15: note = Synthetic: RT Template
  source 1..15: mol_type = other DNA
cttccaggtcaaaat

SEQ ID NO: 254 - DNA, 16 bp, synthetic construct
  misc_feature 1..16: note = Synthetic: RT Template
  source 1..16: mol_type = other DNA
tcttccaggtcaaaat

SEQ ID NO: 255-256 - skipped (2 entries)

SEQ ID NO: 257 - DNA, 10 bp, synthetic construct
  misc_feature 1..10: note = Synthetic: PBS Sequence
  source 1..10: mol_type = other DNA
cctcatcccg

SEQ ID NO: 258 - DNA, 11 bp, synthetic construct
  misc_feature 1..11: note = Synthetic: PBS Sequence
  source 1..11: mol_type = other DNA
cctcatcccgt

SEQ ID NO: 259 - DNA, 12 bp, synthetic construct
  misc_feature 1..12: note = Synthetic: PBS Sequence
  source 1..12: mol_type = other DNA
cctcatcccgtg

SEQ ID NO: 260 - DNA, 13 bp, synthetic construct
  misc_feature 1..13: note = Synthetic: PBS Sequence
  source 1..13: mol_type = other DNA
cctcatcccgtgc

SEQ ID NO: 261 - DNA, 14 bp, synthetic construct
  misc_feature 1..14: note = Synthetic: PBS Sequence
  source 1..14: mol_type = other DNA
cctcatcccgtgcc

SEQ ID NO: 262 - DNA, 15 bp, synthetic construct
  misc_feature 1..15: note = Synthetic: PBS Sequence
  source 1..15: mol_type = other DNA
cctcatcccgtgcca

SEQ ID NO: 263 - DNA, 16 bp, synthetic construct
  misc_feature 1..16: note = Synthetic: PBS Sequence
  source 1..16: mol_type = other DNA
cctcatcccgtgccac

SEQ ID NO: 264 - DNA, 17 bp, synthetic construct
  misc_feature 1..17: note = Synthetic: PBS Sequence
  source 1..17: mol_type = other DNA
cctcatcccgtgccaca

SEQ ID NO: 265 - DNA, 20 bp, synthetic construct
  misc_feature 1..20: note = Synthetic: Secondary Nicking sgRNA Sequence
  source 1..20: mol_type = other DNA
actcctgtcagtcagggcct

SEQ ID NO: 266 - DNA, 20 bp, synthetic construct
  misc_feature 1..20: note = Synthetic: Secondary Nicking sgRNA Sequence
  source 1..20: mol_type = other DNA
cacaggactcctgtcagtca

SEQ ID NO: 267 - DNA, 20 bp, synthetic construct
  misc_feature 1..20: note = Synthetic: Secondary Nicking sgRNA Sequence
  source 1..20: mol_type = other DNA
gcacaggactcctgtcagtc

SEQ ID NO: 268 - DNA, 20 bp, synthetic construct
  misc_feature 1..20: note = Synthetic: Secondary Nicking sgRNA Sequence
  source 1..20: mol_type = other DNA
ggcccctgcttggtgggcac

SEQ ID NO: 269 - DNA, 20 bp, synthetic construct
  misc_feature 1..20: note = Synthetic: Secondary Nicking sgRNA Sequence
  source 1..20: mol_type = other DNA
ggcacaggcccctgcttggt

SEQ ID NO: 270 - DNA, 20 bp, synthetic construct
  misc_feature 1..20: note = Synthetic: Secondary Nicking sgRNA Sequence
  source 1..20: mol_type = other DNA
tggcacaggcccctgcttgg

SEQ ID NO: 271 - DNA, 20 bp, synthetic construct
  misc_feature 1..20: note = Synthetic: Secondary Nicking sgRNA Sequence
  source 1..20: mol_type = other DNA
ccctggcacaggcccctgct

SEQ ID NO: 272 - DNA, 20 bp, synthetic construct
  misc_feature 1..20: note = Synthetic: Secondary Nicking sgRNA Sequence
  source 1..20: mol_type = other DNA
caacagcctgcccctggcac

SEQ ID NO: 273 - DNA, 20 bp, synthetic construct
  misc_feature 1..20: note = Synthetic: Secondary Nicking sgRNA Sequence
  source 1..20: mol_type = other DNA
ccatgccaacagcctgcccc

SEQ ID NO: 274 - DNA, 20 bp, synthetic construct
  misc_feature 1..20: note = Synthetic: Secondary Nicking sgRNA Sequence
  source 1..20: mol_type = other DNA
ggtctgcagcagcggagccg

SEQ ID NO: 275 - DNA, 20 bp, synthetic construct
  misc_feature 1..20: note = Synthetic: Secondary Nicking sgRNA Sequence
  source 1..20: mol_type = other DNA
gtctgcagcagcggagccgt

SEQ ID NO: 276 - DNA, 20 bp, synthetic construct
  misc_feature 1..20: note = Synthetic: Secondary Nicking sgRNA Sequence
  source 1..20: mol_type = other DNA
ggagccgtgggcaactactc

SEQ ID NO: 277 - DNA, 20 bp, synthetic construct
  misc_feature 1..20: note = Synthetic: Secondary Nicking sgRNA Sequence
  source 1..20: mol_type = other DNA
gccgtgggcaactactccgg

SEQ ID NO: 278 - DNA, 20 bp, synthetic construct
  misc_feature 1..20: note = Synthetic: Secondary Nicking sgRNA Sequence
  source 1..20: mol_type = other DNA
gggcaactactccggaggac

SEQ ID NO: 279 - DNA, 20 bp, synthetic construct
  misc_feature 1..20: note = Synthetic: Secondary Nicking sgRNA Sequence
  source 1..20: mol_type = other DNA
ctccggaggactggccgtga

SEQ ID NO: 280 - DNA, 20 bp, synthetic construct
  misc_feature 1..20: note = Synthetic: Secondary Nicking sgRNA Sequence
  source 1..20: mol_type = other DNA
gaggactggccgtgaaggaa

SEQ ID NO: 281 - DNA, 20 bp, synthetic construct
  misc_feature 1..20: note = Synthetic: Secondary Nicking sgRNA Sequence
  source 1..20: mol_type = other DNA
ggccgtgaaggaatggcttc

SEQ ID NO: 282 - DNA, 20 bp, synthetic construct
  misc_feature 1..20: note = Synthetic: Secondary Nicking sgRNA Sequence
  source 1..20: mol_type = other DNA
gaatggcttctggcccatga

SEQ ID NO: 283 - DNA, 20 bp, synthetic construct
  misc_feature 1..20: note = Synthetic: Secondary Nicking sgRNA Sequence
  source 1..20: mol_type = other DNA
ttctggcccatgaaggccac

SEQ ID NO: 284 - DNA, 20 bp, synthetic construct
  misc_feature 1..20: note = Synthetic: Secondary Nicking sgRNA Sequence
  source 1..20: mol_type = other DNA
ggcccatgaaggccaccggt

SEQ ID NO: 285 - DNA, 20 bp, synthetic construct
  misc_feature 1..20: note = Synthetic: Secondary Nicking sgRNA Sequence
  source 1..20: mol_type = other DNA
gcccatgaaggccaccggtt

SEQ ID NO: 286 - DNA, 20 bp, synthetic construct
  misc_feature 1..20: note = Synthetic: Secondary Nicking sgRNA Sequence
  source 1..20: mol_type = other DNA
cccatgaaggccaccggttg

SEQ ID NO: 287 - DNA, 20 bp, synthetic construct
  misc_feature 1..20: note = Synthetic: Secondary Nicking sgRNA Sequence
  source 1..20: mol_type = other DNA
ggccaccggttggggaagcc

SEQ ID NO: 288 - DNA, 20 bp, synthetic construct
  misc_feature 1..20: note = Synthetic: Secondary Nicking sgRNA Sequence
  source 1..20: mol_type = other DNA
ccggttggggaagccaggct

SEQ ID NO: 289 - DNA, 20 bp, synthetic construct
  misc_feature 1..20: note = Synthetic: Secondary Nicking sgRNA Sequence
  source 1..20: mol_type = other DNA
cggttggggaagccaggctt

SEQ ID NO: 290 - DNA, 20 bp, synthetic construct
  misc_feature 1..20: note = Synthetic: Secondary Nicking sgRNA Sequence
  source 1..20: mol_type = other DNA
ttggggaagccaggcttggg

SEQ ID NO: 291 - DNA, 20 bp, synthetic construct
  misc_feature 1..20: note = Synthetic: Secondary Nicking sgRNA Sequence
  source 1..20: mol_type = other DNA
tggggaagccaggcttggga

SEQ ID NO: 292 - DNA, 20 bp, synthetic construct
  misc_feature 1..20: note = Synthetic: Secondary Nicking sgRNA Sequence
  source 1..20: mol_type = other DNA
ccaggcttgggagggagctc

SEQ ID NO: 293 - DNA, 20 bp, synthetic construct
  misc_feature 1..20: note = Synthetic: Secondary Nicking sgRNA Sequence
  source 1..20: mol_type = other DNA
cttgggagggagctcaggtc

SEQ ID NO: 294 - DNA, 20 bp, synthetic construct
  misc_feature 1..20: note = Synthetic: Secondary Nicking sgRNA Sequence
  source 1..20: mol_type = other DNA
ggagggagctcaggtctggc

SEQ ID NO: 295 - DNA, 20 bp, synthetic construct
  misc_feature 1..20: note = Synthetic: Secondary Nicking sgRNA Sequence
  source 1..20: mol_type = other DNA
gagggagctcaggtctggca

SEQ ID NO: 296 - DNA, 20 bp, synthetic construct
  misc_feature 1..20: note = Synthetic: Secondary Nicking sgRNA Sequence
  source 1..20: mol_type = other DNA
agggagctcaggtctggcag

SEQ ID NO: 297 - DNA, 20 bp, synthetic construct
  misc_feature 1..20: note = Synthetic: Secondary Nicking sgRNA Sequence
  source 1..20: mol_type = other DNA
gctcaggtctggcaggggcc

SEQ ID NO: 298 - DNA, 20 bp, synthetic construct
  misc_feature 1..20: note = Synthetic: Spacer
  source 1..20: mol_type = other DNA
tgtggcacgggatgaggatg

SEQ ID NO: 299 - DNA, 20 bp, synthetic construct
  misc_feature 1..20: note = Synthetic: Spacer
  source 1..20: mol_type = other DNA
ctgtggcacgggatgaggat

SEQ ID NO: 300 - DNA, 20 bp, synthetic construct
  misc_feature 1..20: note = Synthetic: Spacer
  source 1..20: mol_type = other DNA
tctgtggcacgggatgagga

SEQ ID NO: 301 - DNA, 20 bp, synthetic construct
  misc_feature 1..20: note = Synthetic: Spacer
  source 1..20: mol_type = other DNA
tggctgcccccctgtcttcc

SEQ ID NO: 302 - DNA, 20 bp, synthetic construct
  misc_feature 1..20: note = Synthetic: Spacer
  source 1..20: mol_type = other DNA
ccactctgtggcacgggatg

SEQ ID NO: 303 - DNA, 20 bp, synthetic construct
  misc_feature 1..20: note = Synthetic: Spacer
  source 1..20: mol_type = other DNA
tgcagaccactctgtggcac

SEQ ID NO: 304 - DNA, 20 bp, synthetic construct
  misc_feature 1..20: note = Synthetic: Spacer
  source 1..20: mol_type = other DNA
ctgcagaccactctgtggca

SEQ ID NO: 305 - DNA, 20 bp, synthetic construct
  misc_feature 1..20: note = Synthetic: Spacer
  source 1..20: mol_type = other DNA
cgctgctgcagaccactctg

SEQ ID NO: 306 - DNA, 20 bp, synthetic construct
  misc_feature 1..20: note = Synthetic: Spacer
  source 1..20: mol_type = other DNA
tccagatccctgactgacag

SEQ ID NO: 307 - DNA, 20 bp, synthetic construct
  misc_feature 1..20: note = Synthetic: Spacer
  source 1..20: mol_type = other DNA
tcctccggagtagttgccca

SEQ ID NO: 308 - DNA, 20 bp, synthetic construct
  misc_feature 1..20: note = Synthetic: Spacer
  source 1..20: mol_type = other DNA
ttccttcacggccagtcctc

SEQ ID NO: 309 - DNA, 20 bp, synthetic construct
  misc_feature 1..20: note = Synthetic: Spacer
  source 1..20: mol_type = other DNA
ggccagaagccattccttca

SEQ ID NO: 310 - DNA, 20 bp, synthetic construct
  misc_feature 1..20: note = Synthetic: Spacer
  source 1..20: mol_type = other DNA
actcctgtcagtcagggcct

SEQ ID NO: 311 - DNA, 20 bp, synthetic construct
  misc_feature 1..20: note = Synthetic: Spacer
  source 1..20: mol_type = other DNA
cacaggactcctgtcagtca

SEQ ID NO: 312 - DNA, 20 bp, synthetic construct
  misc_feature 1..20: note = Synthetic: Spacer
  source 1..20: mol_type = other DNA
gcacaggactcctgtcagtc

SEQ ID NO: 313 - DNA, 20 bp, synthetic construct
  misc_feature 1..20: note = Synthetic: Spacer
  source 1..20: mol_type = other DNA
ccccaaccggtggccttcat

SEQ ID NO: 314 - DNA, 20 bp, synthetic construct
  misc_feature 1..20: note = Synthetic: Spacer
  source 1..20: mol_type = other DNA
tccccaaccggtggccttca

SEQ ID NO: 315 - DNA, 20 bp, synthetic construct
  misc_feature 1..20: note = Synthetic: Spacer
  source 1..20: mol_type = other DNA
ggcccctgcttggtgggcac

SEQ ID NO: 316 - DNA, 20 bp, synthetic construct
  misc_feature 1..20: note = Synthetic: Spacer
  source 1..20: mol_type = other DNA
ggcacaggcccctgcttggt

SEQ ID NO: 317 - DNA, 20 bp, synthetic construct
  misc_feature 1..20: note = Synthetic: Spacer
  source 1..20: mol_type = other DNA
agcctggcttccccaaccgg

SEQ ID NO: 318 - DNA, 20 bp, synthetic construct
  misc_feature 1..20: note = Synthetic: Spacer
  source 1..20: mol_type = other DNA
tggcacaggcccctgcttgg

SEQ ID NO: 319 - DNA, 20 bp, synthetic construct
  misc_feature 1..20: note = Synthetic: Spacer
  source 1..20: mol_type = other DNA
ccaagcctggcttccccaac

SEQ ID NO: 320 - DNA, 20 bp, synthetic construct
  misc_feature 1..20: note = Synthetic: Spacer
  source 1..20: mol_type = other DNA
ccctggcacaggcccctgct

SEQ ID NO: 321 - DNA, 20 bp, synthetic construct
  misc_feature 1..20: note = Synthetic: Spacer
  source 1..20: mol_type = other DNA
caacagcctgcccctggcac

SEQ ID NO: 322 - DNA, 20 bp, synthetic construct
  misc_feature 1..20: note = Synthetic: Spacer
  source 1..20: mol_type = other DNA
cctgagctccctcccaagcc

SEQ ID NO: 323 - DNA, 20 bp, synthetic construct
  misc_feature 1..20: note = Synthetic: Spacer
  source 1..20: mol_type = other DNA
ccatgccaacagcctgcccc

SEQ ID NO: 324 - DNA, 10 bp, synthetic construct
  misc_feature 1..10: note = Synthetic: RT Template
  source 1..10: mol_type = other DNA
aggtcaagat

SEQ ID NO: 325 - DNA, 11 bp, synthetic construct
  misc_feature 1..11: note = Synthetic: RT Template
  source 1..11: mol_type = other DNA
caggtcaagat

SEQ ID NO: 326 - DNA, 12 bp, synthetic construct
  misc_feature 1..12: note = Synthetic: RT Template
  source 1..12: mol_type = other DNA
ccaggtcaagat

SEQ ID NO: 327 - DNA, 13 bp, synthetic construct
  misc_feature 1..13: note = Synthetic: RT Template
  source 1..13: mol_type = other DNA
tccaggtcaagat

SEQ ID NO: 328 - DNA, 14 bp, synthetic construct
  misc_feature 1..14: note = Synthetic: RT Template
  source 1..14: mol_type = other DNA
ttccaggtcaagat

SEQ ID NO: 329 - DNA, 15 bp, synthetic construct
  misc_feature 1..15: note = Synthetic: RT Template
  source 1..15: mol_type = other DNA
cttccaggtcaagat

SEQ ID NO: 330 - DNA, 16 bp, synthetic construct
  misc_feature 1..16: note = Synthetic: RT Template
  source 1..16: mol_type = other DNA
tcttccaggtcaagat

SEQ ID NO: 331-332 - skipped (2 entries)

SEQ ID NO: 333 - DNA, 10 bp, synthetic construct
  misc_feature 1..10: note = Synthetic: PBS Sequence
  source 1..10: mol_type = other DNA
cctcatcccg

SEQ ID NO: 334 - DNA, 11 bp, synthetic construct
  misc_feature 1..11: note = Synthetic: PBS Sequence
  source 1..11: mol_type = other DNA
cctcatcccgt

SEQ ID NO: 335 - DNA, 12 bp, synthetic construct
  misc_feature 1..12: note = Synthetic: PBS Sequence
  source 1..12: mol_type = other DNA
cctcatcccgtg

SEQ ID NO: 336 - DNA, 13 bp, synthetic construct
  misc_feature 1..13: note = Synthetic: PBS Sequence
  source 1..13: mol_type = other DNA
cctcatcccgtgc

SEQ ID NO: 337 - DNA, 14 bp, synthetic construct
  misc_feature 1..14: note = Synthetic: PBS Sequence
  source 1..14: mol_type = other DNA
cctcatcccgtgcc

SEQ ID NO: 338 - DNA, 15 bp, synthetic construct
  misc_feature 1..15: note = Synthetic: PBS Sequence
  source 1..15: mol_type = other DNA
cctcatcccgtgcca

SEQ ID NO: 339 - DNA, 16 bp, synthetic construct
  misc_feature 1..16: note = Synthetic: PBS Sequence
  source 1..16: mol_type = other DNA
cctcatcccgtgccac

SEQ ID NO: 340 - DNA, 17 bp, synthetic construct
  misc_feature 1..17: note = Synthetic: PBS Sequence
  source 1..17: mol_type = other DNA
cctcatcccgtgccaca

SEQ ID NO: 341 - DNA, 20 bp, synthetic construct
  misc_feature 1..20: note = Synthetic: Secondary Nicking sgRNA Sequence
  source 1..20: mol_type = other DNA
actcctgtcagtcagggcct

SEQ ID NO: 342 - DNA, 20 bp, synthetic construct
  misc_feature 1..20: note = Synthetic: Secondary Nicking sgRNA Sequence
  source 1..20: mol_type = other DNA
cacaggactcctgtcagtca

SEQ ID NO: 343 - DNA, 20 bp, synthetic construct
  misc_feature 1..20: note = Synthetic: Secondary Nicking sgRNA Sequence
  source 1..20: mol_type = other DNA
gcacaggactcctgtcagtc

SEQ ID NO: 344 - DNA, 20 bp, synthetic construct
  misc_feature 1..20: note = Synthetic: Secondary Nicking sgRNA Sequence
  source 1..20: mol_type = other DNA
ggcccctgcttggtgggcac

SEQ ID NO: 345 - DNA, 20 bp, synthetic construct
  misc_feature 1..20: note = Synthetic: Secondary Nicking sgRNA Sequence
  source 1..20: mol_type = other DNA
ggcacaggcccctgcttggt

SEQ ID NO: 346 - DNA, 20 bp, synthetic construct
  misc_feature 1..20: note = Synthetic: Secondary Nicking sgRNA Sequence
  source 1..20: mol_type = other DNA
tggcacaggcccctgcttgg

SEQ ID NO: 347 - DNA, 20 bp, synthetic construct
  misc_feature 1..20: note = Synthetic: Secondary Nicking sgRNA Sequence
  source 1..20: mol_type = other DNA
ccctggcacaggcccctgct

SEQ ID NO: 348 - DNA, 20 bp, synthetic construct
  misc_feature 1..20: note = Synthetic: Secondary Nicking sgRNA Sequence
  source 1..20: mol_type = other DNA
caacagcctgcccctggcac

SEQ ID NO: 349 - DNA, 20 bp, synthetic construct
  misc_feature 1..20: note = Synthetic: Secondary Nicking sgRNA Sequence
  source 1..20: mol_type = other DNA
ccatgccaacagcctgcccc

SEQ ID NO: 350 - DNA, 20 bp, synthetic construct
  misc_feature 1..20: note = Synthetic: Secondary Nicking sgRNA Sequence
  source 1..20: mol_type = other DNA
ggtctgcagcagcggagccg

SEQ ID NO: 351 - DNA, 20 bp, synthetic construct
  misc_feature 1..20: note = Synthetic: Secondary Nicking sgRNA Sequence
  source 1..20: mol_type = other DNA
gtctgcagcagcggagccgt

SEQ ID NO: 352 - DNA, 20 bp, synthetic construct
  misc_feature 1..20: note = Synthetic: Secondary Nicking sgRNA Sequence
  source 1..20: mol_type = other DNA
ggagccgtgggcaactactc

SEQ ID NO: 353 - DNA, 20 bp, synthetic construct
  misc_feature 1..20: note = Synthetic: Secondary Nicking sgRNA Sequence
  source 1..20: mol_type = other DNA
gccgtgggcaactactccgg

SEQ ID NO: 354 - DNA, 20 bp, synthetic construct
  misc_feature 1..20: note = Synthetic: Secondary Nicking sgRNA Sequence
  source 1..20: mol_type = other DNA
gggcaactactccggaggac

SEQ ID NO: 355 - DNA, 20 bp, synthetic construct
  misc_feature 1..20: note = Synthetic: Secondary Nicking sgRNA Sequence
  source 1..20: mol_type = other DNA
ctccggaggactggccgtga

SEQ ID NO: 356 - DNA, 20 bp, synthetic construct
  misc_feature 1..20: note = Synthetic: Secondary Nicking sgRNA Sequence
  source 1..20: mol_type = other DNA
gaggactggccgtgaaggaa

SEQ ID NO: 357 - DNA, 20 bp, synthetic construct
  misc_feature 1..20: note = Synthetic: Secondary Nicking sgRNA Sequence
  source 1..20: mol_type = other DNA
ggccgtgaaggaatggcttc

SEQ ID NO: 358 - DNA, 20 bp, synthetic construct
  misc_feature 1..20: note = Synthetic: Secondary Nicking sgRNA Sequence
  source 1..20: mol_type = other DNA
gaatggcttctggcccatga

SEQ ID NO: 359 - DNA, 20 bp, synthetic construct
  misc_feature 1..20: note = Synthetic: Secondary Nicking sgRNA Sequence
  source 1..20: mol_type = other DNA
ttctggcccatgaaggccac

SEQ ID NO: 360 - DNA, 20 bp, synthetic construct
  misc_feature 1..20: note = Synthetic: Secondary Nicking sgRNA Sequence
  source 1..20: mol_type = other DNA
ggcccatgaaggccaccggt

SEQ ID NO: 361 - DNA, 20 bp, synthetic construct
  misc_feature 1..20: note = Synthetic: Secondary Nicking sgRNA Sequence
  source 1..20: mol_type = other DNA
gcccatgaaggccaccggtt

SEQ ID NO: 362 - DNA, 20 bp, synthetic construct
  misc_feature 1..20: note = Synthetic: Secondary Nicking sgRNA Sequence
  source 1..20: mol_type = other DNA
cccatgaaggccaccggttg

SEQ ID NO: 363 - DNA, 20 bp, synthetic construct
  misc_feature 1..20: note = Synthetic: Secondary Nicking sgRNA Sequence
  source 1..20: mol_type = other DNA
ggccaccggttggggaagcc

SEQ ID NO: 364 - DNA, 20 bp, synthetic construct
  misc_feature 1..20: note = Synthetic: Secondary Nicking sgRNA Sequence
  source 1..20: mol_type = other DNA
ccggttggggaagccaggct

SEQ ID NO: 365 - DNA, 20 bp, synthetic construct
  misc_feature 1..20: note = Synthetic: Secondary Nicking sgRNA Sequence
  source 1..20: mol_type = other DNA
cggttggggaagccaggctt

SEQ ID NO: 366 - DNA, 20 bp, synthetic construct
  misc_feature 1..20: note = Synthetic: Secondary Nicking sgRNA Sequence
  source 1..20: mol_type = other DNA
ttggggaagccaggcttggg

SEQ ID NO: 367 - DNA, 20 bp, synthetic construct
  misc_feature 1..20: note = Synthetic: Secondary Nicking sgRNA Sequence
  source 1..20: mol_type = other DNA
tggggaagccaggcttggga

SEQ ID NO: 368 - DNA, 20 bp, synthetic construct
  misc_feature 1..20: note = Synthetic: Secondary Nicking sgRNA Sequence
  source 1..20: mol_type = other DNA
ccaggcttgggagggagctc

SEQ ID NO: 369 - DNA, 20 bp, synthetic construct
  misc_feature 1..20: note = Synthetic: Secondary Nicking sgRNA Sequence
  source 1..20: mol_type = other DNA
cttgggagggagctcaggtc

SEQ ID NO: 370 - DNA, 20 bp, synthetic construct
  misc_feature 1..20: note = Synthetic: Secondary Nicking sgRNA Sequence
  source 1..20: mol_type = other DNA
ggagggagctcaggtctggc

SEQ ID NO: 371 - DNA, 20 bp, synthetic construct
  misc_feature 1..20: note = Synthetic: Secondary Nicking sgRNA Sequence
  source 1..20: mol_type = other DNA
gagggagctcaggtctggca

SEQ ID NO: 372 - DNA, 20 bp, synthetic construct
  misc_feature 1..20: note = Synthetic: Secondary Nicking sgRNA Sequence
  source 1..20: mol_type = other DNA
agggagctcaggtctggcag

SEQ ID NO: 373 - DNA, 20 bp, synthetic construct
  misc_feature 1..20: note = Synthetic: Secondary Nicking sgRNA Sequence
  source 1..20: mol_type = other DNA
gctcaggtctggcaggggcc

SEQ ID NO: 374 - DNA, 20 bp, synthetic construct
  misc_feature 1..20: note = Synthetic: Spacer
  source 1..20: mol_type = other DNA
gtctgcagcagcggagccgt

SEQ ID NO: 375 - DNA, 20 bp, synthetic construct
  misc_feature 1..20: note = Synthetic: Spacer
  source 1..20: mol_type = other DNA
ggtctgcagcagcggagccg

SEQ ID NO: 376 - DNA, 20 bp, synthetic construct
  misc_feature 1..20: note = Synthetic: Spacer
  source 1..20: mol_type = other DNA
ttccttcacggccagtcctc

SEQ ID NO: 377 - DNA, 20 bp, synthetic construct
  misc_feature 1..20: note = Synthetic: Spacer
  source 1..20: mol_type = other DNA
cacagagtggtctgcagcag

SEQ ID NO: 378 - DNA, 20 bp, synthetic construct
  misc_feature 1..20: note = Synthetic: Spacer
  source 1..20: mol_type = other DNA
ggccagaagccattccttca

SEQ ID NO: 379 - DNA, 20 bp, synthetic construct
  misc_feature 1..20: note = Synthetic: Spacer
  source 1..20: mol_type = other DNA
cctcatcccgtgccacagag

SEQ ID NO: 380 - DNA, 20 bp, synthetic construct
  misc_feature 1..20: note = Synthetic: Spacer
  source 1..20: mol_type = other DNA
ccccaaccggtggccttcat

SEQ ID NO: 381 - DNA, 20 bp, synthetic construct
  misc_feature 1..20: note = Synthetic: Spacer
  source 1..20: mol_type = other DNA
tccccaaccggtggccttca

SEQ ID NO: 382 - DNA, 20 bp, synthetic construct
  misc_feature 1..20: note = Synthetic: Spacer
  source 1..20: mol_type = other DNA
agcctggcttccccaaccgg

SEQ ID NO: 383 - DNA, 20 bp, synthetic construct
  misc_feature 1..20: note = Synthetic: Spacer
  source 1..20: mol_type = other DNA
tggctgcccccctgtcttcc

SEQ ID NO: 384 - DNA, 20 bp, synthetic construct
  misc_feature 1..20: note = Synthetic: Spacer
  source 1..20: mol_type = other DNA
ccaagcctggcttccccaac

SEQ ID NO: 385 - DNA, 20 bp, synthetic construct
  misc_feature 1..20: note = Synthetic: Spacer
  source 1..20: mol_type = other DNA
cctgagctccctcccaagcc

SEQ ID NO: 386 - DNA, 20 bp, synthetic construct
  misc_feature 1..20: note = Synthetic: Spacer
  source 1..20: mol_type = other DNA
tccagatccctgactgacag

SEQ ID NO: 387 - DNA, 20 bp, synthetic construct
  misc_feature 1..20: note = Synthetic: Spacer
  source 1..20: mol_type = other DNA
agctcccgctcccttgagcc

SEQ ID NO: 388 - DNA, 20 bp, synthetic construct
  misc_feature 1..20: note = Synthetic: Spacer
  source 1..20: mol_type = other DNA
actcctgtcagtcagggcct

SEQ ID NO: 389 - DNA, 20 bp, synthetic construct
  misc_feature 1..20: note = Synthetic: Spacer
  source 1..20: mol_type = other DNA
cacaggactcctgtcagtca

SEQ ID NO: 390 - DNA, 20 bp, synthetic construct
  misc_feature 1..20: note = Synthetic: Spacer
  source 1..20: mol_type = other DNA
gccagcaggcggggagcccg

SEQ ID NO: 391 - DNA, 20 bp, synthetic construct
  misc_feature 1..20: note = Synthetic: Spacer
  source 1..20: mol_type = other DNA
gcacaggactcctgtcagtc

SEQ ID NO: 392 - DNA, 20 bp, synthetic construct
  misc_feature 1..20: note = Synthetic: Spacer
  source 1..20: mol_type = other DNA
tcagtttcggccagcaggcg

SEQ ID NO: 393 - DNA, 20 bp, synthetic construct
  misc_feature 1..20: note = Synthetic: Spacer
  source 1..20: mol_type = other DNA
ctcagtttcggccagcaggc

SEQ ID NO: 394 - DNA, 20 bp, synthetic construct
  misc_feature 1..20: note = Synthetic: Spacer
  source 1..20: mol_type = other DNA
actcagtttcggccagcagg

SEQ ID NO: 395 - DNA, 20 bp, synthetic construct
  misc_feature 1..20: note = Synthetic: Spacer
  source 1..20: mol_type = other DNA
catactcagtttcggccagc

SEQ ID NO: 396 - DNA, 20 bp, synthetic construct
  misc_feature 1..20: note = Synthetic: Spacer
  source 1..20: mol_type = other DNA
ggcccctgcttggtgggcac

SEQ ID NO: 397 - DNA, 10 bp, synthetic construct
  misc_feature 1..10: note = Synthetic: RT Template
  source 1..10: mol_type = other DNA
gttcgccacg

SEQ ID NO: 398 - DNA, 11 bp, synthetic construct
  misc_feature 1..11: note = Synthetic: RT Template
  source 1..11: mol_type = other DNA
agttcgccacg

SEQ ID NO: 399 - DNA, 12 bp, synthetic construct
  misc_feature 1..12: note = Synthetic: RT Template
  source 1..12: mol_type = other DNA
tagttcgccacg

SEQ ID NO: 400 - DNA, 13 bp, synthetic construct
  misc_feature 1..13: note = Synthetic: RT Template
  source 1..13: mol_type = other DNA
gtagttcgccacg

SEQ ID NO: 401 - DNA, 14 bp, synthetic construct
  misc_feature 1..14: note = Synthetic: RT Template
  source 1..14: mol_type = other DNA
agtagttcgccacg

SEQ ID NO: 402 - DNA, 15 bp, synthetic construct
  misc_feature 1..15: note = Synthetic: RT Template
  source 1..15: mol_type = other DNA
gagtagttcgccacg

SEQ ID NO: 403 - DNA, 16 bp, synthetic construct
  misc_feature 1..16: note = Synthetic: RT Template
  source 1..16: mol_type = other DNA
ggagtagttcgccacg

SEQ ID NO: 404 - DNA, 17 bp, synthetic construct
  misc_feature 1..17: note = Synthetic: RT Template
  source 1..17: mol_type = other DNA
cggagtagttcgccacg

SEQ ID NO: 405-406 - skipped (2 entries)

SEQ ID NO: 407 - DNA, 10 bp, synthetic construct
  misc_feature 1..10: note = Synthetic: PBS Sequence
  source 1..10: mol_type = other DNA
gctccgctgc

SEQ ID NO: 408 - DNA, 11 bp, synthetic construct
  misc_feature 1..11: note = Synthetic: PBS Sequence
  source 1..11: mol_type = other DNA
gctccgctgct

SEQ ID NO: 409 - DNA, 12 bp, synthetic construct
  misc_feature 1..12: note = Synthetic: PBS Sequence
  source 1..12: mol_type = other DNA
gctccgctgctg

SEQ ID NO: 410 - DNA, 13 bp, synthetic construct
  misc_feature 1..13: note = Synthetic: PBS Sequence
  source 1..13: mol_type = other DNA
gctccgctgctgc

SEQ ID NO: 411 - DNA, 14 bp, synthetic construct
  misc_feature 1..14: note = Synthetic: PBS Sequence
  source 1..14: mol_type = other DNA
gctccgctgctgca

SEQ ID NO: 412 - DNA, 15 bp, synthetic construct
  misc_feature 1..15: note = Synthetic: PBS Sequence
  source 1..15: mol_type = other DNA
gctccgctgctgcag

SEQ ID NO: 413 - DNA, 16 bp, synthetic construct
  misc_feature 1..16: note = Synthetic: PBS Sequence
  source 1..16: mol_type = other DNA
gctccgctgctgcaga

SEQ ID NO: 414 - DNA, 17 bp, synthetic construct
  misc_feature 1..17: note = Synthetic: PBS Sequence
  source 1..17: mol_type = other DNA
gctccgctgctgcagac

SEQ ID NO: 415 - DNA, 20 bp, synthetic construct
  misc_feature 1..20: note = Synthetic: Secondary Nicking sgRNA Sequence
  source 1..20: mol_type = other DNA
tcctccggagtagttcgcca

SEQ ID NO: 416 - DNA, 20 bp, synthetic construct
  misc_feature 1..20: note = Synthetic: Secondary Nicking sgRNA Sequence
  source 1..20: mol_type = other DNA
ccccaaccggtggccttcat

SEQ ID NO: 417 - DNA, 20 bp, synthetic construct
  misc_feature 1..20: note = Synthetic: Secondary Nicking sgRNA Sequence
  source 1..20: mol_type = other DNA
tccccaaccggtggccttca

SEQ ID NO: 418 - DNA, 20 bp, synthetic construct
  misc_feature 1..20: note = Synthetic: Secondary Nicking sgRNA Sequence
  source 1..20: mol_type = other DNA
agcctggcttccccaaccgg

SEQ ID NO: 419 - DNA, 20 bp, synthetic construct
  misc_feature 1..20: note = Synthetic: Secondary Nicking sgRNA Sequence
  source 1..20: mol_type = other DNA
ccaagcctggcttccccaac

SEQ ID NO: 420 - DNA, 20 bp, synthetic construct
  misc_feature 1..20: note = Synthetic: Secondary Nicking sgRNA Sequence
  source 1..20: mol_type = other DNA
cctgagctccctcccaagcc

SEQ ID NO: 421 - DNA, 20 bp, synthetic construct
  misc_feature 1..20: note = Synthetic: Secondary Nicking sgRNA Sequence
  source 1..20: mol_type = other DNA
agctcccgctcccttgagcc

SEQ ID NO: 422 - DNA, 20 bp, synthetic construct
  misc_feature 1..20: note = Synthetic: Secondary Nicking sgRNA Sequence
  source 1..20: mol_type = other DNA
gccagcaggcggggagcccg

SEQ ID NO: 423 - DNA, 20 bp, synthetic construct
  misc_feature 1..20: note = Synthetic: Secondary Nicking sgRNA Sequence
  source 1..20: mol_type = other DNA
acgggatgaggatggggacc

SEQ ID NO: 424 - DNA, 20 bp, synthetic construct
  misc_feature 1..20: note = Synthetic: Secondary Nicking sgRNA Sequence
  source 1..20: mol_type = other DNA
tcagtttcggccagcaggcg

SEQ ID NO: 425 - DNA, 20 bp, synthetic construct
  misc_feature 1..20: note = Synthetic: Secondary Nicking sgRNA Sequence
  source 1..20: mol_type = other DNA
ctcagtttcggccagcaggc

SEQ ID NO: 426 - DNA, 20 bp, synthetic construct
  misc_feature 1..20: note = Synthetic: Secondary Nicking sgRNA Sequence
  source 1..20: mol_type = other DNA
actcagtttcggccagcagg

SEQ ID NO: 427 - DNA, 20 bp, synthetic construct
  misc_feature 1..20: note = Synthetic: Secondary Nicking sgRNA Sequence
  source 1..20: mol_type = other DNA
aggatggggacctggaagac

SEQ ID NO: 428 - DNA, 20 bp, synthetic construct
  misc_feature 1..20: note = Synthetic: Secondary Nicking sgRNA Sequence
  source 1..20: mol_type = other DNA
ggatggggacctggaagaca

SEQ ID NO: 429 - DNA, 20 bp, synthetic construct
  misc_feature 1..20: note = Synthetic: Secondary Nicking sgRNA Sequence
  source 1..20: mol_type = other DNA
gatggggacctggaagacag

SEQ ID NO: 430 - DNA, 20 bp, synthetic construct
  misc_feature 1..20: note = Synthetic: Secondary Nicking sgRNA Sequence
  source 1..20: mol_type = other DNA
atggggacctggaagacagg

SEQ ID NO: 431 - DNA, 20 bp, synthetic construct
  misc_feature 1..20: note = Synthetic: Secondary Nicking sgRNA Sequence
  source 1..20: mol_type = other DNA
tggggacctggaagacaggg

SEQ ID NO: 432 - DNA, 20 bp, synthetic construct
  misc_feature 1..20: note = Synthetic: Secondary Nicking sgRNA Sequence
  source 1..20: mol_type = other DNA
gggggcagccactgtcagtc

SEQ ID NO: 433 - DNA, 20 bp, synthetic construct
  misc_feature 1..20: note = Synthetic: Secondary Nicking sgRNA Sequence
  source 1..20: mol_type = other DNA
ggggcagccactgtcagtca

SEQ ID NO: 434 - DNA, 20 bp, synthetic construct
  misc_feature 1..20: note = Synthetic: Secondary Nicking sgRNA Sequence
  source 1..20: mol_type = other DNA
gccactgtcagtcagggatc

SEQ ID NO: 435 - DNA, 20 bp, synthetic construct
  misc_feature 1..20: note = Synthetic: Secondary Nicking sgRNA Sequence
  source 1..20: mol_type = other DNA
agtcagggatctggacaacg

SEQ ID NO: 436 - DNA, 20 bp, synthetic construct
  misc_feature 1..20: note = Synthetic: Secondary Nicking sgRNA Sequence
  source 1..20: mol_type = other DNA
gatctggacaacgaggtctt

SEQ ID NO: 437 - DNA, 20 bp, synthetic construct
  misc_feature 1..20: note = Synthetic: Secondary Nicking sgRNA Sequence
  source 1..20: mol_type = other DNA
atctggacaacgaggtcttt

SEQ ID NO: 438 - DNA, 20 bp, synthetic construct
  misc_feature 1..20: note = Synthetic: Secondary Nicking sgRNA Sequence
  source 1..20: mol_type = other DNA
tctggacaacgaggtctttg

SEQ ID NO: 439 - DNA, 20 bp, synthetic construct
  misc_feature 1..20: note = Synthetic: Secondary Nicking sgRNA Sequence
  source 1..20: mol_type = other DNA
caacgaggtctttggggtca

SEQ ID NO: 440 - DNA, 20 bp, synthetic construct
  misc_feature 1..20: note = Synthetic: Secondary Nicking sgRNA Sequence
  source 1..20: mol_type = other DNA
ggtctttggggtcaaggcca

SEQ ID NO: 441 - DNA, 20 bp, synthetic construct
  misc_feature 1..20: note = Synthetic: Secondary Nicking sgRNA Sequence
  source 1..20: mol_type = other DNA
aggccaaggccctgactgac

SEQ ID NO: 442 - DNA, 20 bp, synthetic construct
  misc_feature 1..20: note = Synthetic: Secondary Nicking sgRNA Sequence
  source 1..20: mol_type = other DNA
gagtcctgtgcccaccaagc

SEQ ID NO: 443 - DNA, 20 bp, synthetic construct
  misc_feature 1..20: note = Synthetic: Secondary Nicking sgRNA Sequence
  source 1..20: mol_type = other DNA
agtcctgtgcccaccaagca

SEQ ID NO: 444 - DNA, 20 bp, synthetic construct
  misc_feature 1..20: note = Synthetic: Secondary Nicking sgRNA Sequence
  source 1..20: mol_type = other DNA
gtcctgtgcccaccaagcag

SEQ ID NO: 445 - DNA, 23 bp, synthetic construct
  source 1..23: mol_type = other DNA
cctcttgggggccccttccccac

SEQ ID NO: 446 - DNA, 26 bp, synthetic construct
  source 1..26: mol_type = other DNA
cactatctcaatgcaaatatctgtct

SEQ ID NO: 447 - DNA, 23 bp, synthetic construct
  source 1..23: mol_type = other DNA
cttgaccaatagccttgacaagg

SEQ ID NO: 448 - DNA, 576 bp, Homo sapiens
  misc_feature 1..576: note = GenBank Accession No. NM_000517
  source 1..576: mol_type = genomic DNA
actcttctggtccccacagactcagagagaacccaccatggtgctgtctcctgccgacaagaccaacgtcaaggccgcctggggtaaggtcggcgcgcacgctggcgagtatggtgcggaggccctggagaggatgttcctgtccttccccaccaccaagacctacttcccgcacttcgacctgagccacggctctgcccaggttaagggccacggcaagaaggtggccgacgcgctgaccaacgccgtggcgcacgtggacgacatgcccaacgcgctgtccgccctgagcgacctgcacgcgcacaagcttcgggtggacccggtcaacttcaagctcctaagccactgcctgctggtgaccctggccgcccacctccccgccgagttcacccctgcggtgcacgcctccctggacaagttcctggcttctgtgagcaccgtgctgacctccaaataccgttaagctggagcctcggtagccgttcctcctgcccgctgggcctcccaacgggccctcctcccctccttgcaccggcccttcctggtctttgaataaagtctgagtgggcagca

SEQ ID NO: 449 - DNA, 73326 bp, Homo sapiens
  misc_feature 1..73326: note = GenBank Accession No. J00179
  variation 18415: note = n is a, c, g, or t
  variation 18835: note = n is a, c, g, or t
  variation 19063: note = n is a, c, g, or t
  source 1..73326: mol_type = genomic DNA
gaattctaatctccctctcaaccctacagtcacccatttggtatattaaagatgtgttgtctactgtctagtatccctcaagtagtgtcaggaattagtcatttaaatagtctgcaagccaggagtggtggctcatgtctgtaattccagcactggagaggtagaagtgggaggactgcttgagctcaagagtttgatattatcctggacaacatagcaagacctcgtctctacttaaaaaaaaaaaaattagccaggcatgtgatgtacacctgtagtcccagctactcaggaggccgaaatgggaggatcccttgagctcaggaggtcaaggctgcagtgagacatgatcttgccactgcactccagcctggacagcagagtgaaaccttgcctcacgaaacagaatacaaaaacaaacaaacaaaaaactgctccgcaatgcgcttccttgatgctctaccacataggtctgggtactttgtacacattatctcattgctgttcgtaattgttagattaattttgtaatattgatattattcctagaaagctgaggcctcaagatgataacttttattttctggacttgtaatagctttctcttgtattcaccatgttgtaactttcttagagtagtaacaatataaagttattgtgagtttttgcaaacacagcaaacacaacgacccatatagacattgatgtgaaattgtctattgtcaatttatgggaaaacaagtatgtactttttctactaagccattgaaacaggaataacagaacaagattgaaagaatacattttccgaaattacttgagtattatacaaagacaagcacgtggacctgggaggagggttattgtccatgactggtgtgtggagacaaatgcaggtttataatagatgggatggcatctagcgcaatgactttgccatcacttttagagagctcttggggaccccagtacacaagaggggacgcagggtatatgtagacatctcattctttttcttagtgtgagaataagaatagccatgacctgagtttatagacaatgagcccttttctctctcccactcagcagctatgagatggcttgccctgcctctctactaggctgactcactccaaggcccagcaatgggcagggctctgtcagggctttgatagcactatctgcagagccagggccgagaaggggtggactccagagactctccctcccattcccgagcagggtttgcttatttatgcatttaaatgatatatttattttaaaagaaataacaggagactgcccagccctggctgtgacatggaaactatgtagaatattttgggttccatttttttttccttctttcagttagaggaaaaggggctcactgcacatacactagacagaaagtcaggagctttgaatccaagcctgatcatttccatgtcatactgagaaagtccccacccttctctgagcctcagtttctctttttataagtaggagtctggagtaaatgatttccaatggctctcatttcaatacaaaatttccgtttattaaatgcatgagcttctgttactccaagactgagaaggaaattgaacctgagactcattgactggcaagatgtccccagaggctctcattcagcaataaaattctcaccttcacccaggcccactgagtgtcagatttgcatgcactagttcacgtgtgtaaaaaggaggatgcttctttcctttgtattctcacatacctttaggaaagaacttagcacccttcccacacagccatcccaataactcatttcagtgactcaacccttgactttataaaagtcttgggcagtatagagcagagattaagagtacagatgctggagccagaccacctgagtgattagtgactcagtttctcttagtaattgtatgactcagtttcttcatctgtaaaatggagggttttttaattagtttgtttttgagaaagggtctcactctgtcacccaaatgggagtgtagtggcaaaatctcggctcactgcaacttgcacttcccaggctcaagcggtcctcccacctcaacatcctgagtagctggaaccacaggtacacaccaccatacctcgctaattttttgtatttttggtagagatggggtttcacatgttacacaggatggtctcagactccggagctcaagcaatctgcccacctcagccttccaaagtgctgggattataagcatgattacaggagttttaacaggctcataagattgttctgcagcccgagtgagttaatacatgcaaagagtttaaagcagtgacttataaatgctaactactctagaaatgtttgctagtattttttgtttaactgcaatcattcttgctgcaggtgaaaactagtgttctgtactttatgcccattcatctttaactgtaataataaaaataactgacatttattgaaggctatcagagactgtaattagtgctttgcataattaatcatatttaatactcttggattctttcaggtagatactattattatccccattttactacagttaaaaaaactacctctcaacttgctcaagcatacactctcacacacacaaacataaactactagcaaatagtagaattgagatttggtcctaattatgtctttgctcactatccaataaatatttattgacatgtacttcttggcagtctgtatgctggatgctggggatacaaagatgtttaaatttaagctccagtctctgcttccaaaggcctcccaggccaagttatccattcagaaagcattttttactctttgcattccactgtttttcctaagtgactaaaaaattacactttattcgtctgtgtcctgctctgggatgatagtctgactttcctaacctgagcctaacatccctgacatcaggaaagactacaccatgtggagaaggggtggtggttttgattgctgctgtcttcagttagatggttaactttgtgaagttgaaaactgtggctctctggttgactgttagagttctggcacttgtcactatgcctattatttaacaaatgcatgaatgcttcagaatatgggaatattatcttctggaatagggaatcaagttatattatgtaacccaggattagaagattcttctgtgtgtaagaatttcataaacattaagctgtctagcaaaagcaagggcttggaaaatctgtgagctcctcaccatatagaaagcttttaacccatcattgaataaatccctataggggatttctaccctgagcaaaaggctggtcttgattaattcccaaactcatatagctctgagaaagtctatgctgttaacgttttcttgtctgctaccccatcatatgcacaacaataaatgcaggcctaggcatgactgaaggctctctcataattcttggttgcatgaatcagattatcaacagaaatgttgagacaaactatggggaagcagggtatgaaagagctctgaatgaaatggaaaccgcaatgcttcctgcccattcagggctccagcatgtagaaatctggggctttgtgaagactggcttaaaatcagaagccccattggataagagtagggaagaacctagagcctacgctgagcaggtttccttcatgtgacagggagcctcctgccccgaacttccagggatcctctcttaagtgtttcctgctggaatctcctcacttctatctggaaatggtttctccacagtccagcccctggctagttgaaagagttacccatgcagaggccctcctagcatccagagactagtgcttagattcctactttcagcgttggacaacctggatccacttgcccagtgttcttccttagttcctaccttcgaccttgatcctcctttatcttcctgaaccctgctgagatgatctatgtggggagaatggcttctttgagaaacatcttcttcgttagtggcctgcccctcattcccactttaatatccagaatcactataagaagaatataataagaggaataactcttattataggtaagggaaaattaagaggcatacgtgatgggatgagtaagagaggagagggaaggattaatggatgataaaatctactactatttgttgagaccttttatagtctaatcaattttgctattgttttccatcctcacgctaactccataaaaaaacactattattatctttattttgccatgacaagactgagctcagaagagtcaagcatttgcctaaggtcggacatgtcagaggcagtgccagacctatgtgagactctgcagctactgctcatgggccctgtgctgcactgatgaggaggatcagatggatggggcaatgaagcaaaggaatcattctgtggataaaggagacagccatgaagaagtctatgactgtaaatttgggagcaggagtctctaaggacttggatttcaaggaattttgactcagcaaacacaagaccctcacggtgactttgcgagctggtgtgccagatgtgtctatcagaggttccagggagggtggggtggggtcagggctggccaccagctatcagggcccagatgggttataggctggcaggctcagataggtggttaggtcaggttggtggtgctgggtggagtccatgactcccaggagccaggagagatagaccatgagtagagggcagacatgggaaaggtgggggaggcacagcatagcagcatttttcattctactactacatgggactgctcccctatacccccagctaggggcaagtgccttgactcctatgttttcaggatcatcatctataaagtaagagtaataattgtgtctatctcatagggttattatgaggatcaaaggagatgcacactctctggaccagtggcctaacagttcaggacagagctatgggcttcctatgtatgggtcagtggtctcaatgtagcaggcaagttccagaagatagcatcaaccactgttagagatatactgccagtctcagagcctgatgttaatttagcaatgggctgggaccctcctccagtagaaccttctaaccagctgctgcagtcaaagtcgaatgcagctggttagactttttttaatgaaagcttagctttcattaaagattaagctcctaagcagggcacagatgaaattgtctaacagcaactttgccatctaaaaaaatctgacttcactggaaacatggaagcccaaggttctgaacatgagaaatttttaggaatctgcacaggagttgagagggaaacaagatggtgaagggactagaaaccacatgagagacacgaggaaatagtgtagatttaggctggaggtaaatgaaagagaagtgggaattaatacttactgaaatctttctatatgtcaggtgccattttatgatatttaataatctcattacatatggtaattctgtgagatatgtattattgaacatactataattaatactaatgataagtaacacctcttgagtacttagtatatgctagaatcaaatttaagtttatcatatgaggccgggcacggtggctcatatatgggattacatgcctgtaatcccagcactttgggaggccaaggcaattggatcacctgaggtcaggagttccagaccagcctggccaacatggtgaaaccccttctctactaaaaaatacaaaaaatcagccaggtgtggtggcacgcgtctataatcccagctactcaggaggctgaggcaggagaatcacttgaacccaggaggtggaggttgcagtgagctaagattgcaccactgcactccagcctaggcgacagagtgagactccatctcaaaaaaaaaaaaagaagtttattatatgaattaacttagttttactcacaccaatactcagaagtagattattacctcatttattgatgaggagcccaatgtacttgtagtgtagatcaacttattgaaagcacaagctaataagtagacaattagtaattagaagtcagatggtctgagctctcctactgtctacattacatgagctcttattaactggggactcgaaaatcaaagacatgaaataatttgtccaagcttacagaaccaccaagtagtaaggctaggatgtagacccagttctgctacctctgaagacagtgttttttccacagcaaaacacaaactcagatattgtggatgcgagaaattagaagtagatattcctgccctgtggcccttgcttcttacttttacttcttggcgattggaagttgtggtccaagccacagttgcagaccatacttcctcaaccataattgcatttcttcaggaaagtttgagggagaaaaaggtaaagaaaaatttagaaacaacttcagaataaagagattttctcttgggttacagagattgtcatatgacaaattataagcagacacttgagaaaactgaaggcccatgcctgcccaaattaccctttgaccccttggtcaagctgcaactttggttaaagggagtgtttatgtgttatagtgttcatttactcttctggtctaacccattggctccgtcttcatcctgcagtgacctcagtgcctcagaaacatacatatgtttgtctagtttaagtttgtgtgaaattctaactagcgtcaagaactgagggccctaaactatgctaggaatagtgctgtggtgctgtgataggtacacaagaaatgagaagaaactgcagattctctgcatctccctttgccgggtctgacaacaaagtttccccaaattttaccaatgcaagccatttctccatatgctaactactttaaaatcatttggggcttcacattgtctttctcatctgtaaaaagaatggaagaactcattcctacagaactccctatgtcttccctgatgggctagagttcctctttctcaaaaattagccattattgtatttccttctaagccaaagctcagaggtcttgtattgcccagtgacatgcacactggtcaaaagtaggctaagtagaagggtactttcacaggaacagagagcaaaagaggtgggtgaatgagagggtaagtgagaaaagacaaatgagaagttacaacatgatggcttgttgtctaaatatctcctagggaattattgtgagaggtctgaatagtgttgtaaaataagctgaatctgctgcctaacattaacagtcaagaaatacctccgaataactgtacctccaattattctttaaggtagcatgcaactgtaatagttgcatgtatatatttatcataatactgtaacagaaaacacttactgaatatatactgtgtccctagttctttacacaataaactaatctcatcctcataattctattagctaatacatattatcatcctatatttcagagacttcaagaagttaagcaacttgctcaagatcatctaagaagtaggtggtatttctgggctcatttggcccctcctaatctctcatggcaacatggctgcctaaagtgttgattgccttaattcatcagggatgggctcatactcactgcagaccttaactggcatcctcttttcttatgtgatctgcctgaccctagtagaacttatgaaatttctgatgagaaaggagagaggagaaaggcagagctgactgtgatgagtgatgaaggtgccttctcatctgggtaccagtggggcctctaagactaagtcactctgtctcactgtgtcttagccagttccttacagcttgccctgatgggagatagagaatgggtatcctccaacaaaaaaataaattttcatttctcaaggtccaacttatgttttcttaatttttaaaaaaatcttgaccattctccactctctaaaataatccacagtgagagaaacattcttttcccccatcccataaatacctctattaaatatggaaaatctgggcatggtgtctcacacctgtaatcccagcactttgggaggctgaggtgggtggactgcttggagctcaggagttcaagaccatcttggacaacatggtgataccctgcctctacaaaaagtacaaaaattagcctggcatggtggtgtgcacctgtaatcccagctattagggtggctgaggcaggagaattgcttgaacccgggaggcggaggttgcagtgagctgagatcgtgccactgcactccagcctgggggacagagcacattataattaactgttattttttacttggactcttgtggggaataagatacatgttttattcttatttatgattcaagcactgaaaatagtgtttagcatccagcaggtgcttcaaaaccatttgctgaatgattactatactttttacaagctcagctccctctatcccttccagcatcctcatctctgattaaataagcttcagtttttccttagttcctgttacatttctgtgtgtctccattagtgacctcccatagtccaagcatgagcagttctggccaggcccctgtcggggtcagtgccccacccccgccttctggttctgtgtaaccttctaagcaaaccttctggctcaagcacagcaatgctgagtcatgatgagtcatgctgaggcttagggtgtgtgcccagatgttctcagcctagagtgatgactcctatctgggtccccagcaggatgcttacagggcagatggcaaaaaaaaggagaagctgaccacctgactaaaactccacctcaaacggcatcataaagaaaatggatgcctgagacagaatgtgacatattctagaatatattatttcctgaatatatatatatatatatatacacatatacgtatatatatatatatatatatatttgttgttatcaattgccatagaatgattagttattgtgaatcaaatatttatcttgcaggtggcctctatacctagaagcggcagaatcaggctttattaatacatgtgtatagatttttaggatctatacacatgtattaatatgaaacaaggatatggaagaggaaggcatgaaaacaggaaaagaaaacaaaccttgtttgccattttaaggcacccctggacagctaggtggcaaaaggcctgtgctgttagaggacacatgctcacatacggggtcagatctgacttggggtgctactgggaagctctcatcttaaggatacatctcaggccagtcttggtgcattaggaagatgtaggcaactctgatcctgagaggaaagaaacattcctccaggagagctaaaagggttcacctgtgtgggtaactgtgaaggactacaagaggatgaaaaacaatgacagacagacataatgcttgtgggagaaaaaacaggaggtcaaggggatagagaaggcttccagaagaatggctttgaagctggcttctgtaggagttcacagtggcaaagatgtttcagaaatgtgacatgacttaaggaactatacaaaaaggaacaaatttaaggagaggcagataaattagttcaacagacatgcaaggaattttcagatgaatgttatgtctccactgagcttcttgaggttagcagctgtgagggttttgcaggcccaggacccattacaggacctcacgtatacttgacactgttttttgtattcatttgtgaatgaatgacctcttgtcagtctactcggtttcgctgtgaatgaatgatgtcttgtcagcctacttggtttcgctaagagcacagagagaagatttagtgatgctatgtaaaaacttcctttttggttcaagtgtatgtttgtgatagaaatgaagacaggctacatgatgcatatctaacataaacacaaacattaagaaaggaaatcaacctgaagagtatttatacagataacaaaatacagagagtgagttaaatgtgtaataactgtggcacaggctggaatatgagccatttaaatcacaaattaattagaaaaaaaacagtggggaaaaaattccatggatgggtctagaaagactagcattgttttaggttgagtggcagtgtttaaagggtgatatcagactaaacttgaaatatgtggctaaataactagaatactctttattttttcgtatcatgaatagcagatatagcttgatggccccatgcttggtttaacatccttgctgttcctgacatgaaatccttaatttttgacaaaggggctattcattttcattttatattgggcctagaaattatgtagatggtcctgaggaaaagtttatagcttgtctatttctctctctaacatagttgtcagcacaatgcctaggctataggaagtactcaaagcttgttaaattgaattctatccttcttattcaattctacacatggaggaaaaactcatcagggatggaggcacgcctctaaggaaggcaggtgtggctctgcagtgtgattgggtacttgcaggacgaagggtggggtgggagtggctaaccttccattcctagtgcagaggtcacagcctaaacatcaaattccttgaggtgcggtggctcactcctgtaatcacagcagtttgggacgccaaggtgggcagatcacttgaggtcaggagttggacaccagcccagccaacatagtgaaacctggtctctgcttaaaaatataaaaattagctggacgtggtgacgggagcctgtaatccaactacttgggaggctgaggcaggagaatcgcttgaaccggggaggtggagtttgcactgagcagagatcatgccattgcactccagcctccagagcgagactctgtctaaagaaaaacgaaaacaaacaaacaaacaaacaaacaaaacccatcaaattccctgaccgaacagaattctgtctgattgttctctgacttatctaccattttccctccttaaagaaactgtggaacttccttcagctagaggggcctggctcagaagcctctggtcagcatccaagaaatacttgatgtcactttggctaaaggtatgatgtgtagacaagctccagagatggtttctcatttccatatccacccacccagctttccaattttaaagccaattctgaggtagagactgtgatgaacaaacaccttgacaaaattcaacccaaagactcactttgcctagcttcaaaatccttactctgacatatactcacagccagaaattagcatgcactagagtgtgcatgagtgcaacacacacacacaccaattccatattctctgtcagaaaatcctgttggtttttcgtgaaaggatgttttcagaggctgaccccttgccttcacctccaatgctaccactctggtctaagtcactgtcaccaccacctaaattatagctgttgactcataacaatcttcctgcttctaccactgccccactacaatttcttcccaatatactatccaaattagtcttttcaaaatgtaagtcatatatggtcacctctttgttcaaagtcttctgatagtttcctatatcatttataataaaaccaaatccttacaattctctacaatagttgttcatgcatatattatgtttattacagatacgcatatatatagctctcatataaataaatatatatatttatgtgtatgtgtgtagagtgttttttcttacaactctatgatgtaggtattattagtgtcccaaattttataatttaggacttctatgatctcatcttttattctccccttcaccgaatctcatcctacattggccttattgatattccttgaaaattctaagcatcttacatctttagggtatttacatttgccattccctatgccctaaatatttaatcatagtttcatataaatgggttcctcatcatctatgggtactctctcaggtgttaactttatagtgaggactttcctgccatactacttaaagtagcgataccctttcaccctgtcctaatcacactctggccttcatttcagttttttttttttctccatagcacctaatctcattggtatataacatgtttcatttgcttatttaatgtcaagctctttccactatcaagtccatgaaaacaggaactttattcctctattctgtttttgtgctgtattcttagcaattttacaattttgaatgaaatgaatgagcagtcaaacacatatacaactataattaaaaggatgtatgctgacacatccactgctatgcacacacaaagaaatcagtggagtagagctggaagcgctaagcctgcatagagctagttagccctccgcaggcagagccttgatgggattactgagttctagaattggactcatttgttttgtaggctgagatttgctcttgaaaacttgttctgaccaaaataaaaggctcaaaagatgaatatcgaaaccagggtgttttttacactggaatttataactagagcactcatgtttatgtaagcaattaattgtttcatcagtcaggtaaaagtaaagaaaaactgtgccaaggcaggtagcctaatgcaatatgccactaaagtaaacattattccataggtgtcagatatggcttattcatccatcttcatgggaaggatggccttggcctggacatcagtgttatgtgaggttcaaaacacctctaggctataaggcaacagagctccttttttttttttctgtgctttcctggctgtccaaatctctaatgataagcatacttctattcaatgagaatattctgtaagattatagttaagaattgtgggagccattccgtctcttatagttaaatttgagcttcttttatgatcactgtttttttaatatgctttaagttctggggtacatgtgccatggtggtttgctgcacccatcaacccgtcatctacattaggtatttctcctaatgctatccttcccctagccccccacccccaacaggccccagtgtgtgatgttcccctccctgtgtccatggatcactggttttttttttttttttttttttttttttaaagtctcagttaaatttttggaatgtaatttattttcctggtatcctaggacctgcaagttatctggtcactttagccctcacgttttgatgataatcacatatttgtaaacacaacacacacacacacacacacacacatatatatatataaaacatatatatacataaacacacataacatatttatcgggcatttctgagcaactaactcatgcaggactctcaaacactaacctatagccttttctatgtatctacttgtgtagaaaccaagcgtggggactgagaaggcaatagcaggagcattctgactctcactgcctttggctaggtccctccctcatcacagctcagcatagtccgagctcttatctatatccacacacagtttctgacgctgcccagctatcaccatcccaagtctaaagaaaaaaataatgggtttgcccatctctgttgattagaaaacaaaacaaaataaaataagcccctaagctcccagaaaacatgactaaaccagcaagaagaagaaaatacaataggtatatgaggagactggtgacactagtgtctgaatgaggcttgagtacagaaaagaggctctagcagcatagtggtttagaggagatgtttctttccttcacagatgccttagcctcaataagcttgcggttgtggaagtttactttcagaacaaactcctgtggggctagaattattgatggctaaaagaagcccgggggagggaaaaatcattcagcatcctcacccttagtgacacaaaacagagggggcctggttttccatatttcctcatgatggatgatctcgttaatgaaggtggtctgacgagatcattgcttcttccatttaagccttgctcacttgccaatcctcagttttaaccttctccagagaaatacacattttttattcaggaaacatactatgttatagtttcaatactaaataatcaaagtactgaagatagcatgcataggcaagaaaaagtccttagctttatgttgctgttgtttcagaatttaaaaaagatcaccaagtcaaggacttctcagttctagcactagaggtggaatcttagcatataatcagaggtttttcaaaatttctagacatgagattcaaagccctgcacttaaaatagtctcatttgaattaactctttatataaattgaaagcacattctgaactacttcagagtattgttttatttctatgttcttagttcataaatacattaggcaatgcaatttaattaaaaaaacccaagaatttcttagaattttaatcatgaaaataaatgaaggcatctttacttactcaaggtcccaaaaggtcaaagaaaccaggaaagtaaagctatatttcagcggaaaatgggatatttatgagttttctaagttgacagactcaagttttaaccttcagtgcccatgatgtaggaaagtgtggcataactggctgattctggctttctactcctttttcccattaaagatccctcctgcttaattaacattcacaagtaactctggttgtactttaggcacagtggctcccgaggtcagtcacacaataggatgtctgtgctccaagttgccagagagagagattactcttgagaatgagcctcagccctggctcaaactcacctgcaaacttcgtgagagatgaggcagaggtacactacgaaagcaacagttagaagctaaatgatgagaacacatggactcatagagggaaacaacgcatactggggcctatcagagggtggagggtgagagaaggagaggatcaggaaaaatcactaatggatgctaagcgtaatacctgagtgatgagatcatctatacaacaaacccccttgacattcatttatctatgtaacaaacctgcacatcctgtacacgtacccctgaacttaaaataaaagttgaaaacaagaaagcaacagtttgaacacttgttatggtctattctctcattctttacaattacactagaaaatagccacaggctcctgcaaggcagccacagaatttatgacttgtgatatccaagtcattcctggataatgcaaaatctaacacaaaatctagtagaatcatttgcttacatctatttttgttctgagaatatagatttagatacataatggaagcagaataatttaaaatctggctaatttagaatcctaagcagctcttttcctatcagtggtttacaagccttgtttatatttttcctattttaaaaataaaaataaagtaagttatttgtggtaaagaatattcattaaagtatttatttcttagataataccatgaaaaacattcagtgaagtgaagggcctactttacccaacaagaatctaatttatataatttttcatactaatagcatctaagaacagtacaatatttgactcttcaggttaaacatatgtcataaattagccagaaagatttaagaaaatattggatgtttccttgtttaaattaggcatcttacagtttttagaatcctgcatagaacttaagaaattacaaatgctaaagcaaacccaaacaggcaggaattaatcttcatcgaatttgggtgtttctttctaaaagtcctttatacttaaatgtcttaagacatacatagattttattttactaattttaattatacagacaataaatgaatattcttactgattactttttctgactgtctaatctttctgatctatcctggatggccataacacttatctctctgaactttgggcttttaatataggaaagaaaagcaataatccatttttcatggtatctcatatgataaacaaataaaatgcttaaaaatgagcaggtgaagcaatttatcttgaaccaacaagcatcgaagcaataatgagactgcccgcagcctacctgacttctgagtcaggatttataagccttgttactgagacacaaacctgggcctttcaatgctataacctttcttgaagctcctccctaccacctttagccataaggaaacatggaatgggtcagatccctggatgcaagccaggtctggaaccataggcagtaaggagagaagaaaatgtgggctctgcaactggctccgagggagcaggagagaatcaaccccatactctgaatctaagagaagactggtgtccatactctgaatgggaagaatgatgggattacccatagggcttgttttagggagaaacctgttctccaaactcttggccttgagatacctggtccttattccttggactttggcaatgtctgaccctcacattcaagttctgaggaagggccactgccttcatactgtggatctgtagcaaattccccctgaaaacccagagctgtatcttaattgtttaaaaaaattatattatctcaaggactgttcttctctgagtagccaagctcagcttggttcaagctacaagcagctgcgctgctttttgtctagtcattgttcttttatttcagtggatcaaatacgttctttccaaacctaggatcttgtcttcctggactatatattttatccacgaagtcttaatctggggtccacagaacactagggggctggtgaagtttatagaaaaaaaatctgtatttttacttacatgtaactgaaatttagcattttcttctactttgaatgcaaaggacaaactagaatgacatcatcagtacctattgcatagttataaagagaaaccacagatattttcatactacaccataggtattgcagatctttttgtttttgtttttgtttgagatggagtttcgctcttattgcccaggctggagtgcagtggcatgatttcggctcactgcaacctccccttcctgcattcaagcaattctcctgccttggcctccagagtagctggggattacaggcacctgccaccatgccagtctaatttttgtatttttagtagagaatgggtttcgccatgttggccaggctggtcttgaactcctgacctcagatgatctgcccgccttggcctcctgaagtgctgggattataggtgtgagccaccacgcctggcccattgcagatatttttaattcacatttatctgcatcactacttggatcttaaggtagctgcagacccaatcccagatctaatgctttcataaagaagcaaatataataaatactataccacaaatgtaatgtttgatgtctgataatgatatttcagtgtaattaaacttagcactccatgtatattatttgatgcaataaaaacatatttttttagcacttacagtctgccaaactggcctgtgacacaaaaaaagtttaggggaattcccctagttttgtctgtgttagccaatggttagaatatatgctcagaaagataccattggttaatagctaaaagaaaatggagtagaaattcagtggcctggaataataacaatttgggcagtcattaagtcaggtgaagacttctggaatcatgggagaaaagcaagggagacattcttacttgccacaagtgtttttttttttttttttttttatcacaaacataagaaaatataataaataacaaagtcaggttatagaagagagaaacgctcttagtaaacttggaatatggaatccccaaaggcacttgacttgggagacaggagccatactgctaagtgaaaaagacgaagaacctctagggcctgaacatacaggaaattgtaggaacagaaattcctagatctggtggggcaaggggagccataggagaaagaaatggtagaaatggatggagacggaggcagaggtgggcagatcatgaggtcaagagatcgagaccatcctggcaaacatggtgaaatcccgtctctactaaaaataaaaaaattagctgggcatggtggcatgcgcctgtagtcccagctgctcgggaggctgaggcaggagaatcgtttgaacccaggaggcgaaggttgcagtgagctgagatagtgccattgcactccagtctggcaacagagtgagactccgtctcaaaaaaaaaaaaaagaaagaaagaaaagaaaaagaaaaaagaaaaaataaatggatgtagaacaagccagaaggaggaactgggctggggcaatgagattatggtgatgtaagggacttttatagaattaacaatgctggaatttgtggaactctgcttctattattcccccaatcattacttctgtcacattgatagttaaataatttctgtgaatttattccttgantcccaaaatattgaggtaaataacaatggtattataaaagggcagattaagtgatatagcataagcaatattcttcaggcacatggatcgaattgaatacactgtaaatcccaacttccagtttcagctctaccaagtaaagagctagcaagtcatcaaaatggggacatacagaaaaaaaaaaggacactagaggaataatataccctgactcctagcctgattaatatatcgattcacttttactctgtttggtgacaaattctggctttaaataattttaggattttaggcttctcagctcccttcccagtgagaagtataagcaggacagcaggcaagcaagaagagagcccaaggcaatactcacaaagtagccagtgtcccctgtggtcatagagaaatggaaagagagaggantccccccttggagccactgggtggtaatcctttccgtccgttcctctctagggaatcaccccaaggtactgtactttgggattaaggctttagtcccactgtggactacttgctattctgttcagtttctgaaggaactatgtacggtttttgtctccctagagaaactaaggtacagaagttttgtttacaatgcactccttaagagagctagaactgggtgaagantcctggtttaaccagccttaatttcctttccctgggccccggtttggtcacgtcactgtcaccacctttaaggcaaatgttaaatgcgctttggctgaactttttcctattttgagatttgctcctttatatgaggctttcttggaaaaggagaatgggagagatggatatcattttggaagatgatgaagagggtaaaaaagggtacaaatggaaatttgtgttgcagatagtatgaggagccaacaaaaaagagcctcaggatccagcacacattatcacaaacttagtgtccatccatcactgctgaccctctccggacctgactccacccctgaggacacaggtcagccttgaccaatgacttttaagtaccatggagaacagggggccagaacttcggcagtaaagaataaaaggccagacagagaggcagcagcacatatctgcttccgacacagctgcaatcactagcaagctctcaggcctggcatcatggtgcattttactgctgaggagaaggctgccgtcactagcctgtggagcaagatgaatgtggaagaggctggaggtgaagccttgggcaggtaagcattggttctcaatgcatgggaatgaagggtgaatattaccctagcaagttgattgggaaagtcctcaagattttttgcatctctaattttgtatctgatatggtgtcatttcatagactcctcgttgtttacccctggacccagagattttttgacagctttggaaacctgtcgtctccctctgccatcctgggcaaccccaaggtcaaggcccatggcaagaaggtgctgacttcctttggagatgctattaaaaacatggacaacctcaagcccgcctttgctaagctgagtgagctgcactgtgacaagctgcatgtggatcctgagaacttcaaggtgagttcaggtgctggtgatgtgattttttggctttatattttgacattaattgaagctcataatcttattggaaagaccaacaaagatctcagaaatcatgggtcgagcttgatgttagaacagcagacttctagtgagcataaccaaaacttacatgattcagaactagtgacagtaaaggactactaacagcctgaattggcttaacttttcaggaaatcttgccagaacttgatgtgtttatcccagagaattgtattatagaattgtagacttgtgaaagaagaatgaaatttggcttttggtagatgaaagtccatttcaaggaaatagaaatgccttattttatgtgggtcatgataattgaggtttagaagagatttttgcaaaaaaaataaaagatttgctcaaagaaaaataagacacattttctaaaatatgttaaatttcccatcagtattgtgaccaagtgaaggcttgtttccgaatttgttggggattttaaactcccgctgagaactcttgcagcactcacattctacatttacaaaaattagacaattgcttaaagaaaaacagggagagagggaacccaataatactggtaaaatggggaagggggtgagggtgtaggtaggtagaatgttgaatgtagggctcatagaataaaattgaacctaagctcatctgaattttttgggtgggcacaaaccttggaacagtttgaggtcagggttgtctaggaatgtaggtataaagccgtttttgtttgtttgtttgttttttcatcaagttgttttcggaaacttctactcaacatgcctgtgtgttattttgtcttttgcctaacagctcctgggtaacgtgatggtgattattctggctactcactttggcaaggagttcacccctgaagtgcaggctgcctggcagaagctggtgtctgctgtcgccattgccctggcccataagtaccactgagttctcttccagtttgcaggtcttcctgtgaccctgacaccctccttctgcacatggggactgggcttggccttgagagaaagccttctgtttaataaagtacattttcttcagtaatcaaaaattgcaattttatcttctccatcttttactcttgtgttaaaaggaaaaagtgttcatgggctgagggatggagagaaacataggaagaaccaagagcttccttaagaaatgtatgggggcttgtaaaattaatgtggatgttatgggagaattcccaagattcccaaggaggatgatatgatggagaaaaatctttatcggggtgggaaaatggttaattaagtggcagagactcctaggcagtttttactgcaccggggaaagaaggagctgttgtggtacctgagaaagcagatttgtggtacatgtcacttttcattaaaaacaaaaacaaaacaaaacaaaacttcatagatatccaagatataggctgagaattactattttaatttactcttatttacattttgaagtagctagcttgtcacatgttttatgaaattgatttggagataagatgagtgtgtatcaacaatagcctgctctttccatgaaggattccattatttcatgggttagctgaagctaagacacatgatatcattgtgcattatcttctgatacaatgtaacatgcactaaaataaagttagagttaggacctgagtgggaaagtttttggagagtgtgatgaagactttccgtgggagatagaatactaataaaggcttaaattctaaaaccagcaagctagggcttcgtgacttgcatgaaactggctctctggaagtagaagggagagtaagacatacgtagaggactaggaaagaccagatagtacagggcctggctacaaaaatacaagcttttactatgctattgcaatactaaacgataagcattaggatgttaagtgactcaggaaataagattttgggaaaaagtaatctgcttatgtgcacaaaatggattcaagtttgcagataaaataaaatatggatgatgattcaaggggacagatacaatggttcaaacccaagaggagcagtgagtctgtggaattttgaaggatggacaaaggtggggtgagaaagacatagtattcgacctgactgtgggagatgagaaggaagaaggaggtgataaatgactgaaagctcccagactggtgaagataacaggaggaaaccatgcacttgaccctggtgactctcatgtgtgaagggtagagggatattaacagatttactttttaggaagtgctagattggtcagggagttttgaccttcaggtcttgtgtctttcatatcaaggaacctttgcattttccaagttagagtgccatattttggcaaatataactttattagtaattttatagtgctctcacattgatcagactttttcctgtgaattacttttgaatttggctgtatatatccagaatatgggagagagacaaataattattgtagttgcaggctatcaacaatactggtctctctgagccttataacctttcaatatgccccataaacagagtaaacagggattattcatggcactaaatattttcacctaggtcagtcaacaaatggaggcaatgtgcattttttgatacatatttttatatatttatggggcatgtgatacttacatgcctagaacatgtgactgattaagtctagatatttaggatatccattactttgagcatttatcatttctatgtattgagaaaatttcaaatcctcatttctgaccattttgaaatatataataaatagtaattaactatagtcaccctactcaaatatcaacattataaactaactaatccttctttccacttttttaccaaccaacatctcttaaatcccctgccatacacatcacacatttttcagctctgataactatcattctactctcataccaccatgagaccacttttttagctccacagatgaataaaaacatgtgatatttgactttctgtatctggcttattttattatctatctctttggcataccaagagtttgtttttgttctgcttcagggctttcaattaacataatgacctctggttccatccatgttgctacaaatgacaagatttcattctttttcatggcaaaatagtactgtgcaaaaaatacaattttttaatccgttcatctgttgatagacacttaggttgatcccaaaccttaactattgtgaataggtgcttcaataaacatgagtgtaatgtgtccattggatatactgatttcctttcttttggataaataaccactagtgagattgctggattgtatgatagttctgtttttagtttattgagaaatcttcatactgttttccataatggttgtactattttacattcccaccaacagtgtgtaagaaagagttcccttttctccatatcctcacaaggatctgttattttttgtcttttttgttaatagcattttaactagagtaagtagatatctcattgtagttttgatttgcatttccctgatcattagtgatgttgagattttttcatatgtttgttggtcatttgtatatctttttctgagattgtctgttcatgtccttatcctacttttattgggattgttgttattttcttgataatcattgtgtcattttagagcctggatattattcttttgtcagatgtatagattgtgaagattttctcctctgtgggttgtctgtttattctgcagactcttccttttgccatgcaaaagctctttagtttaatttagtcccagatattttctttgtttttatgtgtttgcatttgtgttcttgtcatgaaatcctttcctaagccaatgtgtagaagggtttttccgatgttattttctagaattgttacagtttcaggcttagatttaagtccttgatccatcttaagttgatttttgtataaggtgagagatgaagatccagtttcattctcctacatgtagcttgccagctatcccgactcatttgttgaatagggtgccctttcccatttatgtttttgtttgctttgtcaaagatcagttcggatgtaagtatttgagtttatttctgggttctctattctgttccattggtccgatgtgcctatttgtacaccagcatcatgctgtgtttttggtgactatggccttattgtatagtttgaaatgaggtaatgtaatgccattcagatttgttcttttttttagacttgcttgtttattgggctcttttttggttccataagaattttaggattgttttttctagttctgtgaaggctaatggtggtatttatgggaattgcaatgcaatttgtaggttgcttctggcattatggccattttcacaatattgattctacccatctatgagaatggcatgtgtttccatttgtttgtgtcttatatgattactatcagccgtgttttgtagttttccttgtagatgtctttcacctccttggttaggtatatattcctaagtttttgttttgttttgttttgttttttgcagctattgtaaaaggggttgagttattgattttattctcatcttggtcattgctggtatgtaagaaagcaactcattggtgtacgttaattttgtatccagaaactttgctgaattattttatcagttctagggggttttggaggagtctttagagttttctacatacacaatcatatcatcagcaaacagtgacagtttgactttctctttaacaatttggatgtgctttacttgtttctcttgtctgattgctcttgctaggacttccagtaatatgttaaagagaagtggtgagagtgggtatccttgtctcattccagttttcagacagaatgcttttaactttttcccattcaatataatgttggctgtgtgtttaccatagctggcttttattacattgaggtatgtcctttgtaaaccgattttgctgagttttagtcataaagtgatgttgaattttgttgaatgcagtttctgtggctattgagataatcacatgatttttgtttccaattctctttatgttgtgtatcacacttattgacttgcgtatgttaaaccatccgtgcatccctcgcatgaaaccacttgatcatgggttttgatatgccgtgtgggatgctattagctatattttgtcaaggatgttggcatctatgttcatcagggatattgatctgtagtgttttttttttttggttatgttctttcccagttttggtattaaggtgatactggcttcatagaatgatttagggaggattctctctttctctatcttgtagaatactgtcaataggattggtatcaattcttctttgaatgtctggtagaattcgaacgtctcctttaggttttctagtttattcatgtaaaggtgttcatagtaaccttgaataatcttttgtatttctgtggtatcagtaatagtatctcctgttttgtttctaactgagtttatttgcacttctctcctcttttcttggttaatcttgctaatggtctatcagttttatttatcttttcaaagaaccagctttttatttcatttagcttttgtatttttttgcagttgttttaatttcatttagttctcctcttatcttagttattccctttcttttgctgggttttggttctgtttgtttttgtttctctagtttcttgtggtgtgaccttatattgtctgtcctctttcagactctttgacatcgacatttagggctgtgaactttccttttagcaccatctttgctgtatcctagaggttttgataggtgtgtcactattgtcggtcagttcaagtaattttgttgttcttattatactttaagttctgggatacatgtgcagaatgtgcaggtttgttacataggtatagatgtgccatggtggtttgctgctcccatcaacctgtcatctacattaggtatttcttttaatgttatccctctcctaaccccctcaccccccgacaggccctggtgtgtgatgttcccctccctgtgtccatgtgttctcattgttcaactcccacttatgagtgagaacgtgtggtgtttggtttctctgttcctgtgttagtttgctcagaatgatgtttccaccttcaccatgtccctgcaaagacatgaactcatcattttatggctgcatatattccatggtgtatatgtgccacattttctttatccattatatcgctgatggccatttgggttggttccaagtctttggtattgtgaatagtgccgcaataaacatacgtgtgcacatgtctttatagtagaatgatttctaattctttgggtatatacccagtaatgggattgctgggtcaaacagtatttctggttctagatccttgaggaattgccacactgtcttccacaatggttgaactaatttacacacccatcaacagtgtaaaatttttcctattcttccacatcctctccagcaccttttgtttcctgactttttaataattgccattctaactggcatgagatggtatctcattgtggttttgatttgcatttctctaatgaccagtgatgatgagcttcttttcatgtgtttcttggccacataaatgacttctttagagaagcatctgttcatatcctttgtccactttttgatggggtcgttaggttttttcttgtaaatttgttgaagttctttgtagattttggatgttagccctttgtcagatggatagattggcaaaaattttctcccattctgtaggttgcctgttcactctgatgatagtcttttgctgtgcagaagctctttagtttaattagatcccatatgtcaattttggcctttgttgtcattgcttttgatgtttagtcgtggaattttgcccatgcctatgtcctgaatggtattgcctaggttatcttctaggatttttatggttttaggttgcacatttaagtctttaatccaccttgagttaatttttgtataaggtgtaaggaaggggtacagtttcagttttatgcatattgctagccagtttttccagcaccatttattaaatagggaattctttctccattgcttttgtgatgtttgtcaaagatcagatggtcgtagatgtgtggcattatttctgaggcttctgttctgttccactggtctatatatctgttttggtaccagtaccatgctgtttttgttactgtagccttgtagtatagcttgaagtcaggtagcatcatgcctccagctttgttctttttgtttaggattgtcttggctatatgggctcttttttgattccatatgacatttaaagtagttttttctaattctttgaaaaaagtcagtggtagcttgatggggatagcattgaatctataaattactttgggcagtatggccattttaaagatattgattctttctatctatgagcatggaatgtttttccatttgtttgtgtcctctcttatttccttgagcagtgagtggtttgtagctctccttgaagaggttcttcacatcccttataagttgtatttctaggtattttattttattctctttgcagcaattgtgaatgggagttcacccatgatttggctctctgcttgtctattattggtgtataggaatgcttgtgatttttgcacactgattttgtatcttgagactttgctgaagctgtttatcagcttaagattttgggctgagatgacagggtcttctaaatatacaatcatgtcatctgcaaacagagacaatttgacttcctctcttcctatttgaatatgctttatttctttctcttgcctgattgtcctggcgagaacttccaatactatgttgagtaagagtggcgagagggcatccttgtcttgtgccggttttcaaagcaaatgatttttaaatttccgtcttgatttcattgttgacccaatgatcattcaggagcaggttatttaatttccctgtatttgcatggttttgaaggttccttttgtagttgatttccaattttattctactgtggtctgagagagtgcttgatataatttcaatttttaaaaatttattgaggcttgttttgtggcatatcatatggcctatcttggagaaagttccatgtgctgatgaatagaatgtgtattctgcagttgttgggtagaatgtcctgtaaatatctgttaagtccatttgttctttaaatccattgtttctttgtagactgtcttgatgacctgcctagtgcagtcagtggagtattgaagtcccccactattattatgttgctgtctagtagtaattgttttataaatttgggatctccagtattagatgcatatatattaagaattgtaatattctcccattggacaagggcttttatcattatatgatgtccctctttgtcttttttaactgctgtttctttaaagtttgttttgtctgacataagaatagctgctttggctcgcttttggtgtccatttgtgtggaatgtcattttccacccctttaccttaagtttatgtgagtccttatgtgttaggtgagtctcctgaaggcggcagataactggttggtgaattctattcattctgcaattctgtatcttttaagtggagcatttagtccatttacattcaacatcagtattgaggtgtgaggtgactattccattcttcgtggtatttgttgcctgtgtatctttttatctgtatttttgttgtatatgtcctatgggatttatgctttaaagaggttctgttttgatgtgcttccagggtttatttcaagatttagagctccttttatcattcttgtagtgttggcttggtagtgccgaattctctcagcatttgtttttctgaaaaacactgtgtattttcttcatttgtgaagcttagtttcactggatataaaattcttggctgataattgttttgtttaagaaggctgaagatagggccatattcacttctagcttttacggtttctgctgagaaatctgctgttaatctgataggttttctttcataggttacctggtagtttcacctcacagctcttaagattctctttgtctttagataactttggatactctgatgacaatgtacctaggcaatgatatttttgcaatgaatttcccaggtgtttattgagcttctttgtatttggatatctaggtctctagcaaggagggggaagttttccttgattatttccatggacaagttttccaaacttttagatttctcttctttctcaggaatgctgattattcttaggtttgattgtttaacataatcccagatttcttggaggctttgttcatattttcttattcttttttctttgtctttgttggattgggtaattcaaaaactttgtcttcaagctctgaatttcttctgcttggattctattgctgagactttctagagcattttgcatttctataagtgcatccattcatccattgtttcctgaagttttgaatgttttttatttatgctatctctttaactgaagatttctcccctcatttcttgtatcatatttttggtttttttaaaattggacttcaccttcctcggatgcctccttgattagcttaataactgaccttctgaattatttttcaggtaaatcagggatttcttcttggtttggatgcattgctggtgagctagtatgattttttggggggtgttaaagaaccttgtttttcatattaccagagttagttttctggttccttctcacttgggtaggctctgtcagagggaaagtctaggcctcaaggctgagacttttgtcccagcaggtgttcccttgatgtagcacagtcccccttttcctaggacgtggggcttcctgagagccgaactgtagtgattgttatctctcttctggatctagccacccatcaggtctaccagactccaggctggtactggggtttgtctgcacagagtcttgtgacgtgaaccatctgtgggtctctcagccatagatacaaccacctgctccaatggaggtggtagaggatgaaatgaactctgtgagggtccttacttttggttgttcaatgcactatctttttgtgctggttggcctcctgccaggaggtggcactttctagaaagcatcagcagaggcagtcaggtggtggtggctgggggggctggggcactagaactcccaagaatatatgccctttgtcttcagctactagggtgagtaaggaaggaccatcaggtgggggcaggactagtcgtgtctgagctcagagtctccttgggcaggtctttctgtggctactgtgggaggatgggggtgtagtttccaggtcaatggatttatgttcctaggacaattatggctgcctctgctgtgtcatgcaggtcatcaggaaagtgggggaaagcaagcagtcacgtgacttgcccagctcccatgcaactcaaaaggttggtctcacttccagcgtgcaccctcccccgcaacagctccgaatctgtttccatgcagtcagtgagcaaggctgagaacttgcccaggctaccagctgcgaaaccaagtagggctgtcctacttccctgccagtggagtctgcacaccaaattcatgtccccccaccaacccccccactgcccagcccctagatctggccaggtggagattttctttttcctgtctcttttcccagttcctctggcagccctcccaaatgacccctgtgaggcaaggcagaaatggcttcctaggggacccagagagcccacagggcttttcccgctgcttcctctacccctgtattttgcttggccctctaaattgactcagctccaggtaaggtcagaatcttctcctgtggtctagatcttcaggttcccagtgaggatgtgtgtttgggggtagacggtcccccttttccacttccacagtttgggcactcacaatatttggggtgtttcccgggtcctacatgagcaatctgcttctttcagagggtgtgtgcgttctctcagctttcttgaatttatttctgcaggtggttctgcaaaaaaaattcctgatgggagacttcacatgctgctctgtgcatccgagtgggagctgcaatgtacttctgctgccacccatctgccatcaccctctaatttgtcggtaatatgcatttttaatcaatctttttttctctctctctcttttcttctcccccaaaactatactgccctttgatatcaaggaatcaaggccgtgatgttgaggggtgggcagtggatacactctttaccccttagggagcatatctagatttagatattgccaattcaagataacttaattgaaagcaaattcataatgaatacacacacacacacacacatctgcatgacaagatttttaatagttgaaagaataactaataattgtccacaggcaataagggctttttaagcaaaacagttgtgataaaacaggtcattcttagaatagtaatccagccaatagtacaggttgcttagagattatgacattaccagagttaaaattcaataatggcttctcactccctaccactgaggacaagtttatgtccttaggtttatgcttccctgaaacaataccacctgctattctccactttacatatcaacggcactggttctttatctaactctctggcacagcaggagtttgttttcttctgcttcagagctttgaatttactatttcagcttctaaactttatttgcaatgccttcccatggcagactccttctgtcattttgcctctgttcgaaaactttttccttaatttcattcttagttaataatatctgaaattattttgttgtttaacttaattattaattttatgtatgttctacctagatataatcttctagaggattgttttattctctgacttatttaacttaaatgcccactacctttaaaaattatgacatttatttaacagatatttgctgaacaaatgtttgaaaatacatgggaaagaatgcttgaaaacacttgaaattgcttgtgtaaagaaacagttttatcagttaggatttaatcaatgtcagaagcaatgatataggaaaaatcgaggaataagacagttatggataaggagaaatcaacaaactcttaaaagatattgcctcaaaagcataagaggaaataagggtttatacatgacttttagaacactgcctgggtttttggataaatggggaagttgttggaaaacaggagggatcctagatattccttagtctgaggaggagcaattaagattcacttgtttagaggctgggagtggtggctcacgcctgtaatcccagaattttgggaggccaaggcaggcagatcacctgaggtcaagagttcaagaccaacctggccaacatggtgaaatcccatctctacaaaaatacaaaaattagacaggcatgatggcaagtgcctgtaatcccagctacttgggaggctgaggaaggagaattgcttgaacctggaaggcaggagttgcagtgagccgagatcataccactgcactccagcctgggtgacagaacaagactctgtctcaaaaaaaaaaaagagagattcaaaagattcacttgtttaggccttagcgggcttagacaccagtctctgacacattcttaaaggtcaggctctacaaatggaacccaaccagactctcagatatggccaaagatctatacacacccatctcacagatcccctatcttaaagagaccctaatttgggttcacctcagtctctataatctgtaccagcataccaataaaaatctttctcacccatccttagattgagagaagtcacttattattatgtgagtaactggaagatactgataagttgacaaatctttttctttcctttcttattcaacttttattttaacttccaaagaacaagtgcaatatgtgcagctttgttgcgcaggtcaacatgtatctttctggtcttttagccgcctaacactttgagcagatataagccttacacaggattatgaagtctgaaaggattccaccaatattattataattcctatcaacctgataagttaggggaaggtagagctctcctccaataagccagatttccagagtttctgacgtcataatctaccaaggtcatggatcgagttcagagaaaaaacaaaagcaaaaccaaacctaccaaaaaataaaaatcccaaagaaaaaataaagaaaaaaacagcatgaatacttcctgccatgttaagtggccaatatgtcagaaacagcactgagttacagataaagatgtctaaactacagtgacatcccagctgtcacagtgtgtggactattagtcaataaaacagtccctgcctcttaagagttgttttccatgcaaatacatgtcttatgtcttagaataagattccctaagaagtgaacctagcatttatacaagataattaattctaatccatagtatctggtaaagagcattctaccatcatctttaccgagcatagaagagctacaccaaaaccctgggtcatcagccagcacatacacttatccagtgataaatacacatcatcgggtgcctacatacatacctgaatataaaaaaaatacttttgctgagatgaaacaggcgtgatttatttcaaataggtacggataagtagatattgaagtaaggattcagtcttatattatattacataacattaatctattcctgcactgaaactgttgctttataggatttttcactacactaatgagaacttaagagataatggcctaaaaccacagagagtatattcaagaataagtatagcacttcttatttggaaaccaatgcttactaaatgagactaagacgtgtcccatcaaaaatcctggacctatgcctaaaacacatttcacaatccctgaacttttcaaaaattggtacatgctttaactttaaactacaggcctcactggagctacagacaagaaggtgaaaaacggctgacaaaagaagtcctggtatcttctatggtgggagaagaaaactagctaaagggaagaataaattagagaaaaattggaatgactgaatcggaacaaggcaaaggctataaaaaaaattaagcagcagtatcctcttgggggccccttccccacactatctcaatgcaaatatctgtctgaaacggttcctggctaaactccacccatgggttggccagccttgccttgaccaatagccttgacaaggcaaacttgaccaatagtcttagagtatccagtgaggccaggggccggcggctggctagggatgaagaataaaaggaagcacccttcagcagttccacacactcgcttctggaacgtctgaggttatcaataagctcctagtccagacgccatgggtcatttcacagaggaggacaaggctactatcacaagcctgtggggcaaggtgaatgtggaagatgctggaggagaaaccctgggaaggtaggctctggtgaccaggacaagggagggaaggaaggaccctgtgcctggcaaaagtccaggtcgcttctcaggatttgtggcaccttctgactgtcaaactgttcttgtcaatctcacaggctcctggttgtctacccatggacccagaggttctttgacagctttggcaacctgtcctctgcctctgccatcatgggcaaccccaaagtcaaggcacatggcaagaaggtgctgacttccttgggagatgccataaagcacctggatgatctcaagggcacctttgcccagctgagtgaactgcactgtgacaagctgcatgtggatcctgagaacttcaaggtgagtccaggagatgtttcagcactgttgcctttagtctcgaggcaacttagacaactgagtattgatctgagcacagcagggtgtgagctgtttgaagatactggggttgggagtgaagaaactgcagaggactaactgggctgagacccagtggcaatgttttagggcctaaggagtgcctctgaaaatctagatggacaactttgactttgagaaaagagaggtggaaatgaggaaaatgacttttctttattagatttcggtagaaagaactttcacctttcccctatttttgttattcgttttaaaacatctatctggaggcaggacaagtatggtcgttaaaaagatgcaggcagaaggcatatattggctcagtcaaagtggggaactttggtggccaaacatacattgctaaggctattcctatatcagctggacacatataaaatgctgctaatgcttcattacaaacttatatcctttaattccagatgggggcaaagtatgtccaggggtgaggaacaattgaaacatttgggctggagtagattttgaaagtcagctctgtgtgtgtgtgtgtgtgtgtgcgcgcgtgtgtttgtgtgtgtgtgagagcgtgtgtttcttttaacgttttcagcctacagcatacagggttcatggtggcaagaagataacaagatttaaattatggccagtgactagtgctgcaagaagaacaactacctgcatttaatgggaaagcaaaatctcaggctttgagggaagttaacataggcttgattctgggtggaagcttggtgtgtagttatctggaggccaggctggagctctcagctcactatgggttcatctttattgtctcctttcatctcaacagctcctgggaaatgtgctggtgaccgttttggcaatccatttcggcaaagaattcacccctgaggtgcaggcttcctggcagaagatggtgactggagtggccagtgccctgtcctccagataccactgagctcactgcccatgatgcagagctttcaaggataggctttattctgcaagcaatacaaataataaatctattctgctaagagatcacacatggttgtcttcagttcttttttttatgtctttttaaatatatgagccacaaagggttttatgttgagggatgtgtttatgtgtatttatacatggctatgtgtgtttgtgtcatgtgcacactccacacttttttgtttacgttagatgtgggttttgatgagcaaataaaagaactaggcaataaagaaacttatacatgggagcgtctgcaagtgggagtaaaaggtgcaggagaaatctggttggaagaaagacctctataggacaggactcctcagaaacagatgttttggaagagatggggaaaggttcagtgaagggggctgaacccccttccctggattgcagcacagcagcgaggaaggggctcaacgaagaaaaagtgttccaagctttaggaagtcaaggtttaggcagggatagccattctattttattaggggcaatactatttccaacggcatctggcttttctcagcccttgtgaggctctacggggaggttgaggtgttagagatcagagcaggaaacaggtttttctttccacggtaactacaatgaagtgatccttactttactaaggaactttttcattttaagtgttgacgcatgcctaaagaggtgaaattaatcccatacccttaagtctacagactggtcacagcatttcaaggaggagacctcattgtaagcttctagggaggtggggacctaggtgaaggaaatgagccagcagaagctcacaagtcagcatcagcgtgtcatgtctcagcagcagaacagcacggtcagatgaaaatatagtgtgaagaatttgtataacattaattgagaaggcagattcactggagttcttatataattgaaagttaatgcacgttaataagcaagagtttagtttaatgtgatggtgttatgaacttaacgcttgtgtctccagaaaattcacatgctgaatccccaactcccaattggctccatttgtgggggaggctttggaaaagtaatcaggtttagaggagctcatgagagcagatccccatcatagaattattttcctcatcagaagcagagagattagccatttctcttccttctggtgaggacacagtgggaagtcagccacctgcaacccaggaagagagccctgaccaggaaccagcagaaaagtgagaaaaaatcctgttgttgaagtcacccagtctatgctattttgttatagcaccttgcactaagtaaggcagatgaagaaagagaaaaaaataagcttcggtgttcagtggattagaaaccatgtttatctcaggtttacaaatctccacttgtcctctgtgtttcagaataaaataccaactctactactctcatctgtaagatgcaaatagtaagcctgatcccttctgtctaacttcgaattctattttttcttcaacgtactttaggcttgtaatgtgtttatatacagtgaaatgtcaagttctttctttatatttctttctttcttttttttcctcagcctcagagttttccacatgcccttcctaccttcaggaacttctttctccaaacgtcttctgcctggcctccattcaaatcataaaggacccacttcaaatgccatcactcactaccatttcacaattcgcactttctttctttgtcctttttttttttagtaaaacaagtttataaaaaattgaaggaataaatgaatggctacttcataggcagagtagacacaagggctactggttgccgatttttattgttatttttcaatagtatgctaaacaaggggtagattatttatgctgcccatttttagaccataaaagataacttcctgatgttgccatggcattttttttccttttaattttatttcatttcattttaatttcgaaggtacatgtgcaggatgtgcaggcttgttacatgggtaaatgtgtgtctttctggccttttagccatctgtatcaatgagcagatataagctttacacaggatcatgaaggatgaaagaatttcaccaatattataataatttcaatcaacctgatagcttaggggataaactaatttgaagatacagcttgcctccgataagccagaattccagagcttctggcattataatctagcaaggttagagatcatggatcactttcagagaaaaacaaaaacaaactaaccaaaagcaaaacagaaccaaaaaacctccataaatacttcctacccagttaatggtccaatatgtcagaaacagcactgtgttagaaataaagctgtctaaagtacactaatattcgagttataatagtgtgtggactattagtcaataaaaacaacccttgcctctttagagttgttttccatgtacacgcacatcttatgtcttagagtaagattccctgagaagtgaacctagcatttatacaagataattaattctaatccacagtacctgccaaagaacattctaccatcatctttactgagcatagaagagctacgccaaaaccctgggtcatcagccagcacacacacttatccagtggtaaatacacatcatctggtgtatacatacatacctgaatatggaatcaaatatttttctaagatgaaacagtcatgatttatttcaaataggtacggataagtagatattgaggtaagcattaggtcttatattatgtaacactaatctattactgcgctgaaactgtggtctttatgaaaattgttttcactacactattgagaaattaagagataatggcaaaagtcacaaagagtatattcaaaaagaagtatagcactttttccttagaaaccactgctaactgaaagagactaagatttgtcccgtcaaaaatcctggacctatgcctaaaacacatttcacaatccctgaacttttcaaaaattggtacatgctttagctttaaactacaggcctcactggagctacagacaagaaggtaaaaaacggctgacaaaagaagtcctggtatcctctatgatgggagaaggaaactagctaaagggaagaataaattagagaaaaactggaatgactgaatcggaacaaggcaaaggctataaaaaaaattaagcagcagtatcctcttgggggccccttccccacactatctcaatgcaaatatctgtctgaaacggtccctggctaaactccacccatgggttggccagccttgccttgaccaatagccttgacaaggcaaacttgaccaatagtcttagagtatccagtgaggccaggggccggcggctggctagggatgaagaataaaaggaagcacccttcagcagttccacacactcgcttctggaacgtctgagattatcaataagctcctagtccagacgccatgggtcatttcacagaggaggacaaggctactatcacaagcctgtggggcaaggtgaatgtggaagatgctggaggagaaaccctgggaaggtaggctctggtgaccaggacaagggagggaaggaaggaccctgtgcctggcaaaagtccaggtcgcttctcaggatttgtggcaccttctgactgtcaaactgttcttgtcaatctcacaggctcctggttgtctacccatggacccagaggttctttgacagctttggcaacctgtcctctgcctctgccatcatgggcaaccccaaagtcaaggcacatggcaagaaggtgctgacttccttgggagatgccataaagcacctggatgatctcaagggcacctttgcccagctgagtgaactgcactgtgacaagctgcatgtggatcctgagaacttcaaggtgagtccaggagatgtttcagcactgttgcctttagtctcgaggcaacttagacaactgagtattgatctgagcacagcagggtgtgagctgtttgaagatactggggttgggagtgaagaaactgcagaggactaactgggctgagacccagtggcaatgttttagggcctaaggagtgcctctgaaaatctagatggacaactttgactttgagaaaagagaggtggaaatgaggaaaatgacttttctttattagatttcggtagaaagaactttcacctttcccctatttttgttattcgttttaaaacatctatctggaggcaggacaagtatggtcgttaaaaagatgcaggcagaaggcatatattggctcagtcaaagtggggaactttggtggccaaacatacattgctaaggctattcctatatcagctggacacatataaaatgctgctaatgcttcattacaaacttatatcctttaattccagatgggggcaaagtatgtccaggggtgaggaacaattgaaacatttgggctggagtagattttgaaagtcagctctgtgtgtgtgtgtgtgtgtgtgtgtgtcagcgtgtgtttcttttaacgtcttcagcctacaacatacagggttcatggtgggaagaagatagcaagatttaaattatggccagtgactagtgcttgaaggggaacaactacctgcatttaatgggaaggcaaaatctcaggctttgagggaagttaacataggcttgattctgggtggaagctgggtgtgtagttatctggaggccaggctggagctctcagctcactatgggttcatctttattgtctcctttcatctcaacagctcctgggaaatgtgctggtgaccgttttggcaatccatttcggcaaagaattcacccctgaggtgcaggcttcctggcagaagatggtgactgcagtggccagtgccctgtcctccagataccactgagcctcttgcccatgattcagagctttcaaggataggctttattctgcaagcaatacaaataataaatctattctgctgagagatcacacatgattttcttcagctcttttttttacatctttttaaatatatgagccacaaagggtttatattgagggaagtgtgtatgtgtatttctgcatgcctgtttgtgtttgtggtgtgtgcatgctcctcatttatttttatatgagatgtgcattttgatgagcaaataaaagcagtaaagacacttgtacacgggagttctgcaagtgggagtaaatggtgttggagaaatccggtgggaagaaagacctctataggacaggacttctcagaaacagatgttttggaagagatgggaaaaggttcagtgaagacctgggggctggattgattgcagctgagtagcaaggatggttcttaatgaagggaaagtgttccaagctttaggaattcaaggtttagtcaggtgtagcaattctattttattaggaggaatactatttctaatggcacttagcttttcacagcccttgtggatgcctaagaaagtgaaattaatcccatgccctcaagtgtgcagattggtcacagcatttcaagggagagacctcattgtaagactctgggggaggtggggacttaggtgtaagaaatgaatcagcagaggctcacaagtcagcatgagcatgttatgtctgagaaacagaccagcactgtgagatcaaaatgtagtgggaagaatttgtacaacattaattggaaggtttacttaatggaatttttgtatagttggatgttagtgcatctctataagtaagagtttaatatgatggtgttacggacctggtgtttgtgtctcctcaaaattcacatgctgaatccccaactcccaactgaccttatctgtgggggaggcttttgaaaagtaattaggtttagctgagctcataagagcagatccccatcataaaattattttccttatcagaagcagagagacaagccatttctctttcctcccggtgaggacacagtgagaagtccgccatctgcaatccaggaagagaaccctgaccacgagtcagccttcagaaatgtgagaaaaaactctgttgttgaagccacccagtcttttgtattttgttatagcaccttacactgagtaaggcagatgaagaaggagaaaaaaataagcttgggttttgagtgaactacagaccatgttatctcaggtttgcaaagctcccctcgtcccctatgtttcagcataaaatacctactctactactctcatctataagacccaaataataagcctgcgcccttctctctaactttgatttctcctatttttacttcaacatgctttactctagccttgtaatgtctttacatacagtgaaatgtaaagttctttattctttttttctttctttcttttttctcctcagcctcagaatttggcacatgcccttccttctttcaggaacttctccaacatctctgcctggctccatcatatcataaaggtcccacttcaaatgcagtcactaccgtttcaggatatgcactttctttcttttttgttttttgttttttttaagtcaaagcaaatttcttgagagagtaaagaaataaacgaatgactactgcataggcagagcagccccgagggccgctggttgttccttttatggttatttcttgatgatatgttaaacaagttttggattatttatgccttctctttttaggccatatagggtaactttctgacattgccatggcatgtttcttttaatttaatttactgttaccttaaattcaggggtacacgtacaggatatgcaggtttgttttataggtaaaagtgtgccatggttttaatgggttttttttttcttgtaaagttgtttaagtttcttgtttactctggatattggcctttgtcagaagaatagattggaaaatctttttcccattctgtagattgtctttcgctctgatggtagtttcttttgctgagcaggagctctttagtttaattagattccattggtcaatttttgcttttgctgcaattgcttttcacgctttcatcatgaaatctgtgcccgtgtttatatcatgaatagtattgccttgatttttttctaggctttttatagtttggggtttttcatttaagtctctaatccatccggagttaattttggataaggtataaggaaggagtccagtttcatttttcagcatatggctagccagttctcccccatcatttattaaattgaaaatcctttccccattgcttgcttttgtcaggtttctaaaagacagatggttgtaggtacaatatgcagtttcttcaagtcatataataccatctgaaatctcttattaattcatttcttttagtatgtatgctggtctcctctgctcactatagtgagggcaccattagccagagaatctgtctgtctagttcatgtaagattctcagaattaagaaaaatggatggcatatgaatgaaacttcatggatgacatatggaatctaatgtgtatttgttgaattaatgcataagatgcaacaagggaaaggttgacaactgcagtgataacctggtattgatgatataagagtctatagatcacagtagaagcaataatcatggaaaacaattggaaatggggaacagccacaaacaagaaagaatcaatactaccaggaaagtgactgcaggtcacttttcctggagcgggtgagagaaaagtggaagttgcagtaactgccgaattcctggttggctgatggaaagatggggcaactgttcactggtacgcagggttttagatgtatgtacctaaggatatgaggtatggcaatgaacagaaattcttttgggaatgagttttagggccattaaaggacatgacctgaagtttcctctgaggccagtccccacaactcaatataaatgtgtttcctgcatatagtcaaagttgccacttctttttcttcatatcatcgatctctgctcttaaagataatcttggttttgcctcaaactgtttgtcactacaaactttccccatgttcctaagtaaaacaggtaactgcctctcaactatatcaagtagactaaaatattgtgtctctaatatcagaaattcagctttaatatattgggtttaactctttgaaatttagagtctccttgaaatacacatgggggtgatttcctaaactttatttcttgtaaggatttatctcaggggtaacacacaaaccagcatcctgaacctctaagtatgaggacagtaagccttaagaatataaaataaactgttcttctctctgccggtggaagtgtgccctgtctattcctgaaattgcttgtttgagacgcatgagacgtgcagcacatgagacacgtgcagcagcctgtggaatattgtcagtgaagaatgtctttgcctgattagatataaagacaagttaaacacagcattagactatagatcaagcctgtgccagacacaaatgacctaatgcccagcacgggccacggaatctcctatcctcttgcttgaacagagcagcacacttctcccccaacactattagatgttctggcataattttgtagatatgtaggatttgacatggactattgttcaatgattcagaggaaatctcctttgttcagataagtacactgactactaaatggattaaaaaacacagtaataaaacccagttttccccttacttccctagtttgtttcttattctgctttcttccaagttgatgctggatagaggtgtttatttctattctaaaaagtgatgaaattggccgggcgcggtggctcacacctgtaatcccagcactttgggaggctgaggtgggcggatcacgaggtcaggagatcaagaccatcctggctaacatggtgaaaccccatctctactaaaaatacaaaaaattagccagagacggtggcgggtgcctgtagtcccagctactcgggaggctgaggcaggagaatggcgtgaacctgggaggcagagctgcagtgagcagagatcgcgccactgcacactccagcctgggtgacaaagcgagactccatctcaaaaaaaaaaaaaaaaaaaaaaagaaagaaagaaagaaaaaaaaagtgatgaaattgtgtattcaatgtagtctcaagagaattgaaaaccaagaaaggctgtggcttcttccacataaagcctggatgaataacaggataacacgttgttacattgtcacaactcctgatccaggaattgatggctaagatattcgtaattcttatccttttcagttgtaacttattcctatttgtcagcattcaggttattagcggctgctggcgaagtccttgagaaataaactgcacactggatggtgggggtagtgtaggaaaatggaggggaaggaagtaaagtttcaaattaagcctgaacagcaaagttcccctgagaaggccacctggattctatcagaaactcgaatgtccatcttgcaaaacttccttgcccaaaccccacccctggagtcacaacccacccttgaccaatagattcatttcactgagggaggcaaagggctggtcaatagattcatttcactgggagaggcaaagggctgggggccagagaggagaagtaaaaagccacacatgaagcagcaatgcaggcatgcttctggctcatctgtgatcaccaggaaactcccagatctgacactgtagtgcatttcactgctgacaagaaggctgctgccaccagcctgtgaagcaaggttaaggtgagaaggctggaggtgagattctgggcaggtaggtactggaagccgggacaaggtgcagaaaggcagaaagtgtttctgaaagagggattagcccgttgtcttacatagtctgactttgcacctgctctgtgattatgactatcccacagtctcctggttgtctacccatggacctagaggtactttgaaagttttggatatctgggctctgactgtgcaataatgggcaaccccaaagtcaaggcacatggcaagaaggtgctgatctccttcggaaaagctgttatgctcacggatgacctcaaaggcacctttgctacactgagtgacctgcactgtaacaagctgcacgtggaccctgagaacttcctggtgagtagtaagtacactcacgctttcttctttacccttagatatttgcactatgggtacttttgaaagcagaggtggctttctcttgtgttatgagtcagctatgggatatgatatttcagcagtgggattttgagagttatgttgctgtaaataacataactaaaatttggtagagcaaggactatgaataatggaaggccacttaccatttgatagctctgaaaaacacatcttataaaaaattctggccaaaatcaaactgagtgttttggatgagggaacagaagttgagatagagaaaataacatctttcctttggtcagcgaaattttctataaaaattaatagtcacttttctgcatagtcctggaggttagaaaaagatcaactgaacaaagtagtgggaagctgttaaaagaggattgtttccctccgaatgatgatggtatacttttgtacgcatggtacaggattctttgttatgagtgtttgggaaaattgtatgtatgtatgtatgtatgtgatgactggggacttatcctatccattactgttccttgaagtactattatcctactttttaaaaggacgaagtctctaaaaaaaaaatgaaacaatcacaatatgttggggtagtgagttggcatagcaagtaagagaaggataggacacaatgggaggtgcagggctgccagtcatattgaagctgatatctagcccataatggtgagagttgctcaaactctggtcaaaaaggatgtaagtgttatatctatttactgcaagtccagcttgaggccttctattcactatgtaccattttcttttttatcttcactccctccccagctcttaggcaacgtgatattgattgttttggcaacccacttcagcgaggattttaccctacagatacaggcttcttggcagtaactaacaaatgctgtggttaatgctgtagcccacaagaccactgagttccctgtccactatgtttgtacctatgtcccaaaatctcatctcctttagatgggggaggttggggagaagagcagtatcctgcctgctgattcagttcctgcatgataaaaatagaataaagaaatatgctctctaagaaatatcattgtactctttttctgtctttatattttaccctgattcagccaaaaggacgcactatttctgatggaaatgagaatgttggagaatgggagtttaaggacagagaagatactttcttgcaatcctgcaagaaaagagagaactcgtgggtggatttagtggggtagttactcctaggaaggggaaatcgtctctagaataagacaatgtttttacagaaagggaggtcaatggaggtactctttggaggtgtaagaggattgttggtagtgtgtagaggtatgttaggactcaaattagaagttctgtataggctattatttgtatgaaactcaggatatagctcatttggtgactgcagttcacttctacttattttaaacaacatattttttatgatttataatgaagtggggatggggcttcctagagaccaatcaagggccaaaccttgaactttctcttaacgtcttcaatggtattaatagagaattatctctaaggcatgtgaactggctgtcttggttttcatctgtacttcatctgctacctctgtgacctgaaacatatttataattccattaagctgtgcatatgatagatttatcatatgtattttccttaaaggatttttgtaagaactaattgaattgatacctgtaaagtctttatcacactacccaataaataataaatctctttgttcagctctctgtttctataaatatgtacaagttttattgtttttagtggtagtgattttattctctttctatatatatacacacacatgtgtgcattcataaatatatacaatttttatgaataaaaaattattagcaatcaatattgaaaaccactgatttttgtttatgtgagcaaacagcagattaaaaggctgagatttaggaaacagcacgttaagtcaagttgatagaggagaatatggacatttaaaagaggcaggatgatataaaattagggaaactggatgcagagaccagatgaagtaagaaaaatagctatcgttttgagcaaaaatcactgaagtttcttgcatatgagagtgacataataaatagggaaacgtagaaaattgattcacatgtatatatatatatagaactgattagacaaagtctaacttgggtatagtcagaggagcttgctgtaattatattgaggtgatggataaagaactgaagttgatggaaacaatgaagttaagaaaaaaaatcgagtaagagaccattgtggcagtgattgcacagaactggaaaacattgtgaaacagagagtcagagatgacagctaaaatccctgtctgtgaatgaaaagaaggaaatttattgacagaacagcaaatgcctacaagccccctgtttggatctggcaatgaacgtagccattctgtggcaatcacttcaaactcctgtacccaagacccttaggaagtatgtagcaccctcaaacctaaaacctcaaagaaagaggttttagaagatataataccctttcttctccagtttcattaatcccaaaacctctttctcaaagtatttcctctatgtgtccaccccaaagagctcacctcaccatatctcttgagtgggagcacatagataggcggtgctaccatctaacagcttctgaaattcctttgtcatatttttgagtccccactaataacccacaaagcagaataaataccagttgctcatgtacaataatcactcaactgctgtcttgtagcatacattaattaagcacattctttgaataattactgtgtccaaacaatcacactttaaaatctcacacttgtgctatcccttgcccttctgaatgtcactctgtattttaaatgaagagatgagggttgaatttcctgtgttacttattgttcatttctcgatgaggagttttcacattcacctttactggaaaacacataagtacacatcttacaggaaaaatataccaaactgacatgtagcatgaatgcttgtgcatgtagtcatataaaatcttgtagcaatgtaaacattctctgatatacacatacagatgtgtctatatgtctacacaatttcttatgctccatgaacaaacattccatgcacacataagaacacacactgttacagatgcatacttgagtgcattgacaaaattaccccagtcaatctagagaatttggatttctgcatttgactctgttagctttgtacatgctgttcatttactctgggtgatgtctttccctcattttgccttgtctatcttgtactcatactttaagtcctaacttatatgttatctcaactaagaagctatttttttttaattttaactgggcttaaagccctgtctataaactctgctacaattatgggctctttcttataatatttagtgtttttcctactaatgtacttaatctgctcattgtatattcctaccactaaattttaacctcttttatggtagagacattgtcttgtaaactcttatttccctagtatttggagatgaaaaaaaagattaaattatccaaaattagatctctcttttctacattatgagtattacactatccatagggaagtttgtttgagacctaaactgaggaacctttggttctaaaatgactatgtgatatcttagtatttataggtcatgaggttccttcctctgcctctgctatagtttgattagtcagcaagcatgtgtcatgcatttattcacatcagaatttcatacactaataagacatagtatcagaagtcagtttattagttatatcagttagggtccatcaaggaaaggacaaaccattatcagttactcaacctagaattaaatacagctcttaatagttaattatccttgtattggaagagctaaaatatcaaataaaggacagtgcagaaatctagatgttagtaacatcagaaaacctcttccgccattaggcctagaagggcagaaggagaaaatgtttataccaccagagtccagaaccagagcccataaccagaggtccactggattcagtgagctagtgggtgctccttggagagagccagaactgtctaatgggggcatcaaagtatcagccataaaaaaccataaaaaagactgtctgctgtaggagatccgttcagagagagagagagaccagaaataatcttgcttatgctttccctcagccagtgtttaccattgcagaatgtacatgcgactgaaagggtgaggaaacctgggaaatgtcagttcctcaaatacagagaacactgagggaaggatgagaaataaatgtgaaagcagacatgaatggtaattgacagaaggaaactaggatgtgtccagtaaatgaataattacagtgtgcagtgattattgcaatgattaatgtattgataagataatatgaaaacacagaattcaaacagcagtgaactgagattagaattgtggagagcactggcatttaagaatgtcacacttagaatgtgtctctaggcattgttctgtgcatatatcatctcaatattcattatctgaaaattatgaattaggtacaaagctcaaataatttattttttcaggttagcaagaactttttttttttttttttctgagatggagcattgctatggttgcccaggctggagtgcaatggcatgatccaggctcactgcaacatctgcctcccaggttcaagcgattctcctgcctcagcctcccaagtagctggcattacaggcatgtgccaccaccatgcctggctaattttctatttttagtagatagggggtttcaccatgttggtcaggctgatctcgaactcctaacatcaggtgatccaccctcctcggcctctgaatgtactgggatcacaggcgtgagccaccacacccagccaagaatgtgaattttgtagaaggatataacccatatttctctgaccctagagtccttagtatacctcccataccatgtggctcatcctccttacatacatttcccatctttcaccctaccttttcctttttgtttcagcttttcactgtgtgtcaaaatctagaaccttatctcctacctgctctgaaaccaacagcaagttgacttccattctaacccacattggcattacactaattaaaatcgatactgagttctaaaatcatctgggattttggggactatgtcttacttcatacttccttgagatttcacattaaatgttggtgttcattaaaggtccttcatttaactttgtattcatcacactcttggattcacagttatatctaaactcttatatatagcctgtataatcccaattcccaagtctgatttctaacctctgacctccaacctcagtgccaaacccatatatcaaacaatgtactgggcttatttatatagatgtcctataggcacctcagactcagcatgggtatttcacttgttatactaaaactgtttctcttccagtgttttccattttagtcattagatagctacttgcccattcaccaaggtcacagattaaaatcatttccctacctctaatcaacagttcaattctgcttcaatttgtccctatctattaatcaccactcttactgcccagtcaggtcctcattgtttcctgaacaagagtagatgctattctttccactttaagaccttatcctggctggatgcggtggctcaggcttgtaaacccagcactttgggaggccgaggcaggcagatcacttgaggtcaggagttcaagaccagcctgaccaacatggtgaaaccccatctctactaaaaatacaaaatcagccgggcgtgtggtgcatgcctgcagtcccagctattcaggtggctgaggcaggagaattgcttgaacccaggaggcggaggttgcggtgagcctagattgcaccattgcactctagcttgggcaatagggatgaaactccatctcagaagagaaaagaaaaaaagaccttattctgttacacaaatcctctcaatgcaatccatatagaataaacatgtaaccagatctcccaatgtgtaaaatcatttcaggtagaacagaattaaagtgaaaagccaagtctttggaattaacagacaaagttcaaataacagtcctcatggccttaagaatttacctaacattttttttagaatcaattttcttatatatgaattggaaacataattcctccctcacaaacacattctaagattttaaggagatattgatgaagtacatcatctgtcatttttaacagttagtggtagtgattcacacagcacattatgatctgttcttgtatgttctgttccattctgtattcttgacctggttgtattctttctgagctccagatccacatatctaagtacatctttttgcattttacaagagtgcatacaatacaatgtatccaagactgtatttctgattttatcgtaccactaaactcacaaatgtggccctattcttgtgttcacgactgacatcaccgtcatggtccaagtctgataatagaaatggcattgtcactttcttccctactgcaacagaagcccagctatttgtctcccattttctctacttctaaaatacatttcttcactaagtgagaataatcttttaaagacacaaatcaaaccatgccaccacctttcttgaattattcaatatctttcgttggcttccaggttacagaaaaataacttgtaacaaagtttaaaggtcattcatggctcctctctaccctattttataacatttccccttgtgatcagaatctcaggcacatcatccatctttctatatacaaataaagtcatatagtttgaactcacctctggttacttttaatcaaccaaatgctgtaaaatgcatttgtatcgctacgtgttaagcagtagttgattcttttcatttcttgttaatattctattctttgactataccgtaatttatcaattctactgttggtaagcatttaagtggctaccggtttgaggtttttatgattattgctgtcataagcatttctatacatgtctttggatacacacatgcatgtgtttctgaatatctaaaaatgtaattgctaggtaatagacttatcaagcatccagcatttgtggatactattaaaggttttccaaaggggttatactattgtacagtgtcaccaacagagtttgagtttctattgatccatatcaccaccaaaatttgaactgtcagtcttatctcttctcttgtctcttttttcctcttttttttccttcccttcccctctcttcgtttcttttctctcctcttctcttctttcctctcttcccttccctttctctttctcttccctatcccttctcctctcctctcccctccttttttctcctctcctctccattatttatttttccttcttctcctccatcccttccatcctctctcttcccctcttccttccttcctttctccatttcttcctcctctttccctcaatccttccttttggatatgctcatgggtgtgtatttgtctgccattgtggcattatttgaattcagaaaagagtgaaaaactactgggatcttcattctgggtctaattccacatttttttttaagaacacactctgtaaaaatgttctgtactagcatattcccaggaacttcgttaaatttaatctggctgaatatggtaaatctactttgcactttgcattctttctttagtcataccataattttaaacattcaaaatatttgtatataatatttgattttatctgtcattaaaatgttaaccttaaaattcatgtttccagaacctatttcaataactggtaaataaacactattcattttttaaatattcttttaatggatatttatttcaatataataaaaaattagagttttattataggaagaatttaccaaaagaaggaggaagcaagcaagtttaaactgcagcaatagttgtccattccaacctctcaaaattcccttggagacaaaatctctagaggcaaagaagaactttatattgagtcaacttgttaaaacatctgcttttagataagttttcttagtataaagtgacagaaacaaataagttaaactctaagatacattccactatattagcctaaaacacttctgcaaaaatgaaactaggaggatatttttagaaacaactgctgaaagagatgcggtggggagatatgcagaggagaacagggtttctgagtcaagacacacatgacagaacagccaatctcagggcaagttaagggaatagtggaatgaaggttcatttttcattctcacaaactaatgaaaccctgcttatcttaaaccaacctgctcactggagcagggaggacaggaccagcataaaaggcagggcagagtcgactgttgcttacactttcttctgacataacagtgttcactagcaacctcaaacagacaccatggtgcatctgactcctgaggagaagactgctgtcaatgccctgtggggcaaagtgaacgtggatgcagttggtggtgaggccctgggcaggttggtatcaaggttataagagaggctcaaggaggcaaatggaaactgggcatgtgtagacagagaagactcttgggtttctgataggcactgactctctgtcccttgggctgttttcctaccctcagattactggtggtctacccttggacccagaggttctttgagtcctttggggatctgtcctctcctgatgctgttatgggcaaccctaaggtgaaggctcatggcaagaaggtgctaggtgcctttagtgatggcctggctcacctggacaacctcaagggcactttttctcagctgagtgagctgcactgtgacaagctgcacgtggatcctgagaacttcagggtgagtccaggagatgcttcacttttctctttttactttctaatcttacattttggttcttttacctacctgctcttctcccacatttttgtcattttactatattttatcatttaatgcttctaaaattttgttaattttttatttaaatattctgcattttttccttcctcacaatcttgctattttaaattatttaatatcctgtctttctctcccaaccccctcccttcatttttccttctctaacaacaactcaaattatgcataccagctctcacctgctaattctgcacttagaataatccttttgtctctccacatgggtatgggagaggctccaactcaaagatgagaggcatagaatactgttttagaggctataaatcattttacaataaggaataattggaattttataaattctgtagtaaatggaatggaaaggaaagtgaatatttgattatgaaagactaggcagttacactggaggtggggcagaagtcgttgctaggagacagcccatcatcacactgattaatcaattaatttgtatctattaatctgtttatagtaattaatttgtatatgctatatacacatacaaaattaaaactaatttggaattaatttgtatatagtattatacagcatatatagcatatatgtacatatatagactacatgctagttaagtacatagaggatgtgtgtgtatagatatatgttatatgtatgcattcatatatgtacttatttatgctgatgggaataacctggggatcagttttgtctaagatttgggcagaaaaaaatgggtgttggctcagtttctcagaagccagtctttatttctctgttaaccatatgcatgtatctgcctacctcttctccgcagctcttgggcaatgtgctggtgtgtgtgctggcccgcaactttggcaaggaattcaccccacaaatgcaggctgcctatcagaaggtggtggctggtgtggctaatgccctggctcacaagtaccattgagatcctggactgtttcctgataaccataagaagaccctatttccctagattctattttctgaacttgggaacacaatgcctacttcaagggtatggcttctgcctaataaagaatgttcagctcaacttcctgattaatttcacttatttcatttttttgtccaggtgtgtaagaaggttcctgaggctctacagatagggagcacttgtttattttacaaagagtacatgggaaaagagaaaagcaagggaaccgtacaaggcattaatgggtgacacttctacctccaaagagcagaaattatcaagaactcttgatacaaagataatactggcactgcagaggttctagggaagacctcaaccctaagacatagcctcaagggtaatagctacgattaaactccaacaattactgagaaaataatgtgctcaattaaaggcataatgattactcaagacaatgttatgttgtctttcttcctccttcctttgcctgcacattgtagcccataatactataccccatcaagtgttcctgctccaagaaatagcttcctcctcttacttgccccagaacatctctgtaaagaatttcctcttatcttcccatatttcagtcaagattcattgctcacgtattacttgtgacctctcttgaccccagccacaataaacttctctatactacccaaaaaatctttccaaaccctccccgacaccatatttttatatttttcttatttatttcatgcacacacacacactccgtgctttataagcaattctgcctattctctaccttcttacaatgcctactgtgcctcatattaaattcatcaatgggcagaaagaaaatatttattcaagaaaacagtgaatgaatgaacgaatgagtaaatgagtaaatgaaggaatgattattccttgctttagaacttctggaattagaggacaatattaataataccatcgcacagtgtttctttgttgttaatgctacaacatacaaagaggaagcatgcagtaaacaaccgaacagttatttcctttctgatcataggagtaatatttttttccttgagcacatttttgccataggtaaaattagaaggatttttagaactttctcagttgtatacatttttaaaaatctgtattatatgcatgttgattaattttaaacttacttgaatacctaaacagaatctgttgtttccttgtgtttgaaagtgctttcacagtaactctgtctgtactgccagaatatactgacaatgtgttatagttaactgttttgatcacaacattttgaattgactggcagcagaagctctttttatatccatgtgttttccttaagtcattatacatagtaggcatgagactctttatactgaataagatatttaggaaccactggtttacatatcagaagcagagctactcagggcattttggggaagatcactttcacattcctgagcatagggaagttctcataagagtaagatattaaaaggagatacttgtgtggtattcgaaagacagtaagagagattgtagaccttatgatcttgatagggaaaacaaactacattcctttctccaaaagtcaaaaaaaaagagcaaatatagcttactataccttctattcctacaccattagaagtagtcagtgagtctaggcaagatgttggccctaaaaatccaaataccagagaattcatgagaacatcacctggatgggacatgtgccgagcaacacaattactatatgctaggcattgctatcttcatattgaagatgaggaggtcaagagatgaaaaaagacttggcaccttgttgttatattaaaattatttgttagagtagagcttttgtaagagtctaggagtgtgggagctaaatgatgatacacatggacacaaagaatagatcaacagacacccaggcctacttgagggttgagggtgggaagagggagacgatgaaaaagaacctattgggtattaagttcatcactgagtgatgaaataatctgtacatcaagacccagtgatatgcaatttacctatataacttgtacatgtacccccaaatttaaaataaagttaaaacaaagtataggaatggaattaattcctcaagatttggctttaattttatttgataatttatcaaatggttgtttttcttttctcactatggcgttgctttataaactatgttcagtatgtctgaatgaaagggtgtgtgtgtgtgtgaaagagagggagagaggaagggaagagaggacgtaataatgtgaatttgagttcatgaaaatttttcaataaaataatttaatgtcaggagaattaagcctaatagtctcctaaatcatccatctcttgagcttcagagcagtcctctgaattaatgcctacatgtttgtaaagggtgttcagactgaagccaagattctacctctaaagagatgcaatctcaaatttatctgaagactgtacctctgctctccataaattgacaccatggcccacttaatgaggttaaaaaaaagctaattctgaatgaaaatctgagcccagtggaggaaatattaatgaacaaggtgcagactgaaatataaattttctgtaataattatgcatatactttagcaaagttctgtctatgttgactttattgcttttggtaagaaatacaactttttaaagtgaactaaactatcctatttccaaactattttgtgtgtgtgcggtttgtttctatgggttctggttttcttggagcatttttatttcattttaattaattaattctgagagctgctgagttgtgtttactgagagattgtgtatctgcgagagaagtctgtagcaagtagctagactgtgcttgacctaggaacatatacagtagattgctaaaatgtctcacttggggaattttagactaaacagtagagcatgtataaaaatactctagtcaagtgctgcttttgaaacaaatgataaaaccacactcccatagatgagtgtcatgattttcatggaggaagttaatattcatcctctaagtatacccagactagggccattctgatataaaacattaggacttaagaaagattaatagactggagtaaaggaaatggacctctgtctctctcgctgtctcttttttgaggacttgtgtgtgtgtgtgtgtgtgtgtgtgtgtgtgttgtggtcagtggggctggaataaaagtagaatagacctgcacctgctgtggcatccattcacagagtagaagcaagctcacaatagtgaagatgtcagtaagcttgaatagtttttcaggaactttgaatgctgatttagatttgaaactgaggctctgaccataaccaaatttgcactatttattgcttcttgaaacttatttgcctggtatgcctgggcttttgatggtcttagtatagcttgcagccttgtccctgcagggtattatgggtaatagaaagaaaagtctgcgttacactctagtcacactaagtaactaccattggaaaagcaacccctgccttgaagccaggatgatggtatctgcagcagttgccaacacaagagaaggatccatagttcatcatttaaaaaagaaaacaaaatagaaaaaggaaaactatttctgagcataagaagttgtagggtaagtctttaagaaggtgacaatttctgccaatcaggatttcaaagctcttgctttgacaattttggtctttcagaatactataaatataacctatattataatttcataaagtctgtgcattttctttgacccaggatatttgcaaaagacatattcaaacttccgcagaacactttatttcacatatacatgcctcttatatcagggatgtgaaacagggtcttgaaaactgtctaaatctaaaacaatgctaatgcaggtttaaatttaataaaataaaatccaaaatctaacagccaagtcaaatctgtatgttttaacatttaaaatattttaaagacgtcttttcccaggattcaacatgtgaaatcttttctcagggatacacgtgtgcctagatcctcattgctttagttttttacagaggaatgaatataaaaagaaaatacttaaattttatccctcttacctctataatcatacataggcataattttttaacctaggctccagatagccatagaagaaccaaacactttctgcgtgtgtgagaataatcagagtgagattttttcacaagtacctgatgagggttgagacaggtagaaaaagtgagagatctctatttatttagcaataatagagaaagcatttaagagaataaagcaatggaaataagaaatttgtaaatttccttctgataactagaaatagaggatccagtttcttttggttaacctaaattttatttcattttattgttttattttattttattttattttattttgtgtaatcgtagtttcagagtgttagagctgaaaggaagaagtaggagaaacatgcaaagtaaaagtataacactttccttactaaaccgactgggtttccaggtaggggcaggattcaggatgactgacagggcccttagggaacactgagaccctacgctgacctcataaatgcttgctacctttgctgttttaattacatcttttaatagcaggaagcagaactctgcacttcaaaagtttttcctcacctgaggagttaatttagtacaaggggaaaaagtacagggggatgggagaaaggcgatcacgttgggaagctatagagaaagaagagtaaattttagtaaaggaggtttaaacaaacaaaatataaagagaaataggaacttgaatcaaggaaatgattttaaaacgcagtattcttagtggactagaggaaaaaaataatctgagccaagtagaagaccttttcccctcctacccctactttctaagtcacagaggctttttgttcccccagacactcttgcagattagtccaggcagaaacagttagatgtccccagttaacctcctatttgacaccactgattaccccattgatagtcacactttgggttgtaagtgactttttatttatttgtatttttgactgcattaagaggtctctagttttttatctcttgtttcccaaaacctaataagtaactaatgcacagagcacattgatttgtatttattctatttttagacataatttattagcatgcatgagcaaattaagaaaaacaacaacaaatgaatgcatatatatgtatatgtatgtgtgtatatatacacatatatatatatattttttttcttttcttaccagaaggttttaatccaaataaggagaagatatgcttagaactgaggtagagttttcatccattctgtcctgtaagtattttgcatattctggagacgcaggaagagatccatctacatatcccaaagctgaattatggtagacaaagctcttccacttttagtgcatcaatttcttatttgtgtaataagaaaattgggaaaacgatcttcaatatgcttaccaagctgtgattccaaatattacgtaaatacacttgcaaaggaggatgtttttagtagcaatttgtactgatggtatggggccaagagatatatcttagagggagggctgagggtttgaagtccaactcctaagccagtgccagaagagccaaggacaggtacggctgtcatcacttagacctcaccctgtggagccacaccctagggttggccaatctactcccaggagcagggagggcaggagccagggctgggcataaaagtcagggcagagccatctattgcttacatttgcttctgacacaactgtgttcactagcaacctcaaacagacaccatggtgcacctgactcctgaggagaagtctgccgttactgccctgtggggcaaggtgaacgtggatgaagttggtggtgaggccctgggcaggttggtatcaaggttacaagacaggtttaaggagaccaatagaaactgggcatgtggagacagagaagactcttgggtttctgataggcactgactctctctgcctattggtctattttcccacccttaggctgctggtggtctacccttggacccagaggttctttgagtcctttggggatctgtccactcctgatgctgttatgggcaaccctaaggtgaaggctcatggcaagaaagtgctcggtgcctttagtgatggcctggctcacctggacaacctcaagggcacctttgccacactgagtgagctgcactgtgacaagctgcacgtggatcctgagaacttcagggtgagtctatgggacccttgatgttttctttccccttcttttctatggttaagttcatgtcataggaaggggagaagtaacagggtacagtttagaatgggaaacagacgaatgattgcatcagtgtggaagtctcaggatcgttttagtttcttttatttgctgttcataacaattgttttcttttgtttaattcttgctttctttttttttcttctccgcaatttttactattatacttaatgccttaacattgtgtataacaaaaggaaatatctctgagatacattaagtaacttaaaaaaaaactttacacagtctgcctagtacattactatttggaatatatgtgtgcttatttgcatattcataatctccctactttattttcttttatttttaattgatacataatcattatacatatttatgggttaaagtgtaatgttttaatatgtgtacacatattgaccaaatcagggtaattttgcatttgtaattttaaaaaatgctttcttcttttaatatacttttttgtttatcttatttctaatactttccctaatctctttctttcagggcaataatgatacaatgtatcatgcctctttgcaccattctaaagaataacagtgataatttctgggttaaggcaatagcaatatttctgcatataaatatttctgcatataaattgtaactgatgtaagaggtttcatattgctaatagcagctacaatccagctaccattctgcttttattttatggttgggataaggctggattattctgagtccaagctaggcccttttgctaatcatgttcatacctcttatcttcctcccacagctcctgggcaacgtgctggtctgtgtgctggcccatcactttggcaaagaattcaccccaccagtgcaggctgcctatcagaaagtggtggctggtgtggctaatgccctggcccacaagtatcactaagctcgctttcttgctgtccaatttctattaaaggttcctttgttccctaagtccaactactaaactgggggatattatgaagggccttgagcatctggattctgcctaataaaaaacatttattttcattgcaatgatgtatttaaattatttctgaatattttactaaaaagggaatgtgggaggtcagtgcatttaaaacataaagaaatgaagagctagttcaaaccttgggaaaatacactatatcttaaactccatgaaagaaggtgaggctgcaaacagctaatgcacattggcaacagccctgatgcctatgccttattcatccctcagaaaaggattcaagtagaggcttgatttggaggttaaagttttgctatgctgtattttacattacttattgttttagctgtcctcatgaatgtcttttcactacccatttgcttatcctgcatctctcagccttgactccactcagttctcttgcttagagataccacctttcccctgaagtgttccttccatgttttacggcgagatggtttctcctcgcctggccactcagccttagttgtctctgttgtcttatagaggtctacttgaagaaggaaaaacagggggcatggtttgactgtcctgtgagcccttcttccctgcctcccccactcacagtgacccggaatctgcagtgctagtctcccggaactatcactctttcacagtctgctttggaaggactgggcttagtatgaaaagttaggactgagaagaatttgaaagggggctttttgtagcttgatattcactactgtcttattaccctatcataggcccaccccaaatggaagtcccattcttcctcaggatgtttaagattagcattcaggaagagatcagaggtctgctggctcccttatcatgtcccttatggtgcttctggctctgcagttattagcatagtgttaccatcaaccaccttaacttcatttttcttattcaatacctaggtaggtagatgctagattctggaaataaaatatgagtctcaagtggtccttgtcctctctcccagtcaaattctgaatctagttggcaagattctgaaatcaaggcatataatcagtaataagtgatgatagaagggtatatagaagaattttattatatgagagggtgaaacctaaaatgaaatgaaatcagacccttgtcttacaccataaacaaaaataaatttgaatgggttaaagaattaaactaagacctaaaaccataaaaatttttaaagaaatcaaaagaagaaaattctaatattcatgttgcagccgttttttgaatttgatatgagaagcaaaggcaacaaaaggaaaaataaagaagtgaggctacatcaaactaaaaaatttccacacaaaaaagaaaacaatgaacaaatgaaaggtgaaccatgaaatggcatatttgcaaaccaaatatttcttaaatattttggttaatatccaaaatatataagaaacacagatgattcaataacaaacaaaaaattaaaaataggaaaataaaaaaattaaaaagaagaaaatcctgccatttatgcgagaattgatgaacctggaggatgtaaaactaagaaaaataagcctgacacaaaaagacaaatactacacaaccttgctcatatgtgaaacataaaaaagtcactctcatggaaacagacagtagaggtatggtttccaggggttgggggtgggagaatcaggaaactattactcaaagggtataaaatttcagttatgtgggatgaataaattctagatatctaatgtacagcatcgtgactgtagttaattgtactgtaagtatatttaaaatttgcaaagagagtagatttttttgtttttttagatggagttttgctcttgttgtccaggctggagtgcaatggcaagatcttggctcactgcaacctccgcctcctgggttcaagcaaatctcctgcctcagcctcccgagtagctgggattacaggcatgcgacaccatgcccagctaattttgtatttttagtagagacggggtttctccatgttggtcaggctgatccgcctcctcggccaccaaagggctgggattacaggcgtgaccaccgggcctggccgagagtagatcttaaaagcatttaccacaagaaaaaggtaactatgtgagataatgggtatgttaattagcttgattgtggtaatcatttcacaaggtatacatatattaaaacatcatgttgtacaccttaaatatatacaatttttatttgtgaatgatacctcaataaagttgaagaataataaaaaagaatagacatcacatgaattaaaaaactaaaaaataaaaaaatgcatcttgatgattagaattgcattcttgatttttcagatacaaatatccatttgactgtttactcttttccaaaacaatacaataaattttagcactttatcttcattttccccttcccaatctataattttatatatatatattttagatattttgtatagttttactccctagattttctagtgttattattaaatagtgaagaaatgtttacacttatgtacaaaatgttttgcatgcttttcttcatttctaacattctctctaagtttattctattttttcctgattatccttaatattatctctttctgctggaaatatattgttacttttggtttatctaaaaatggcttcattttcttcattctaaaatcatgttaaattaataccactcatgtgtaagtaagatagtggaataaatagaaatccaaaaactaaatctcacaaaatataataatgtgatatataaaaatatagcttttaaatttagcttggaaataaaaaacaaacagtaattgaacaactatactttttgaaaagagtaaagtgaaatgcttaactgcatataccacaatcgattacacaattaggtgtgaaggtaaaattcagtcacgaaaaaactagaataaaaatatgggaagacatgtatataatcttagagataacagtgttatttaattatcaacccaaagtagaaactatcaagggagaaataaattcagtcaacaataaaagcatttaagaagttattctaggctgggagcggtggctcacacctgcaattgcagcactttgggaggcctagacaggcggatcacgacgtcaggagttcaagatcagcctggccaacatagtgaaacctcatcgctactaaaaatataaaaacttagcctggcgtggtggcaggcatgtgtaatcccagcaatttgggaggctgaggcaggagaatcgcttgatcctgggaggcagaggttgcagtgagccaagattgtgccactgcattccagcccaggtgacagcatgagactccgtcacaaaaaaaaaagaaaaaaaaggggggggggggcggtggagccaagatgaccgaataggaacagctccagtctatagctcccatcgtgagtgacgcagaagacgggtgatttctgcatttccaactgaggtaccaggttcatctcacagggaagtgccaggcagtgggtgcaggacagtagtgcagtgcactgtgcatgagccgaagcagggcgaggcatcacctcacccgggaagcacaaggggtcagggaattccctttcctagtcaaagaaaagggtgacagatggcacctggaaaatcgggtcactcccgccctaatactgcgctcttccaacaagcttaacaaatggcacaccaggagattatatcccatgcctggctcagagggtcctacgcccatggagcctcgctcattgctagcacagcagtctgaggtcaaactgcaaggtggcagtgaggctgggggaggggtgcccaccattgtccaggcttgagcaggtaaacaaagccgcctggaagctcgaactgggtggagcccaccacagctcaaggaggcctgcctgcctctgtaggctccacctctaggggcagggcacagacaaacaaaagacaacaagaacctctgcagacttaaatgtccctgtctgacagctttgaagagagtagtggttctcccagcacatagcttcagatctgagaacaggcagactgcctcctcaagtgggtccctgacccccgagtagcctaactgggaggcatcccccagtagggcggactgacacctcacatggctggtactcctctaagacaaaacttccagaggaatgatcaggcagcagcatttgcggttcaccaatatccactgttctgcagccaccgctgctgatacccaggaaaacagcatctggagtggacctccagtaaactccaacagacctgcagctgagggtcctgactgttagaaggaaaactaacaaacagaaaggacatccacaccaaaaacccatctgtacatcaccatcatcaaagaccaaaggtagataaaaccataaagatggggaaaaagcagagcagaaaaactggacactctaaaaatgagagtgcctctccttctccaaagtaacgcagctcctcaccagcaatggaacaaagctgggcagagaatgactttgacgagttgagagaggaaggcttcagaagatcaaactactccaagctaaaggaggaagttcgaacaaacggcaaagaagtaaaaaactttgaaaaaaaattagatgaatggataactagaataaccaatgcacagaagtccttaaaggacctgatggagctgaaaaccaaggcaggagaactacgtgacaaatacacaagcctcagtaaccgatgagatcaactggaagaaagggtatcaatgacggaagatgaaatgaatgaaatgaagcatgaagagaagtttagagaaaaaagaataaaaagaaacgaacaaagcctccaagaaatatgggactatgtgaaaagaccaaatctacatctaattggtgtagctgaaagtgatggggagaatggaaccaagttggaaaacactctgcaggatattatccaggagaacttccccaatctagcaaggcagcccaaattcacattcaggaaatacagagaacgccacaaagatactcctagagaaaagcaactccaagacacataactgacagattcaccaaagttgaaatgaaggaaaaaatgttaagggcagccagagagaaaggtcgggttacccacaaagggaagcccatcagactaacagctgatctatcggcagaaactctacaagccagaagaaagtgggggccaatattcaacattgttaaagaaaagaattttcggcccagaatttcatatccagccaaactaagcttcataagcattggagaaataaaatcctttacagacaagcaaatgctgagagattttgtcaccaccaggcctgccctacaagagctcctgaaggaagcactaaacatggaaaggaacaactagtatcagccactgcaaaaacatgccaaattgtaaacgaccatcaaggctaggaagaaactgcatcaaggagcaaaataaccagctaacatcataatgacaggatcaaattcatacataacaatactcaccttaaatgtaaataggctaaatgctccaattaaaagacacagactggcaaattggataaggagtcaagacccatctgtcgttatgtattcaggaaacccatctcacgtgcagagacacacataggctcgaaataaaaggatggaggaatatctaccaagcaaatggaaaacaaaaaaaggcaggggttgcaatcctagtctctgataaaacagattttaaaccaacaaagatcaaaagagacaaagaaggccattacataatggcaaagggatctattcaagaagaagaactaactatactaaatatatatgcacccaatacaggagcacccagattcataaaacaagtcctgagtgacctacaaagagacttagatgcccacacaataataatgggagactttaacaccccactgtcaacattagacagatcaacgagacagaaagttaacaaggatatccaggaattggactcagctctgcaccaagcagacctaatagacatctacagaactctccaccccaaatcaacagaatatacattcttttcagcaccacaccacacctattccaaaactgaccacatagttggaagtaaagctctcctcagcaaatgtaaaagaacagaaactataacaaactgtctctcagaccacagtgcaatcaaactagaactcaggattaagaaactcactcaaaaccactcagctacatggaaactgaacagcctgctcctgaatgactactgggtacataacaaaatgaaggcagaaataaagatgttctttgaaacaacgagaacaaagacacaacacaccagaatctctgagacacattcaaagcagtgtgtagagggaaatttatagcactaaatgcccacaagggaaagcaggaaagatctaaaattgacaccctaacatcacaattaaaaaactagagaagcaggagcaaacacattcaaaagctaacagaagacaagaaataactaagatcagagcagaagtgaagaagatagagacacaaaaaacccttcaaaaaaatcaatgaatccagaagctgtttttttgaaaagatcaacaaaattgatagactgctagcaagactaataaagaagaaaggggagaagaatcaaatagacgcaataaaaaatgacacggggtatcaccactgatcccacagaaatacaaactaccgtcagagaatactataaacacctctacgcaaataaactagaaaatctagaagaaatggataaattcctcgacacatacactctgccaagactaaaccaggaagaagttgtatctctgaatagaccaataacaggctctgaaattgaggcaataattaatagcttatcaaccaaaaaaagtccgggaccagtaggattcatagccgaattctaccagaggtacaaggaggagctggtaccattccttctgaaactattccaatcaatagaaaaagagggaatcctccctaactcattttatgaggccagcatcatcctgataccaaagcctgacagagacacaacaaaaaaagagaatgttacaccaatatccttgatgaacatcgatgcaaaaatcctcaataaaatactggcaaactgaatccagcagcacatcaaaaagcttatcctccatgatcaagtgggcttcatccctgccatgcaaggctggttcaacatacgaaatcaataaacataatccagcatataaacagaaccaaagacacaaaccatatgattatctcaatagatgcagaaaaggcctttgacaaaattcaacaatgcttcatgctaaaaactctcaataaattaggtattgatgggacatatctcaaaataataagagctatctatgacaaacccacagccaatatcatactgagtggacaaaaactggaagcattccctttgaaaactggcacaaggcagggatgccctctctcaccactcctattcaacatagtgttggaagttctggccagggcaatcaggcaggagaaggaaataaagggcattcaattaggaaaagaggaaggtgaaattgtccctgtttgcagatgacatgattgtatatctagaaaaccccattgtctcagcccaaaatctccttaagctgataagcaacttcagcaaagtctcaggatataaaatcagtgtgcaaaaatcacaagtattcctatgcaccaataacagacaaacagagagccaaatcatgagtgaactcccattcacaattgcttcaaagagaataaaatacctaggaatccaacttacaagggatgtgaaggacctcttcaaggagaactacaaaccactgctcaatgaaataaaagaggatacaaacaaatggaagaacattccatgcttatgggtaggaagaatcatatcgtgaaaatggtcatactgcccaaggtaatttatagattcaatgccatccccatcaagctaccaatgactttcttcacagaactggaaaaaactactttaaagttcatatggaatcaaaaaagagcccacatcaccaaggcaatcctaagccaaaagaacaaagctggaggcatcacgctacctgacttcaaactatactacaatgctacggtaaccaaaacagcatggtactggtaccaaaacagagatctagaccaatggaacagaacagagccctcagaaataatgccgcatatctacaactatccgatctttgacaaacctgagagaaacaagcaatggggaaaggattccctatttaataaatggtgctgggaaaactggctagccatatgtagaaagctgaaactggatccttccttacaccttatacaaaaattaattcaagatggattaaagacttaaacattagacctaaaaccataaaaaccctagaaaaaaacctaggcaataccattcaggacataggcatgggcaaggacttcatgtctaaaacaccaaaacgaatggcaacaaaagacaaaatggacaaacgggatctaattaaactaaagagcttctgcacagctaaagaaactaccatcagagtgaacaggcaacctacaaaatgggagaaaatttttgcaatctactcatctgacaaagggctaatatccagaatctacaatgaactcaaacaaatttacaagaaaaaacaaacaaccccatcaaaaagtgggcaaaggatatgaacagacacttctcaaaagaagacatttatgtaatcaaaaaacacatgaaaaaatgctcatcatcactagccatcagagaaatgcaaatcaaaaccacaatgagataccatctcacaccagttagaatggcgatcattaaaaagtcaggaaacaacaggtgctggagaggatgtggagaaacaggaacaacttttacactgttggtgggactgtaaactagttcaaccattgcggaagtcagtgtggcaattcctcaggaatctagaactagaaataccatttgacccagccatcccattactgggtagatacccaaaggattataaatcatgctgctataaagacacatgcacacgtatgtttattgcagcactattcacaatagcaaagacttggaaccaacccaaatgtccaacaacgatagattggattaagaaaatgtggcacatatacaccatggaatactatgcagccataaaaaatgatgagttcatgtcctttgtagggacatggatgaagctggaaactatcattctcagcaaactatcacaaggacaataaaccaaacaccgcatgttctcactcataggtgggaattgaacaatgagaacacatggacacatgaagaggaacatcacactctggggactgttatggggtggggggcaggggcagggatagcactaggagatatacctaatgctaaatgacgagttaatgggtgcagcacaccaacatggcacatgtatacatatataacaaacctgccgttgtgcacatgtaccctaaaacttgaagtataataataaaaaaaagttatcctattaaaactgatctcacacatccgtagagccattatcaagtctttctctttgaaacagacagaaatttagtgttttctcagtcagttaac

SEQ ID NO: 450 - DNA, 73308 bp, Homo sapiens
  misc_feature 1..73308: note = GenBank Accession No. U01317.1
  source 1..73308: mol_type = genomic DNA
gaattctaatctccctctcaaccctacagtcacccatttggtatattaaagatgtgttgtctactgtctagtatccctcaagtagtgtcaggaattagtcatttaaatagtctgcaagccaggagtggtggctcatgtctgtaattccagcactggagaggtagaagtgggaggactgcttgagctcaagagtttgatattatcctggacaacatagcaagacctcgtctctacttaaaaaaaaaaaaattagccaggcatgtgatgtacacctgtagtcccagctactcaggaggccgaaatgggaggatcccttgagctcaggaggtcaaggctgcagtgagacatgatcttgccactgcactccagcctggacagcagagtgaaaccttgcctcacgaaacagaatacaaaaacaaacaaacaaaaaactgctccgcaatgcgcttccttgatgctctaccacataggtctgggtactttgtacacattatctcattgctgttcgtaattgttagattaattttgtaatattgatattattcctagaaagctgaggcctcaagatgataacttttattttctggacttgtaatagctttctcttgtattcaccatgttgtaactttcttagagtagtaacaatataaagttattgtgagtttttgcaaacacagcaaacacaacgacccatatagacattgatgtgaaattgtctattgtcaatttatgggaaaacaagtatgtactttttctactaagccattgaaacaggaataacagaacaagattgaaagaatacattttccgaaattacttgagtattatacaaagacaagcacgtggacctgggaggagggttattgtccatgactggtgtgtggagacaaatgcaggtttataatagatgggatggcatctagcgcaatgactttgccatcacttttagagagctcttggggaccccagtacacaagaggggacgcagggtatatgtagacatctcattctttttcttagtgtgagaataagaatagccatgacctgagtttatagacaatgagcccttttctctctcccactcagcagctatgagatggcttgccctgcctctctactaggctgactcactccaaggcccagcaatgggcagggctctgtcagggctttgatagcactatctgcagagccagggccgagaaggggtggactccagagactctccctcccattcccgagcagggtttgcttatttatgcatttaaatgatatatttattttaaaagaaataacaggagactgcccagccctggctgtgacatggaaactatgtagaatattttgggttccatttttttttccttctttcagttagaggaaaaggggctcactgcacatacactagacagaaagtcaggagctttgaatccaagcctgatcatttccatgtcatactgagaaagtccccacccttctctgagcctcagtttctctttttataagtaggagtctggagtaaatgatttccaatggctctcatttcaatacaaaatttccgtttattaaatgcatgagcttctgttactccaagactgagaaggaaattgaacctgagactcattgactggcaagatgtccccagaggctctcattcagcaataaaattctcaccttcacccaggcccactgagtgtcagatttgcatgcactagttcacgtgtgtaaaaaggaggatgcttctttcctttgtattctcacatacctttaggaaagaacttagcacccttcccacacagccatcccaataactcatttcagtgactcaacccttgactttataaaagtcttgggcagtatagagcagagattaagagtacagatgctggagccagaccacctgagtgattagtgactcagtttctcttagtaattgtatgactcagtttcttcatctgtaaaatggagggttttttaattagtttgtttttgagaaagggtctcactctgtcacccaaatgggagtgtagtggcaaaatctcggctcactgcaacttgcacttcccaggctcaagcggtcctcccacctcaacatcctgagtagctggaaccacaggtacacaccaccatacctcgctaattttttgtatttttggtagagatggggtttcacatgttacacaggatggtctcagactccggagctcaagcaatctgcccacctcagccttccaaagtgctgggattataagcatgattacaggagttttaacaggctcataagattgttctgcagcccgagtgagttaatacatgcaaagagtttaaagcagtgacttataaatgctaactactctagaaatgtttgctagtattttttgtttaactgcaatcattcttgctgcaggtgaaaactagtgttctgtactttatgcccattcatctttaactgtaataataaaaataactgacatttattgaaggctatcagagactgtaattagtgctttgcataattaatcatatttaatactcttggattctttcaggtagatactattattatccccattttactacagttaaaaaaactacctctcaacttgctcaagcatacactctcacacacacaaacataaactactagcaaatagtagaattgagatttggtcctaattatgtctttgctcactatccaataaatatttattgacatgtacttcttggcagtctgtatgctggatgctggggatacaaagatgtttaaatttaagctccagtctctgcttccaaaggcctcccaggccaagttatccattcagaaagcattttttactctttgcattccactgtttttcctaagtgactaaaaaattacactttattcgtctgtgtcctgctctgggatgatagtctgactttcctaacctgagcctaacatccctgacatcaggaaagactacaccatgtggagaaggggtggtggttttgattgctgctgtcttcagttagatggttaactttgtgaagttgaaaactgtggctctctggttgactgttagagttctggcacttgtcactatgcctattatttaacaaatgcatgaatgcttcagaatatgggaatattatcttctggaatagggaatcaagttatattatgtaacccaggattagaagattcttctgtgtgtaagaatttcataaacattaagctgtctagcaaaagcaagggcttggaaaatctgtgagctcctcaccatatagaaagcttttaacccatcattgaataaatccctataggggatttctaccctgagcaaaaggctggtcttgattaattcccaaactcatatagctctgagaaagtctatgctgttaacgttttcttgtctgctaccccatcatatgcacaacaataaatgcaggcctaggcatgactgaaggctctctcataattcttggttgcatgaatcagattatcaacagaaatgttgagacaaactatggggaagcagggtatgaaagagctctgaatgaaatggaaaccgcaatgcttcctgcccattcagggctccagcatgtagaaatctggggctttgtgaagactggcttaaaatcagaagccccattggataagagtagggaagaacctagagcctacgctgagcaggtttccttcatgtgacagggagcctcctgccccgaacttccagggatcctctcttaagtgtttcctgctggaatctcctcacttctatctggaaatggtttctccacagtccagcccctggctagttgaaagagttacccatgcagaggccctcctagcatccagagactagtgcttagattcctactttcagcgttggacaacctggatccacttgcccagtgttcttccttagttcctaccttcgaccttgatcctcctttatcttcctgaaccctgctgagatgatctatgtggggagaatggcttctttgagaaacatcttcttcgttagtggcctgcccctcattcccactttaatatccagaatcactataagaagaatataataagaggaataactcttattataggtaagggaaaattaagaggcatacgtgatgggatgagtaagagaggagagggaaggattaatggatgataaaatctactactatttgttgagaccttttatagtctaatcaattttgctattgttttccatcctcacgctaactccataaaaaaacactattattatctttattttgccatgacaagactgagctcagaagagtcaagcatttgcctaaggtcggacatgtcagaggcagtgccagacctatgtgagactctgcagctactgctcatgggccctgtgctgcactgatgaggaggatcagatggatggggcaatgaagcaaaggaatcattctgtggataaaggagacagccatgaagaagtctatgactgtaaatttgggagcaggagtctctaaggacttggatttcaaggaattttgactcagcaaacacaagaccctcacggtgactttgcgagctggtgtgccagatgtgtctatcagaggttccagggagggtggggtggggtcagggctggccaccagctatcagggcccagatgggttataggctggcaggctcagataggtggttaggtcaggttggtggtgctgggtggagtccatgactcccaggagccaggagagatagaccatgagtagagggcagacatgggaaaggtgggggaggcacagcatagcagcatttttcattctactactacatgggactgctcccctatacccccagctaggggcaagtgccttgactcctatgttttcaggatcatcatctataaagtaagagtaataattgtgtctatctcatagggttattatgaggatcaaaggagatgcacactctctggaccagtggcctaacagttcaggacagagctatgggcttcctatgtatgggtcagtggtctcaatgtagcaggcaagttccagaagatagcatcaaccactgttagagatatactgccagtctcagagcctgatgttaatttagcaatgggctgggaccctcctccagtagaaccttctaaccagctgctgcagtcaaagtcgaatgcagctggttagactttttttaatgaaagcttagctttcattaaagattaagctcctaagcagggcacagatgaaattgtctaacagcaactttgccatctaaaaaaatctgacttcactggaaacatggaagcccaaggttctgaacatgagaaatttttaggaatctgcacaggagttgagagggaaacaagatggtgaagggactagaaaccacatgagagacacgaggaaatagtgtagatttaggctggaggtaaatgaaagagaagtgggaattaatacttactgaaatctttctatatgtcaggtgccattttatgatatttaataatctcattacatatggtaattctgtgagatatgtattattgaacatactataattaatactaatgataagtaacacctcttgagtacttagtatatgctagaatcaaatttaagtttatcatatgaggccgggcacggtggctcatatatgggattacatgcctgtaatcccagcactttgggaggccaaggcaattggatcacctgaggtcaggagttccagaccagcctggccaacatggtgaaaccccttctctactaaaaaatacaaaaaatcagccaggtgtggtggcacgcgtctataatcccagctactcaggaggctgaggcaggagaatcacttgaacccaggaggtggaggttgcagtgagctaagattgcaccactgcactccagcctaggcgacagagtgagactccatctcaaaaaaaaaaaaagaagtttattatatgaattaacttagttttactcacaccaatactcagaagtagattattacctcatttattgatgaggagcccaatgtacttgtagtgtagatcaacttattgaaagcacaagctaataagtagacaattagtaattagaagtcagatggtctgagctctcctactgtctacattacatgagctcttattaactggggactcgaaaatcaaagacatgaaataatttgtccaagcttacagaaccaccaagtagtaaggctaggatgtagacccagttctgctacctctgaagacagtgttttttccacagcaaaacacaaactcagatattgtggatgcgagaaattagaagtagatattcctgccctgtggcccttgcttcttacttttacttcttggcgattggaagttgtggtccaagccacagttgcagaccatacttcctcaaccataattgcatttcttcaggaaagtttgagggagaaaaaggtaaagaaaaatttagaaacaacttcagaataaagagattttctcttgggttacagagattgtcatatgacaaattataagcagacacttgagaaaactgaaggcccatgcctgcccaaattaccctttgaccccttggtcaagctgcaactttggttaaagggagtgtttatgtgttatagtgttcatttactcttctggtctaacccattggctccgtcttcatcctgcagtgacctcagtgcctcagaaacatacatatgtttgtctagtttaagtttgtgtgaaattctaactagcgtcaagaactgagggccctaaactatgctaggaatagtgctgtggtgctgtgataggtacacaagaaatgagaagaaactgcagattctctgcatctccctttgccgggtctgacaacaaagtttccccaaattttaccaatgcaagccatttctccatatgctaactactttaaaatcatttggggcttcacattgtctttctcatctgtaaaaagaatggaagaactcattcctacagaactccctatgtcttccctgatgggctagagttcctctttctcaaaaattagccattattgtatttccttctaagccaaagctcagaggtcttgtattgcccagtgacatgcacactggtcaaaagtaggctaagtagaagggtactttcacaggaacagagagcaaaagaggtgggtgaatgagagggtaagtgagaaaagacaaatgagaagttacaacatgatggcttgttgtctaaatatctcctagggaattattgtgagaggtctgaatagtgttgtaaaataagctgaatctgctgcctaacattaacagtcaagaaatacctccgaataactgtacctccaattattctttaaggtagcatgcaactgtaatagttgcatgtatatatttatcataatactgtaacagaaaacacttactgaatatatactgtgtccctagttctttacacaataaactaatctcatcctcataattctattagctaatacatattatcatcctatatttcagagacttcaagaagttaagcaacttgctcaagatcatctaagaagtaggtggtatttctgggctcatttggcccctcctaatctctcatggcaacatggctgcctaaagtgttgattgccttaattcatcagggatgggctcatactcactgcagaccttaactggcatcctcttttcttatgtgatctgcctgaccctagtagaacttatgaaatttctgatgagaaaggagagaggagaaaggcagagctgactgtgatgagtgatgaaggtgccttctcatctgggtaccagtggggcctctaagactaagtcactctgtctcactgtgtcttagccagttccttacagcttgccctgatgggagatagagaatgggtatcctccaacaaaaaaataaattttcatttctcaaggtccaacttatgttttcttaatttttaaaaaaatcttgaccattctccactctctaaaataatccacagtgagagaaacattcttttcccccatcccataaatacctctattaaatatggaaaatctgggcatggtgtctcacacctgtaatcccagcactttgggaggctgaggtgggtggactgcttggagctcaggagttcaagaccatcttggacaacatggtgataccctgcctctacaaaaagtacaaaaattagcctggcatggtggtgtgcacctgtaatcccagctattagggtggctgaggcaggagaattgcttgaacccgggaggcggaggttgcagtgagctgagatcgtgccactgcactccagcctgggggacagagcacattataattaactgttattttttacttggactcttgtggggaataagatacatgttttattcttatttatgattcaagcactgaaaatagtgtttagcatccagcaggtgcttcaaaaccatttgctgaatgattactatactttttacaagctcagctccctctatcccttccagcatcctcatctctgattaaataagcttcagtttttccttagttcctgttacatttctgtgtgtctccattagtgacctcccatagtccaagcatgagcagttctggccaggcccctgtcggggtcagtgccccacccccgccttctggttctgtgtaaccttctaagcaaaccttctggctcaagcacagcaatgctgagtcatgatgagtcatgctgaggcttagggtgtgtgcccagatgttctcagcctagagtgatgactcctatctgggtccccagcaggatgcttacagggcagatggcaaaaaaaaggagaagctgaccacctgactaaaactccacctcaaacggcatcataaagaaaatggatgcctgagacagaatgtgacatattctagaatatattatttcctgaatatatatatatatatatatacacatatacgtatatatatatatatatatatatttgttgttatcaattgccatagaatgattagttattgtgaatcaaatatttatcttgcaggtggcctctatacctagaagcggcagaatcaggctttattaatacatgtgtatagatttttaggatctatacacatgtattaatatgaaacaaggatatggaagaggaaggcatgaaaacaggaaaagaaaacaaaccttgtttgccattttaaggcacccctggacagctaggtggcaaaaggcctgtgctgttagaggacacatgctcacatacggggtcagatctgacttggggtgctactgggaagctctcatcttaaggatacatctcaggccagtcttggtgcattaggaagatgtaggcaactctgatcctgagaggaaagaaacattcctccaggagagctaaaagggttcacctgtgtgggtaactgtgaaggactacaagaggatgaaaaacaatgacagacagacataatgcttgtgggagaaaaaacaggaggtcaaggggatagagaaggcttccagaagaatggctttgaagctggcttctgtaggagttcacagtggcaaagatgtttcagaaatgtgacatgacttaaggaactatacaaaaaggaacaaatttaaggagaggcagataaattagttcaacagacatgcaaggaattttcagatgaatgttatgtctccactgagcttcttgaggttagcagctgtgagggttttgcaggcccaggacccattacaggacctcacgtatacttgacactgttttttgtattcatttgtgaatgaatgacctcttgtcagtctactcggtttcgctgtgaatgaatgatgtcttgtcagcctacttggtttcgctaagagcacagagagaagatttagtgatgctatgtaaaaacttcctttttggttcaagtgtatgtttgtgatagaaatgaagacaggctacatgatgcatatctaacataaacacaaacattaagaaaggaaatcaacctgaagagtatttatacagataacaaaatacagagagtgagttaaatgtgtaataactgtggcacaggctggaatatgagccatttaaatcacaaattaattagaaaaaaaacagtggggaaaaaattccatggatgggtctagaaagactagcattgttttaggttgagtggcagtgtttaaagggtgatatcagactaaacttgaaatatgtggctaaataactagaatactctttattttttcgtatcatgaatagcagatatagcttgatggccccatgcttggtttaacatccttgctgttcctgacatgaaatccttaatttttgacaaaggggctattcattttcattttatattgggcctagaaattatgtagatggtcctgaggaaaagtttatagcttgtctatttctctctctaacatagttgtcagcacaatgcctaggctataggaagtactcaaagcttgttaaattgaattctatccttcttattcaattctacacatggaggaaaaactcatcagggatggaggcacgcctctaaggaaggcaggtgtggctctgcagtgtgattgggtacttgcaggacgaagggtggggtgggagtggctaaccttccattcctagtgcagaggtcacagcctaaacatcaaattccttgaggtgcggtggctcactcctgtaatcacagcagtttgggacgccaaggtgggcagatcacttgaggtcaggagttggacaccagcccagccaacatagtgaaacctggtctctgcttaaaaatataaaaattagctggacgtggtgacgggagcctgtaatccaactacttgggaggctgaggcaggagaatcgcttgaaccggggaggtggagtttgcactgagcagagatcatgccattgcactccagcctccagagcgagactctgtctaaagaaaaacgaaaacaaacaaacaaacaaacaaacaaaacccatcaaattccctgaccgaacagaattctgtctgattgttctctgacttatctaccattttccctccttaaagaaactgtggaacttccttcagctagaggggcctggctcagaagcctctggtcagcatccaagaaatacttgatgtcactttggctaaaggtatgatgtgtagacaagctccagagatggtttctcatttccatatccacccacccagctttccaattttaaagccaattctgaggtagagactgtgatgaacaaacaccttgacaaaattcaacccaaagactcactttgcctagcttcaaaatccttactctgacatatactcacagccagaaattagcatgcactagagtgtgcatgagtgcaacacacacacacaccaattccatattctctgtcagaaaatcctgttggtttttcgtgaaaggatgttttcagaggctgaccccttgccttcacctccaatgctaccactctggtctaagtcactgtcaccaccacctaaattatagctgttgactcataacaatcttcctgcttctaccactgccccactacaatttcttcccaatatactatccaaattagtcttttcaaaatgtaagtcatatatggtcacctctttgttcaaagtcttctgatagtttcctatatcatttataataaaaccaaatccttacaattctctacaatagttgttcatgcatatattatgtttattacagatacgcatatatatagctctcatataaataaatatatatatttatgtgtatgtgtgtagagtgttttttcttacaactctatgatgtaggtattattagtgtcccaaattttataatttaggacttctatgatctcatcttttattctccccttcaccgaatctcatcctacattggccttattgatattccttgaaaattctaagcatcttacatctttagggtatttacatttgccattccctatgccctaaatatttaatcatagtttcatataaatgggttcctcatcatctatgggtactctctcaggtgttaactttatagtgaggactttcctgccatactacttaaagtagcgataccctttcaccctgtcctaatcacactctggccttcatttcagttttttttttttctccatagcacctaatctcattggtatataacatgtttcatttgcttatttaatgtcaagctctttccactatcaagtccatgaaaacaggaactttattcctctattctgtttttgtgctgtattcttagcaattttacaattttgaatgaaatgaatgagcagtcaaacacatatacaactataattaaaaggatgtatgctgacacatccactgctatgcacacacaaagaaatcagtggagtagagctggaagcgctaagcctgcatagagctagttagccctccgcaggcagagccttgatgggattactgagttctagaattggactcatttgttttgtaggctgagatttgctcttgaaaacttgttctgaccaaaataaaaggctcaaaagatgaatatcgaaaccagggtgttttttacactggaatttataactagagcactcatgtttatgtaagcaattaattgtttcatcagtcaggtaaaagtaaagaaaaactgtgccaaggcaggtagcctaatgcaatatgccactaaagtaaacattattccataggtgtcagatatggcttattcatccatcttcatgggaaggatggccttggcctggacatcagtgttatgtgaggttcaaaacacctctaggctataaggcaacagagctccttttttttttttctgtgctttcctggctgtccaaatctctaatgataagcatacttctattcaatgagaatattctgtaagattatagttaagaattgtgggagccattccgtctcttatagttaaatttgagcttcttttatgatcactgtttttttaatatgctttaagttctggggtacatgtgccatggtggtttgctgcacccatcaacccgtcatctacattaggtatttctcctaatgctatccttcccctagccccccacccccaacaggccccagtgtgtgatgttcccctccctgtgtccatggatcactggttttttttttttttttttttttttttttaaagtctcagttaaatttttggaatgtaatttattttcctggtatcctaggacctgcaagttatctggtcactttagccctcacgttttgatgataatcacatatttgtaaacacaacacacacacacacacacacacacatatatatatataaaacatatatatacataaacacacataacatatttatcgggcatttctgagcaactaactcatgcaggactctcaaacactaacctatagccttttctatgtatctacttgtgtagaaaccaagcgtggggactgagaaggcaatagcaggagcattctgactctcactgcctttggctaggtccctccctcatcacagctcagcatagtccgagctcttatctatatccacacacagtttctgacgctgcccagctatcaccatcccaagtctaaagaaaaaaataatgggtttgcccatctctgttgattagaaaacaaaacaaaataaaataagcccctaagctcccagaaaacatgactaaaccagcaagaagaagaaaatacaataggtatatgaggagactggtgacactagtgtctgaatgaggcttgagtacagaaaagaggctctagcagcatagtggtttagaggagatgtttctttccttcacagatgccttagcctcaataagcttgcggttgtggaagtttactttcagaacaaactcctgtggggctagaattattgatggctaaaagaagcccgggggagggaaaaatcattcagcatcctcacccttagtgacacaaaacagagggggcctggttttccatatttcctcatgatggatgatctcgttaatgaaggtggtctgacgagatcattgcttcttccatttaagccttgctcacttgccaatcctcagttttaaccttctccagagaaatacacattttttattcaggaaacatactatgttatagtttcaatactaaataatcaaagtactgaagatagcatgcataggcaagaaaaagtccttagctttatgttgctgttgtttcagaatttaaaaaagatcaccaagtcaaggacttctcagttctagcactagaggtggaatcttagcatataatcagaggtttttcaaaatttctagacatgagattcaaagccctgcacttaaaatagtctcatttgaattaactctttatataaattgaaagcacattctgaactacttcagagtattgttttatttctatgttcttagttcataaatacattaggcaatgcaatttaattaaaaaaacccaagaatttcttagaattttaatcatgaaaataaatgaaggcatctttacttactcaaggtcccaaaaggtcaaagaaaccaggaaagtaaagctatatttcagcggaaaatgggatatttatgagttttctaagttgacagactcaagttttaaccttcagtgcccatgatgtaggaaagtgtggcataactggctgattctggctttctactcctttttcccattaaagatccctcctgcttaattaacattcacaagtaactctggttgtactttaggcacagtggctcccgaggtcagtcacacaataggatgtctgtgctccaagttgccagagagagagattactcttgagaatgagcctcagccctggctcaaactcacctgcaaacttcgtgagagatgaggcagaggtacactacgaaagcaacagttagaagctaaatgatgagaacacatggactcatagagggaaacaacgcatactggggcctatcagagggtggagggtgagagaaggagaggatcaggaaaaatcactaatggatgctaagcgtaatacctgagtgatgagatcatctatacaacaaacccccttgacattcatttatctatgtaacaaacctgcacatcctgtacacgtacccctgaacttaaaataaaagttgaaaacaagaaagcaacagtttgaacacttgttatggtctattctctcattctttacaattacactagaaaatagccacaggctcctgcaaggcagccacagaatttatgacttgtgatatccaagtcattcctggataatgcaaaatctaacacaaaatctagtagaatcatttgcttacatctatttttgttctgagaatatagatttagatacataatggaagcagaataatttaaaatctggctaatttagaatcctaagcagctcttttcctatcagtggtttacaagccttgtttatatttttcctattttaaaaataaaaataaagtaagttatttgtggtaaagaatattcattaaagtatttatttcttagataataccatgaaaaacattcagtgaagtgaagggcctactttacccaacaagaatctaatttatataatttttcatactaatagcatctaagaacagtacaatatttgactcttcaggttaaacatatgtcataaattagccagaaagatttaagaaaatattggatgtttccttgtttaaattaggcatcttacagtttttagaatcctgcatagaacttaagaaattacaaatgctaaagcaaacccaaacaggcaggaattaatcttcatcgaatttgggtgtttctttctaaaagtcctttatacttaaatgtcttaagacatacatagattttattttactaattttaattatacagacaataaatgaatattcttactgattactttttctgactgtctaatctttctgatctatcctggatggccataacacttatctctctgaactttgggcttttaatataggaaagaaaagcaataatccatttttcatggtatctcatatgataaacaaataaaatgcttaaaaatgagcaggtgaagcaatttatcttgaaccaacaagcatcgaagcaataatgagactgcccgcagcctacctgacttctgagtcaggatttataagccttgttactgagacacaaacctgggcctttcaatgctataacctttcttgaagctcctccctaccacctttagccataaggaaacatggaatgggtcagatccctggatgcaagccaggtctggaaccataggcagtaaggagagaagaaaatgtgggctctgcaactggctccgagggagcaggagagaatcaaccccatactctgaatctaagagaagactggtgtccatactctgaatgggaagaatgatgggattacccatagggcttgttttagggagaaacctgttctccaaactcttggccttgagatacctggtccttattccttggactttggcaatgtctgaccctcacattcaagttctgaggaagggccactgccttcatactgtggatctgtagcaaattccccctgaaaacccagagctgtatcttaattgtttaaaaaaattatattatctcaaggactgttcttctctgagtagccaagctcagcttggttcaagctacaagcagctgagctgctttttgtctagtcattgttcttttatttcagtggatcaaatacgttctttccaaacctaggatcttgtcttcctaggctatatattttgtcccaggaagtcttaatctggggtccacagaacactagggggctggtgaagtttatagaaaaaaaatctgtatttttacttacatgtaactgaaatttagcattttcttctactttgaatgcaaaggacaaactagaatgacatcatcagtacctattgcatagttataaagagaaaccacagatattttcatactacaccataggtattgcagatctttttgtttttgtttttgtttgagatggagtttcgctcttattgcccaggctggagtgcagtggcatgatttcggctcactgcaacctccccttcctgcattcaagcaattctcctgccttggcctccagagtagctggggattacaggcacctgccaccatgccagtctaatttttgtatttttagtagagatggggtttcgccatgttggccaggctggtcttgaactcctgacctcagatgatctgcccgccttggcctcctgaagtgctgggattataggtgtgagccaccacgcctggcccattgcagatatttttaattcacatttatctgcatcactacttggatcttaaggtagctgtagacccaatcctagatctaatgctttcataaagaagcaaatataataaatactataccacaaatgtaatgtttgatgtctgataatgatatttcagtgtaattaaacttagcactcctatgtatattatttgatgcaataaaaacatattttttttagcacttacagtctgccaaactggcctgtgacacaaaaaaagtttaggaattcctggttttgtctgtgttagccaatggttagaatatatgctcagaaagataccattggttaatagctgaaagaaaatggagtagaaattcagtggcctggaataataacaatttgggcagtcattaagtcaggtgaagacttctggaatcatgggagaaaagcaagggagacattcttacttgccacaagtgtttttttttttttttttttatcacaaacataagaaaatataataaataacaaagtcaggttatagaagagagaaacgctcttagtaaacttggaatatggaatccccaaaggcacttgacttgggagacaggagccatactgctaagtgaaaaagacgaagaacctctagggcctgaacataggaaattgtaggaacagaaattcctagatctggtggggcaaggggagccataggagaaagaaatggtagaaatggatggagacggaggcagaggtgggcagatcatgaggtcaagagatcgagaccatcctggcaaacatggtgaaatcccgtctctactaaaaataaaaaaattagctgggcatggtggcatgcgcctgtagtcccagctgctcgggaggctgaggcaggagaatcgtttgaacccaggaggcgaaggttgcagtgagctgagatagtgccattgcactccagtctggcaacagagtgagactccgtctcaaaaaaaaaaaaaagaaagaaagaaaagaaaaagaaaaaagaaaaaataaatggatgtagaacaagccagaaggaggaactgggctggggcaatgagattatggtgatgtaagggacttttatagaattaacaatgctggaatttgtggaactctgcttctattattcccccaatcattacttctgtcacattgatagttaaataatttctgtgaatttattccttgattctaaaatatgaggataatgacaatggtattataagggcagattaagtgatatagcataagcaatattcttcaggcacatggatcgaattgaatacactgtaaatcccaacttccagtttcagctctaccaagtaaagagctagcaagtcatcaaaatggggacatacagaaaaaaaaaaggacactagaggaataatataccctgactcctagcctgattaatatatcgattcacttttttctctgtttgatgacaaattctggctttaaataattttaggattttaggcttctcagctcccttcccagtgagaagtataagcaggacagacaggcaagcaagaagagagccccaggcaatactcacaaagtagccagtgtcccctgtggtcatagagaaatgaaaagagagaggattccctggaagcactggatgtaatcttttctgtctgtcctctctagggaatcaccccaaggtactgtactttgggattaaggctttagtcccactgtggactacttgctattctgttcagtttctagaaggaactatgtacggtttttgtctccctagagaaactaaggtacagaagttttgtttacaatgcactccttaagagagctagaactgggtgagattctgttttaacagctttattttcttttccttggccctgtttttgtcaactgtcaccacctttaaggcaaatgttaaatgtgctttggctgaaactttttttcctattttgagatttgctcctttatatgaggctttcttggaaaaggagaatgggagagatggatatcattttggaagatgatgaagagggtaaaaaaggggacaaatggaaatttgtgttgcagatagatgaggagccaacaaaaaagagcctcaggatccagcacacattatcacaaacttagtgtccatccatcactgctgaccctctccggacctgactccacccctgaggacacaggtcagccttgaccaatgacttttaagtaccatggagaacagggggccagaacttcggcagtaaagaataaaaggccagacagagaggcagcagcacatatctgcttccgacacagctgcaatcactagcaagctctcaggcctggcatcatggtgcattttactgctgaggagaaggctgccgtcactagcctgtggagcaagatgaatgtggaagaggctggaggtgaagccttgggcaggtaagcattggttctcaatgcatgggaatgaagggtgaatattaccctagcaagttgattgggaaagtcctcaagattttttgcatctctaattttgtatctgatatggtgtcatttcatagactcctcgttgtttacccctggacccagagattttttgacagctttggaaacctgtcgtctccctctgccatcctgggcaaccccaaggtcaaggcccatggcaagaaggtgctgacttcctttggagatgctattaaaaacatggacaacctcaagcccgcctttgctaagctgagtgagctgcactgtgacaagctgcatgtggatcctgagaacttcaaggtgagttcaggtgctggtgatgtgattttttggctttatattttgacattaattgaagctcataatcttattggaaagaccaacaaagatctcagaaatcatgggtcgagcttgatgttagaacagcagacttctagtgagcataaccaaaacttacatgattcagaactagtgacagtaaaggactactaacagcctgaattggcttaacttttcaggaaatcttgccagaacttgatgtgtttatcccagagaattgtattatagaattgtagacttgtgaaagaagaatgaaatttggcttttggtagatgaaagtccatttcaaggaaatagaaatgccttattttatgtgggtcatgataattgaggtttagaagagatttttgcaaaaaaaataaaagatttgctcaaagaaaaataagacacattttctaaaatatgttaaatttcccatcagtattgtgaccaagtgaaggcttgtttccgaatttgttggggattttaaactcccgctgagaactcttgcagcactcacattctacatttacaaaaattagacaattgcttaaagaaaaacagggagagagggaacccaataatactggtaaaatggggaagggggtgagggtgtaggtaggtagaatgttgaatgtagggctcatagaataaaattgaacctaagctcatctgaattttttgggtgggcacaaaccttggaacagtttgaggtcagggttgtctaggaatgtaggtataaagccgtttttgtttgtttgtttgttttttcatcaagttgttttcggaaacttctactcaacatgcctgtgtgttattttgtcttttgcctaacagctcctgggtaacgtgatggtgattattctggctactcactttggcaaggagttcacccctgaagtgcaggctgcctggcagaagctggtgtctgctgtcgccattgccctggcccataagtaccactgagttctcttccagtttgcaggtcttcctgtgaccctgacaccctccttctgcacatggggactgggcttggccttgagagaaagccttctgtttaataaagtacattttcttcagtaatcaaaaattgcaattttatcttctccatcttttactcttgtgttaaaaggaaaaagtgttcatgggctgagggatggagagaaacataggaagaaccaagagcttccttaagaaatgtatgggggcttgtaaaattaatgtggatgttatgggagaattcccaagattcccaaggaggatgatatgatggagaaaaatctttatcggggtgggaaaatggttaattaagtggcagagactcctaggcagtttttactgcaccggggaaagaaggagctgttgtggtacctgagaaagcagatttgtggtacatgtcacttttcattaaaaacaaaaacaaaacaaaacaaaacttcatagatatccaagatataggctgagaattactattttaatttactcttatttacattttgaagtagctagcttgtcacatgttttatgaaattgatttggagataagatgagtgtgtatcaacaatagcctgctctttccatgaaggattccattatttcatgggttagctgaagctaagacacatgatatcattgtgcattatcttctgatacaatgtaacatgcactaaaataaagttagagttaggacctgagtgggaaagtttttggagagtgtgatgaagactttccgtgggagatagaatactaataaaggcttaaattctaaaaccagcaagctagggcttcgtgacttgcatgaaactggctctctggaagtagaagggagagtaagacatacgtagaggactaggaaagaccagatagtacagggcctggctacaaaaatacaagcttttactatgctattgcaatactaaacgataagcattaggatgttaagtgactcaggaaataagattttgggaaaaagtaatctgcttatgtgcacaaaatggattcaagtttgcagataaaataaaatatggatgatgattcaaggggacagatacaatggttcaaacccaagaggagcagtgagtctgtggaattttgaaggatggacaaaggtggggtgagaaagacatagtattcgacctgactgtgggagatgagaaggaagaaggaggtgataaatgactgaaagctcccagactggtgaagataacaggaggaaaccatgcacttgaccctggtgactctcatgtgtgaagggtagagggatattaacagatttactttttaggaagtgctagattggtcagggagttttgaccttcaggtcttgtgtctttcatatcaaggaacctttgcattttccaagttagagtgccatattttggcaaatataactttattagtaattttatagtgctctcacattgatcagactttttcctgtgaattacttttgaatttggctgtatatatccagaatatgggagagagacaaataattattgtagttgcaggctatcaacaatactggtctctctgagccttataacctttcaatatgccccataaacagagtaaacagggattattcatggcactaaatattttcacctaggtcagtcaacaaatggaggcaatgtgcattttttgatacatatttttatatatttatggggcatgtgatacttacatgcctagaacatgtgactgattaagtctagatatttaggatatccattactttgagcatttatcatttctatgtattgagaaaatttcaaatcctcatttctgaccattttgaaatatataataaatagtaattaactatagtcaccctactcaaatatcaacattataaactaactaatccttctttccacttttttaccaaccaacatctcttaaatcccctgccatacacatcacacatttttcagctctgataactatcattctactctcataccaccatgagaccacttttttagctccacagatgaataaaaacatgtgatatttgactttctgtatctggcttattttattatctatctctttggcataccaagagtttgtttttgttctgcttcagggctttcaattaacataatgacctctggttccatccatgttgctacaaatgacaagatttcattctttttcatggcaaaatagtactgtgcaaaaaatacaattttttaatccgttcatctgttgatagacacttaggttgatcccaaaccttaactattgtgaataggtgcttcaataaacatgagtgtaatgtgtccattggatatactgatttcctttcttttggataaataaccactagtgagattgctggattgtatgatagttctgtttttagtttattgagaaatcttcatactgttttccataatggttgtactattttacattcccaccaacagtgtgtaagaaagagttcccttttctccatatcctcacaaggatctgttattttttgtcttttttgttaatagcattttaactagagtaagtagatatctcattgtagttttgatttgcatttccctgatcattagtgatgttgagattttttcatatgtttgttggtcatttgtatatctttttctgagattgtctgttcatgtccttatcctacttttattgggattgttgttattttcttgataatcattgtgtcattttagagcctggatattattcttttgtcagatgtatagattgtgaagattttctcctctgtgggttgtctgtttattctgcagactcttccttttgccatgcaaaagctctttagtttaatttagtcccagatattttctttgtttttatgtgtttgcatttgtgttcttgtcatgaaatcctttcctaagccaatgtgtagaagggtttttccgatgttattttctagaattgttacagtttcaggcttagatttaagtccttgatccatcttaagttgatttttgtataaggtgagagatgaagatccagtttcattctcctacatgtagcttgccagctatcccgactcatttgttgaatagggtgccctttcccatttatgtttttgtttgctttgtcaaagatcagttcggatgtaagtatttgagtttatttctgggttctctattctgttccattggtccgatgtgcctatttgtacaccagcatcatgctgtgtttttggtgactatggccttattgtatagtttgaaatgaggtaatgtaatgccattcagatttgttcttttttttagacttgcttgtttattgggctcttttttggttccataagaattttaggattgttttttctagttctgtgaaggctaatggtggtatttatgggaattgcaatgcaatttgtaggttgcttctggcattatggccattttcacaatattgattctacccatctatgagaatggcatgtgtttccatttgtttgtgtcttatatgattactatcagccgtgttttgtagttttccttgtagatgtctttcacctccttggttaggtatatattcctaagtttttgttttgttttgttttgttttttgcagctattgtaaaaggggttgagttattgattttattctcatcttggtcattgctggtatgtaagaaagcaactcattggtgtacgttaattttgtatccagaaactttgctgaattattttatcagttctagggggttttggaggagtctttagagttttctacatacacaatcatatcatcagcaaacagtgacagtttgactttctctttaacaatttggatgtgctttacttgtttctcttgtctgattgctcttgctaggacttccagtaatatgttaaagagaagtggtgagagtgggtatccttgtctcattccagttttcagacagaatgcttttaactttttcccattcaatataatgttggctgtgtgtttaccatagctggcttttattacattgaggtatgtcctttgtaaaccgattttgctgagttttagtcataaagtgatgttgaattttgttgaatgcagtttctgtggctattgagataatcacatgatttttgtttccaattctctttatgttgtgtatcacacttattgacttgcgtatgttaaaccatccgtgcatccctcgcatgaaaccacttgatcatgggttttgatatgccgtgtgggatgctattagctatattttgtcaaggatgttggcatctatgttcatcagggatattgatctgtagtgttttttttttttggttatgttctttcccagttttggtattaaggtgatactggcttcatagaatgatttagggaggattctctctttctctatcttgtagaatactgtcaataggattggtatcaattcttctttgaatgtctggtagaattcgaacgtctcctttaggttttctagtttattcatgtaaaggtgttcatagtaaccttgaataatcttttgtatttctgtggtatcagtaatagtatctcctgttttgtttctaactgagtttatttgcacttctctcctcttttcttggttaatcttgctaatggtctatcagttttatttatcttttcaaagaaccagctttttatttcatttagcttttgtatttttttgcagttgttttaatttcatttagttctcctcttatcttagttattccctttcttttgctgggttttggttctgtttgtttttgtttctctagtttcttgtggtgtgaccttatattgtctgtcctctttcagactctttgacatcgacatttagggctgtgaactttccttttagcaccatctttgctgtatcctagaggttttgataggtgtgtcactattgtcggtcagttcaagtaattttgttgttcttattatactttaagttctgggatacatgtgcagaatgtgcaggtttgttacataggtatagatgtgccatggtggtttgctgctcccatcaacctgtcatctacattaggtatttcttttaatgttatccctctcctaaccccctcaccccccgacaggccctggtgtgtgatgttcccctccctgtgtccatgtgttctcattgttcaactcccacttatgagtgagaacgtgtggtgtttggtttctctgttcctgtgttagtttgctcagaatgatgtttccaccttcaccatgtccctgcaaagacatgaactcatcattttatggctgcatatattccatggtgtatatgtgccacattttctttatccattatatcgctgatggccatttgggttggttccaagtctttggtattgtgaatagtgccgcaataaacatacgtgtgcacatgtctttatagtagaatgatttctaattctttgggtatatacccagtaatgggattgctgggtcaaacagtatttctggttctagatccttgaggaattgccacactgtcttccacaatggttgaactaatttacacacccatcaacagtgtaaaatttttcctattcttccacatcctctccagcaccttttgtttcctgactttttaataattgccattctaactggcatgagatggtatctcattgtggttttgatttgcatttctctaatgaccagtgatgatgagcttcttttcatgtgtttcttggccacataaatgacttctttagagaagcatctgttcatatcctttgtccactttttgatggggtcgttaggttttttcttgtaaatttgttgaagttctttgtagattttggatgttagccctttgtcagatggatagattggcaaaaattttctcccattctgtaggttgcctgttcactctgatgatagtcttttgctgtgcagaagctctttagtttaattagatcccatatgtcaattttggcctttgttgtcattgcttttgatgtttagtcgtggaattttgcccatgcctatgtcctgaatggtattgcctaggttatcttctaggatttttatggttttaggttgcacatttaagtctttaatccaccttgagttaatttttgtataaggtgtaaggaaggggtacagtttcagttttatgcatattgctagccagtttttccagcaccatttattaaatagggaattctttctccattgcttttgtgatgtttgtcaaagatcagatggtcgtagatgtgtggcattatttctgaggcttctgttctgttccactggtctatatatctgttttggtaccagtaccatgctgtttttgttactgtagccttgtagtatagcttgaagtcaggtagcatcatgcctccagctttgttctttttgtttaggattgtcttggctatatgggctcttttttgattccatatgacatttaaagtagttttttctaattctttgaaaaaagtcagtggtagcttgatggggatagcattgaatctataaattactttgggcagtatggccattttaaagatattgattctttctatctatgagcatggaatgtttttccatttgtttgtgtcctctcttatttccttgagcagtgagtggtttgtagctctccttgaagaggttcttcacatcccttataagttgtatttctaggtattttattttattctctttgcagcaattgtgaatgggagttcacccatgatttggctctctgcttgtctattattggtgtataggaatgcttgtgatttttgcacactgattttgtatcttgagactttgctgaagctgtttatcagcttaagattttgggctgagatgacagggtcttctaaatatacaatcatgtcatctgcaaacagagacaatttgacttcctctcttcctatttgaatatgctttatttctttctcttgcctgattgtcctggcgagaacttccaatactatgttgagtaagagtggcgagagggcatccttgtcttgtgccggttttcaaagcaaatgatttttaaatttccgtcttgatttcattgttgacccaatgatcattcaggagcaggttatttaatttccctgtatttgcatggttttgaaggttccttttgtagttgatttccaattttattctactgtggtctgagagagtgcttgatataatttcaatttttaaaaatttattgaggcttgttttgtggcatatcatatggcctatcttggagaaagttccatgtgctgatgaatagaatgtgtattctgcagttgttgggtagaatgtcctgtaaatatctgttaagtccatttgttctttaaatccattgtttctttgtagactgtcttgatgacctgcctagtgcagtcagtggagtattgaagtcccccactattattatgttgctgtctagtagtaattgttttataaatttgggatctccagtattagatgcatatatattaagaattgtaatattctcccattggacaagggcttttatcattatatgatgtccctctttgtcttttttaactgctgtttctttaaagtttgttttgtctgacataagaatagctgctttggctcgcttttggtgtccatttgtgtggaatgtcattttccacccctttaccttaagtttatgtgagtccttatgtgttaggtgagtctcctgaaggcggcagataactggttggtgaattctattcattctgcaattctgtatcttttaagtggagcatttagtccatttacattcaacatcagtattgaggtgtgaggtgactattccattcttcgtggtatttgttgcctgtgtatctttttatctgtatttttgttgtatatgtcctatgggatttatgctttaaagaggttctgttttgatgtgcttccagggtttatttcaagatttagagctccttttatcattcttgtagtgttggcttggtagtgccgaattctctcagcatttgtttttctgaaaaacactgtgtattttcttcatttgtgaagcttagtttcactggatataaaattcttggctgataattgttttgtttaagaaggctgaagatagggccatattcacttctagcttttacggtttctgctgagaaatctgctgttaatctgataggttttctttcataggttacctggtagtttcacctcacagctcttaagattctctttgtctttagataactttggatactctgatgacaatgtacctaggcaatgatatttttgcaatgaatttcccaggtgtttattgagcttctttgtatttggatatctaggtctctagcaaggagggggaagttttccttgattatttccatggacaagttttccaaacttttagatttctcttctttctcaggaatgctgattattcttaggtttgattgtttaacataatcccagatttcttggaggctttgttcatattttcttattcttttttctttgtctttgttggattgggtaattcaaaaactttgtcttcaagctctgaatttcttctgcttggattctattgctgagactttctagagcattttgcatttctataagtgcatccattcatccattgtttcctgaagttttgaatgttttttatttatgctatctctttaactgaagatttctcccctcatttcttgtatcatatttttggtttttttaaaattggacttcaccttcctcggatgcctccttgattagcttaataactgaccttctgaattatttttcaggtaaatcagggatttcttcttggtttggatgcattgctggtgagctagtatgattttttggggggtgttaaagaaccttgtttttcatattaccagagttagttttctggttccttctcacttgggtaggctctgtcagagggaaagtctaggcctcaaggctgagacttttgtcccagcaggtgttcccttgatgtagcacagtcccccttttcctaggacgtggggcttcctgagagccgaactgtagtgattgttatctctcttctggatctagccacccatcaggtctaccagactccaggctggtactggggtttgtctgcacagagtcttgtgacgtgaaccatctgtgggtctctcagccatagatacaaccacctgctccaatggaggtggtagaggatgaaatgaactctgtgagggtccttacttttggttgttcaatgcactatctttttgtgctggttggcctcctgccaggaggtggcactttctagaaagcatcagcagaggcagtcaggtggtggtggctgggggggctggggcactagaactcccaagaatatatgccctttgtcttcagctactagggtgagtaaggaaggaccatcaggtgggggcaggactagtcgtgtctgagctcagagtctccttgggcaggtctttctgtggctactgtgggaggatgggggtgtagtttccaggtcaatggatttatgttcctaggacaattatggctgcctctgctgtgtcatgcaggtcatcaggaaagtgggggaaagcaagcagtcacgtgacttgcccagctcccatgcaactcaaaaggttggtctcacttccagcgtgcaccctcccccgcaacagctccgaatctgtttccatgcagtcagtgagcaaggctgagaacttgcccaggctaccagctgcgaaaccaagtagggctgtcctacttccctgccagtggagtctgcacaccaaattcatgtccccccaccaacccccccactgcccagcccctagatctggccaggtggagattttctttttcctgtctcttttcccagttcctctggcagccctcccaaatgacccctgtgaggcaaggcagaaatggcttcctaggggacccagagagcccacagggcttttcccgctgcttcctctacccctgtattttgcttggccctctaaattgactcagctccaggtaaggtcagaatcttctcctgtggtctagatcttcaggttcccagtgaggatgtgtgtttgggggtagacggtcccccttttccacttccacagtttgggcactcacaatatttggggtgtttcccgggtcctacatgagcaatctgcttctttcagagggtgtgtgcgttctctcagctttcttgaatttatttctgcaggtggttctgcaaaaaaaattcctgatgggagacttcacatgctgctctgtgcatccgagtgggagctgcaatgtacttctgctgccacccatctgccatcaccctctaatttgtcggtaatatgcatttttaatcaatctttttttctctctctctcttttcttctcccccaaaactatactgccctttgatatcaaggaatcaaggccgtgatgttgaggggtgggcagtggatacactctttaccccttagggagcatatctagatttagatattgccaattcaagataacttaattgaaagcaaattcataatgaatacacacacacacacacacatctgcatgacaagatttttaatagttgaaagaataactaataattgtccacaggcaataagggctttttaagcaaaacagttgtgataaaacaggtcattcttagaatagtaatccagccaatagtacaggttgcttagagattatgacattaccagagttaaaattcaataatggcttctcactccctaccactgaggacaagtttatgtccttaggtttatgcttccctgaaacaataccacctgctattctccactttacatatcaacggcactggttctttatctaactctctggcacagcaggagtttgttttcttctgcttcagagctttgaatttactatttcagcttctaaactttatttgcaatgccttcccatggcagactccttctgtcattttgcctctgttcgaaaactttttccttaatttcattcttagttaataatatctgaaattattttgttgtttaacttaattattaattttatgtatgttctacctagatataatcttctagaggattgttttattctctgacttatttaacttaaatgcccactacctttaaaaattatgacatttatttaacagatatttgctgaacaaatgtttgaaaatacatgggaaagaatgcttgaaaacacttgaaattgcttgtgtaaagaaacagttttatcagttaggatttaatcaatgtcagaagcaatgatataggaaaaatcgaggaataagacagttatggataaggagaaatcaacaaactcttaaaagatattgcctcaaaagcataagaggaaataagggtttatacatgacttttagaacactgcctgggtttttggataaatggggaagttgttggaaaacaggagggatcctagatattccttagtctgaggaggagcaattaagattcacttgtttagaggctgggagtggtggctcacgcctgtaatcccagaattttgggaggccaaggcaggcagatcacctgaggtcaagagttcaagaccaacctggccaacatggtgaaatcccatctctacaaaaatacaaaaattagacaggcatgatggcaagtgcctgtaatcccagctacttgggaggctgaggaaggagaattgcttgaacctggaaggcaggagttgcagtgagccgagatcataccactgcactccagcctgggtgacagaacaagactctgtctcaaaaaaaaaaaagagagattcaaaagattcacttgtttaggccttagcgggcttagacaccagtctctgacacattcttaaaggtcaggctctacaaatggaacccaaccagactctcagatatggccaaagatctatacacacccatctcacagatcccctatcttaaagagaccctaatttgggttcacctcagtctctataatctgtaccagcataccaataaaaatctttctcacccatccttagattgagagaagtcacttattattatgtgagtaactggaagatactgataagttgacaaatctttttctttcctttcttattcaacttttattttaacttccaaagaacaagtgcaatatgtgcagctttgttgcgcaggtcaacatgtatctttctggtcttttagccgcctaacactttgagcagatataagccttacacaggattatgaagtctgaaaggattccaccaatattattataattcctatcaacctgataagttaggggaaggtagagctctcctccaataagccagatttccagagtttctgacgtcataatctaccaaggtcatggatcgagttcagagaaaaaacaaaagcaaaaccaaacctaccaaaaaataaaaatcccaaagaaaaaataaagaaaaaaacagcatgaatacttcctgccatgttaagtggccaatatgtcagaaacagcactgagttacagataaagatgtctaaactacagtgacatcccagctgtcacagtgtgtggactattagtcaataaaacagtccctgcctcttaagagttgttttccatgcaaatacatgtcttatgtcttagaataagattccctaagaagtgaacctagcatttatacaagataattaattctaatccatagtatctggtaaagagcattctaccatcatctttaccgagcatagaagagctacaccaaaaccctgggtcatcagccagcacatacacttatccagtgataaatacacatcatcgggtgcctacatacatacctgaatataaaaaaaatacttttgctgagatgaaacaggcgtgatttatttcaaataggtacggataagtagatattgaagtaaggattcagtcttatattatattacataacattaatctattcctgcactgaaactgttgctttataggatttttcactacactaatgagaacttaagagataatggcctaaaaccacagagagtatattcaagaataagtatagcacttcttatttggaaaccaatgcttactaaatgagactaagacgtgtcccatcaaaaatcctggacctatgcctaaaacacatttcacaatccctgaacttttcaaaaattggtacatgctttaactttaaactacaggcctcactggagctacagacaagaaggtgaaaaacggctgacaaaagaagtcctggtatcttctatggtgggagaagaaaactagctaaagggaagaataaattagagaaaaattggaatgactgaatcggaacaaggcaaaggctataaaaaaaattaagcagcagtatcctcttgggggccccttccccacactatctcaatgcaaatatctgtctgaaacggttcctggctaaactccacccatgggttggccagccttgccttgaccaatagccttgacaaggcaaacttgaccaatagtcttagagtatccagtgaggccaggggccggcggctggctagggatgaagaataaaaggaagcacccttcagcagttccacacactcgcttctggaacgtctgaggttatcaataagctcctagtccagacgccatgggtcatttcacagaggaggacaaggctactatcacaagcctgtggggcaaggtgaatgtggaagatgctggaggagaaaccctgggaaggtaggctctggtgaccaggacaagggagggaaggaaggaccctgtgcctggcaaaagtccaggtcgcttctcaggatttgtggcaccttctgactgtcaaactgttcttgtcaatctcacaggctcctggttgtctacccatggacccagaggttctttgacagctttggcaacctgtcctctgcctctgccatcatgggcaaccccaaagtcaaggcacatggcaagaaggtgctgacttccttgggagatgccataaagcacctggatgatctcaagggcacctttgcccagctgagtgaactgcactgtgacaagctgcatgtggatcctgagaacttcaaggtgagtccaggagatgtttcagcactgttgcctttagtctcgaggcaacttagacaactgagtattgatctgagcacagcagggtgtgagctgtttgaagatactggggttgggagtgaagaaactgcagaggactaactgggctgagacccagtggcaatgttttagggcctaaggagtgcctctgaaaatctagatggacaactttgactttgagaaaagagaggtggaaatgaggaaaatgacttttctttattagatttcggtagaaagaactttcacctttcccctatttttgttattcgttttaaaacatctatctggaggcaggacaagtatggtcgttaaaaagatgcaggcagaaggcatatattggctcagtcaaagtggggaactttggtggccaaacatacattgctaaggctattcctatatcagctggacacatataaaatgctgctaatgcttcattacaaacttatatcctttaattccagatgggggcaaagtatgtccaggggtgaggaacaattgaaacatttgggctggagtagattttgaaagtcagctctgtgtgtgtgtgtgtgtgtgtgcgcgcgtgtgtttgtgtgtgtgtgagagcgtgtgtttcttttaacgttttcagcctacagcatacagggttcatggtggcaagaagataacaagatttaaattatggccagtgactagtgctgcaagaagaacaactacctgcatttaatgggaaagcaaaatctcaggctttgagggaagttaacataggcttgattctgggtggaagcttggtgtgtagttatctggaggccaggctggagctctcagctcactatgggttcatctttattgtctcctttcatctcaacagctcctgggaaatgtgctggtgaccgttttggcaatccatttcggcaaagaattcacccctgaggtgcaggcttcctggcagaagatggtgactggagtggccagtgccctgtcctccagataccactgagctcactgcccatgatgcagagctttcaaggataggctttattctgcaagcaatacaaataataaatctattctgctaagagatcacacatggttgtcttcagttcttttttttatgtctttttaaatatatgagccacaaagggttttatgttgagggatgtgtttatgtgtatttatacatggctatgtgtgtttgtgtcatgtgcacactccacacttttttgtttacgttagatgtgggttttgatgagcaaataaaagaactaggcaataaagaaacttatacatgggagcgtctgcaagtgggagtaaaaggtgcaggagaaatctggttggaagaaagacctctataggacaggactcctcagaaacagatgttttggaagagatggggaaaggttcagtgaagggggctgaacccccttccctggattgcagcacagcagcgaggaaggggctcaacgaagaaaaagtgttccaagctttaggaagtcaaggtttaggcagggatagccattctattttattaggggcaatactatttccaacggcatctggcttttctcagcccttgtgaggctctacggggaggttgaggtgttagagatcagagcaggaaacaggtttttctttccacggtaactacaatgaagtgatccttactttactaaggaactttttcattttaagtgttgacgcatgcctaaagaggtgaaattaatcccatacccttaagtctacagactggtcacagcatttcaaggaggagacctcattgtaagcttctagggaggtggggacctaggtgaaggaaatgagccagcagaagctcacaagtcagcatcagcgtgtcatgtctcagcagcagaacagcacggtcagatgaaaatatagtgtgaagaatttgtataacattaattgagaaggcagattcactggagttcttatataattgaaagttaatgcacgttaataagcaagagtttagtttaatgtgatggtgttatgaacttaacgcttgtgtctccagaaaattcacatgctgaatccccaactcccaattggctccatttgtgggggaggctttggaaaagtaatcaggtttagaggagctcatgagagcagatccccatcatagaattattttcctcatcagaagcagagagattagccatttctcttccttctggtgaggacacagtgggaagtcagccacctgcaacccaggaagagagccctgaccaggaaccagcagaaaagtgagaaaaaatcctgttgttgaagtcacccagtctatgctattttgttatagcaccttgcactaagtaaggcagatgaagaaagagaaaaaaataagcttcggtgttcagtggattagaaaccatgtttatctcaggtttacaaatctccacttgtcctctgtgtttcagaataaaataccaactctactactctcatctgtaagatgcaaatagtaagcctgatcccttctgtctaacttcgaattctattttttcttcaacgtactttaggcttgtaatgtgtttatatacagtgaaatgtcaagttctttctttatatttctttctttcttttttttcctcagcctcagagttttccacatgcccttcctaccttcaggaacttctttctccaaacgtcttctgcctggcctccattcaaatcataaaggacccacttcaaatgccatcactcactaccatttcacaattcgcactttctttctttgtcctttttttttttagtaaaacaagtttataaaaaattgaaggaataaatgaatggctacttcataggcagagtagacacaagggctactggttgccgatttttattgttatttttcaatagtatgctaaacaaggggtagattatttatgctgcccatttttagaccataaaagataacttcctgatgttgccatggcattttttttccttttaattttatttcatttcattttaatttcgaaggtacatgtgcaggatgtgcaggcttgttacatgggtaaatgtgtgtctttctggccttttagccatctgtatcaatgagcagatataagctttacacaggatcatgaaggatgaaagaatttcaccaatattataataatttcaatcaacctgatagcttaggggataaactaatttgaagatacagcttgcctccgataagccagaattccagagcttctggcattataatctagcaaggttagagatcatggatcactttcagagaaaaacaaaaacaaactaaccaaaagcaaaacagaaccaaaaaacctccataaatacttcctacccagttaatggtccaatatgtcagaaacagcactgtgttagaaataaagctgtctaaagtacactaatattcgagttataatagtgtgtggactattagtcaataaaaacaacccttgcctctttagagttgttttccatgtacacgcacatcttatgtcttagagtaagattccctgagaagtgaacctagcatttatacaagataattaattctaatccacagtacctgccaaagaacattctaccatcatctttactgagcatagaagagctacgccaaaaccctgggtcatcagccagcacacacacttatccagtggtaaatacacatcatctggtgtatacatacatacctgaatatggaatcaaatatttttctaagatgaaacagtcatgatttatttcaaataggtacggataagtagatattgaggtaagcattaggtcttatattatgtaacactaatctattactgcgctgaaactgtggtctttatgaaaattgttttcactacactattgagaaattaagagataatggcaaaagtcacaaagagtatattcaaaaagaagtatagcactttttccttagaaaccactgctaactgaaagagactaagatttgtcccgtcaaaaatcctggacctatgcctaaaacacatttcacaatccctgaacttttcaaaaattggtacatgctttagctttaaactacaggcctcactggagctacagacaagaaggtaaaaaacggctgacaaaagaagtcctggtatcctctatgatgggagaaggaaactagctaaagggaagaataaattagagaaaaactggaatgactgaatcggaacaaggcaaaggctataaaaaaaattaagcagcagtatcctcttgggggccccttccccacactatctcaatgcaaatatctgtctgaaacggtccctggctaaactccacccatgggttggccagccttgccttgaccaatagccttgacaaggcaaacttgaccaatagtcttagagtatccagtgaggccaggggccggcggctggctagggatgaagaataaaaggaagcacccttcagcagttccacacactcgcttctggaacgtctgagattatcaataagctcctagtccagacgccatgggtcatttcacagaggaggacaaggctactatcacaagcctgtggggcaaggtgaatgtggaagatgctggaggagaaaccctgggaaggtaggctctggtgaccaggacaagggagggaaggaaggaccctgtgcctggcaaaagtccaggtcgcttctcaggatttgtggcaccttctgactgtcaaactgttcttgtcaatctcacaggctcctggttgtctacccatggacccagaggttctttgacagctttggcaacctgtcctctgcctctgccatcatgggcaaccccaaagtcaaggcacatggcaagaaggtgctgacttccttgggagatgccataaagcacctggatgatctcaagggcacctttgcccagctgagtgaactgcactgtgacaagctgcatgtggatcctgagaacttcaaggtgagtccaggagatgtttcagcactgttgcctttagtctcgaggcaacttagacaactgagtattgatctgagcacagcagggtgtgagctgtttgaagatactggggttgggagtgaagaaactgcagaggactaactgggctgagacccagtggcaatgttttagggcctaaggagtgcctctgaaaatctagatggacaactttgactttgagaaaagagaggtggaaatgaggaaaatgacttttctttattagatttcggtagaaagaactttcacctttcccctatttttgttattcgttttaaaacatctatctggaggcaggacaagtatggtcgttaaaaagatgcaggcagaaggcatatattggctcagtcaaagtggggaactttggtggccaaacatacattgctaaggctattcctatatcagctggacacatataaaatgctgctaatgcttcattacaaacttatatcctttaattccagatgggggcaaagtatgtccaggggtgaggaacaattgaaacatttgggctggagtagattttgaaagtcagctctgtgtgtgtgtgtgtgtgtgtgtgtgtcagcgtgtgtttcttttaacgtcttcagcctacaacatacagggttcatggtgggaagaagatagcaagatttaaattatggccagtgactagtgcttgaaggggaacaactacctgcatttaatgggaaggcaaaatctcaggctttgagggaagttaacataggcttgattctgggtggaagctgggtgtgtagttatctggaggccaggctggagctctcagctcactatgggttcatctttattgtctcctttcatctcaacagctcctgggaaatgtgctggtgaccgttttggcaatccatttcggcaaagaattcacccctgaggtgcaggcttcctggcagaagatggtgactgcagtggccagtgccctgtcctccagataccactgagcctcttgcccatgattcagagctttcaaggataggctttattctgcaagcaatacaaataataaatctattctgctgagagatcacacatgattttcttcagctcttttttttacatctttttaaatatatgagccacaaagggtttatattgagggaagtgtgtatgtgtatttctgcatgcctgtttgtgtttgtggtgtgtgcatgctcctcatttatttttatatgagatgtgcattttgatgagcaaataaaagcagtaaagacacttgtacacgggagttctgcaagtgggagtaaatggtgttggagaaatccggtgggaagaaagacctctataggacaggacttctcagaaacagatgttttggaagagatgggaaaaggttcagtgaagacctgggggctggattgattgcagctgagtagcaaggatggttcttaatgaagggaaagtgttccaagctttaggaattcaaggtttagtcaggtgtagcaattctattttattaggaggaatactatttctaatggcacttagcttttcacagcccttgtggatgcctaagaaagtgaaattaatcccatgccctcaagtgtgcagattggtcacagcatttcaagggagagacctcattgtaagactctgggggaggtggggacttaggtgtaagaaatgaatcagcagaggctcacaagtcagcatgagcatgttatgtctgagaaacagaccagcactgtgagatcaaaatgtagtgggaagaatttgtacaacattaattggaaggtttacttaatggaatttttgtatagttggatgttagtgcatctctataagtaagagtttaatatgatggtgttacggacctggtgtttgtgtctcctcaaaattcacatgctgaatccccaactcccaactgaccttatctgtgggggaggcttttgaaaagtaattaggtttagctgagctcataagagcagatccccatcataaaattattttccttatcagaagcagagagacaagccatttctctttcctcccggtgaggacacagtgagaagtccgccatctgcaatccaggaagagaaccctgaccacgagtcagccttcagaaatgtgagaaaaaactctgttgttgaagccacccagtcttttgtattttgttatagcaccttacactgagtaaggcagatgaagaaggagaaaaaaataagcttgggttttgagtgaactacagaccatgttatctcaggtttgcaaagctcccctcgtcccctatgtttcagcataaaatacctactctactactctcatctataagacccaaataataagcctgcgcccttctctctaactttgatttctcctatttttacttcaacatgctttactctagccttgtaatgtctttacatacagtgaaatgtaaagttctttattctttttttctttctttcttttttctcctcagcctcagaatttggcacatgcccttccttctttcaggaacttctccaacatctctgcctggctccatcatatcataaaggtcccacttcaaatgcagtcactaccgtttcaggatatgcactttctttcttttttgttttttgttttttttaagtcaaagcaaatttcttgagagagtaaagaaataaacgaatgactactgcataggcagagcagccccgagggccgctggttgttccttttatggttatttcttgatgatatgttaaacaagttttggattatttatgccttctctttttaggccatatagggtaactttctgacattgccatggcatgtttcttttaatttaatttactgttaccttaaattcaggggtacacgtacaggatatgcaggtttgttttataggtaaaagtgtgccatggttttaatgggttttttttttcttgtaaagttgtttaagtttcttgtttactctggatattggcctttgtcagaagaatagattggaaaatctttttcccattctgtagattgtctttcgctctgatggtagtttcttttgctgagcaggagctctttagtttaattagattccattggtcaatttttgcttttgctgcaattgcttttcacgctttcatcatgaaatctgtgcccgtgtttatatcatgaatagtattgccttgatttttttctaggctttttatagtttggggtttttcatttaagtctctaatccatccggagttaattttggataaggtataaggaaggagtccagtttcatttttcagcatatggctagccagttctcccccatcatttattaaattgaaaatcctttccccattgcttgcttttgtcaggtttctaaaagacagatggttgtaggtacaatatgcagtttcttcaagtcatataataccatctgaaatctcttattaattcatttcttttagtatgtatgctggtctcctctgctcactatagtgagggcaccattagccagagaatctgtctgtctagttcatgtaagattctcagaattaagaaaaatggatggcatatgaatgaaacttcatggatgacatatggaatctaatgtgtatttgttgaattaatgcataagatgcaacaagggaaaggttgacaactgcagtgataacctggtattgatgatataagagtctatagatcacagtagaagcaataatcatggaaaacaattggaaatggggaacagccacaaacaagaaagaatcaatactaccaggaaagtgactgcaggtcacttttcctggagcgggtgagagaaaagtggaagttgcagtaactgccgaattcctggttggctgatggaaagatggggcaactgttcactggtacgcagggttttagatgtatgtacctaaggatatgaggtatggcaatgaacagaaattcttttgggaatgagttttagggccattaaaggacatgacctgaagtttcctctgaggccagtccccacaactcaatataaatgtgtttcctgcatatagtcaaagttgccacttctttttcttcatatcatcgatctctgctcttaaagataatcttggttttgcctcaaactgtttgtcactacaaactttccccatgttcctaagtaaaacaggtaactgcctctcaactatatcaagtagactaaaatattgtgtctctaatatcagaaattcagctttaatatattgggtttaactctttgaaatttagagtctccttgaaatacacatgggggtgatttcctaaactttatttcttgtaaggatttatctcaggggtaacacacaaaccagcatcctgaacctctaagtatgaggacagtaagccttaagaatataaaataaactgttcttctctctgccggtggaagtgtgccctgtctattcctgaaattgcttgtttgagacgcatgagacgtgcagcacatgagacacgtgcagcagcctgtggaatattgtcagtgaagaatgtctttgcctgattagatataaagacaagttaaacacagcattagactatagatcaagcctgtgccagacacaaatgacctaatgcccagcacgggccacggaatctcctatcctcttgcttgaacagagcagcacacttctcccccaacactattagatgttctggcataattttgtagatatgtaggatttgacatggactattgttcaatgattcagaggaaatctcctttgttcagataagtacactgactactaaatggattaaaaaacacagtaataaaacccagttttccccttacttccctagtttgtttcttattctgctttcttccaagttgatgctggatagaggtgtttatttctattctaaaaagtgatgaaattggccgggcgcggtggctcacacctgtaatcccagcactttgggaggctgaggtgggcggatcacgaggtcaggagatcaagaccatcctggctaacatggtgaaaccccatctctactaaaaatacaaaaaattagccagagacggtggcgggtgcctgtagtcccagctactcgggaggctgaggcaggagaatggcgtgaacctgggaggcagagctgcagtgagcagagatcgcgccactgcacactccagcctgggtgacaaagcgagactccatctcaaaaaaaaaaaaaaaaaaaaaaagaaagaaagaaagaaaaaaaaagtgatgaaattgtgtattcaatgtagtctcaagagaattgaaaaccaagaaaggctgtggcttcttccacataaagcctggatgaataacaggataacacgttgttacattgtcacaactcctgatccaggaattgatggctaagatattcgtaattcttatccttttcagttgtaacttattcctatttgtcagcattcaggttattagcggctgctggcgaagtccttgagaaataaactgcacactggatggtgggggtagtgtaggaaaatggaggggaaggaagtaaagtttcaaattaagcctgaacagcaaagttcccctgagaaggccacctggattctatcagaaactcgaatgtccatcttgcaaaacttccttgcccaaaccccacccctggagtcacaacccacccttgaccaatagattcatttcactgagggaggcaaagggctggtcaatagattcatttcactgggagaggcaaagggctgggggccagagaggagaagtaaaaagccacacatgaagcagcaatgcaggcatgcttctggctcatctgtgatcaccaggaaactcccagatctgacactgtagtgcatttcactgctgacaagaaggctgctgccaccagcctgtgaagcaaggttaaggtgagaaggctggaggtgagattctgggcaggtaggtactggaagccgggacaaggtgcagaaaggcagaaagtgtttctgaaagagggattagcccgttgtcttacatagtctgactttgcacctgctctgtgattatgactatcccacagtctcctggttgtctacccatggacctagaggtactttgaaagttttggatatctgggctctgactgtgcaataatgggcaaccccaaagtcaaggcacatggcaagaaggtgctgatctccttcggaaaagctgttatgctcacggatgacctcaaaggcacctttgctacactgagtgacctgcactgtaacaagctgcacgtggaccctgagaacttcctggtgagtagtaagtacactcacgctttcttctttacccttagatatttgcactatgggtacttttgaaagcagaggtggctttctcttgtgttatgagtcagctatgggatatgatatttcagcagtgggattttgagagttatgttgctgtaaataacataactaaaatttggtagagcaaggactatgaataatggaaggccacttaccatttgatagctctgaaaaacacatcttataaaaaattctggccaaaatcaaactgagtgttttggatgagggaacagaagttgagatagagaaaataacatctttcctttggtcagcgaaattttctataaaaattaatagtcacttttctgcatagtcctggaggttagaaaaagatcaactgaacaaagtagtgggaagctgttaaaagaggattgtttccctccgaatgatgatggtatacttttgtacgcatggtacaggattctttgttatgagtgtttgggaaaattgtatgtatgtatgtatgtatgtgatgactggggacttatcctatccattactgttccttgaagtactattatcctactttttaaaaggacgaagtctctaaaaaaaaaatgaaacaatcacaatatgttggggtagtgagttggcatagcaagtaagagaaggataggacacaatgggaggtgcagggctgccagtcatattgaagctgatatctagcccataatggtgagagttgctcaaactctggtcaaaaaggatgtaagtgttatatctatttactgcaagtccagcttgaggccttctattcactatgtaccattttcttttttatcttcactccctccccagctcttaggcaacgtgatattgattgttttggcaacccacttcagcgaggattttaccctacagatacaggcttcttggcagtaactaacaaatgctgtggttaatgctgtagcccacaagaccactgagttccctgtccactatgtttgtacctatgtcccaaaatctcatctcctttagatgggggaggttggggagaagagcagtatcctgcctgctgattcagttcctgcatgataaaaatagaataaagaaatatgctctctaagaaatatcattgtactctttttctgtctttatattttaccctgattcagccaaaaggacgcactatttctgatggaaatgagaatgttggagaatgggagtttaaggacagagaagatactttcttgcaatcctgcaagaaaagagagaactcgtgggtggatttagtggggtagttactcctaggaaggggaaatcgtctctagaataagacaatgtttttacagaaagggaggtcaatggaggtactctttggaggtgtaagaggattgttggtagtgtgtagaggtatgttaggactcaaattagaagttctgtataggctattatttgtatgaaactcaggatatagctcatttggtgactgcagttcacttctacttattttaaacaacatattttttatgatttataatgaagtggggatggggcttcctagagaccaatcaagggccaaaccttgaactttctcttaacgtcttcaatggtattaatagagaattatctctaaggcatgtgaactggctgtcttggttttcatctgtacttcatctgctacctctgtgacctgaaacatatttataattccattaagctgtgcatatgatagatttatcatatgtattttccttaaaggatttttgtaagaactaattgaattgatacctgtaaagtctttatcacactacccaataaataataaatctctttgttcagctctctgtttctataaatatgtacaagttttattgtttttagtggtagtgattttattctctttctatatatatacacacacatgtgtgcattcataaatatatacaatttttatgaataaaaaattattagcaatcaatattgaaaaccactgatttttgtttatgtgagcaaacagcagattaaaaggctgagatttaggaaacagcacgttaagtcaagttgatagaggagaatatggacatttaaaagaggcaggatgatataaaattagggaaactggatgcagagaccagatgaagtaagaaaaatagctatcgttttgagcaaaaatcactgaagtttcttgcatatgagagtgacataataaatagggaaacgtagaaaattgattcacatgtatatatatatatagaactgattagacaaagtctaacttgggtatagtcagaggagcttgctgtaattatattgaggtgatggataaagaactgaagttgatggaaacaatgaagttaagaaaaaaaatcgagtaagagaccattgtggcagtgattgcacagaactggaaaacattgtgaaacagagagtcagagatgacagctaaaatccctgtctgtgaatgaaaagaaggaaatttattgacagaacagcaaatgcctacaagccccctgtttggatctggcaatgaacgtagccattctgtggcaatcacttcaaactcctgtacccaagacccttaggaagtatgtagcaccctcaaacctaaaacctcaaagaaagaggttttagaagatataataccctttcttctccagtttcattaatcccaaaacctctttctcaaagtatttcctctatgtgtccaccccaaagagctcacctcaccatatctcttgagtgggagcacatagataggcggtgctaccatctaacagcttctgaaattcctttgtcatatttttgagtccccactaataacccacaaagcagaataaataccagttgctcatgtacaataatcactcaactgctgtcttgtagcatacattaattaagcacattctttgaataattactgtgtccaaacaatcacactttaaaatctcacacttgtgctatcccttgcccttctgaatgtcactctgtattttaaatgaagagatgagggttgaatttcctgtgttacttattgttcatttctcgatgaggagttttcacattcacctttactggaaaacacataagtacacatcttacaggaaaaatataccaaactgacatgtagcatgaatgcttgtgcatgtagtcatataaaatcttgtagcaatgtaaacattctctgatatacacatacagatgtgtctatatgtctacacaatttcttatgctccatgaacaaacattccatgcacacataagaacacacactgttacagatgcatacttgagtgcattgacaaaattaccccagtcaatctagagaatttggatttctgcatttgactctgttagctttgtacatgctgttcatttactctgggtgatgtctttccctcattttgccttgtctatcttgtactcatactttaagtcctaacttatatgttatctcaactaagaagctatttttttttaattttaactgggcttaaagccctgtctataaactctgctacaattatgggctctttcttataatatttagtgtttttcctactaatgtacttaatctgctcattgtatattcctaccactaaattttaacctcttttatggtagagacattgtcttgtaaactcttatttccctagtatttggagatgaaaaaaaagattaaattatccaaaattagatctctcttttctacattatgagtattacactatccatagggaagtttgtttgagacctaaactgaggaacctttggttctaaaatgactatgtgatatcttagtatttataggtcatgaggttccttcctctgcctctgctatagtttgattagtcagcaagcatgtgtcatgcatttattcacatcagaatttcatacactaataagacatagtatcagaagtcagtttattagttatatcagttagggtccatcaaggaaaggacaaaccattatcagttactcaacctagaattaaatacagctcttaatagttaattatccttgtattggaagagctaaaatatcaaataaaggacagtgcagaaatctagatgttagtaacatcagaaaacctcttccgccattaggcctagaagggcagaaggagaaaatgtttataccaccagagtccagaaccagagcccataaccagaggtccactggattcagtgagctagtgggtgctccttggagagagccagaactgtctaatgggggcatcaaagtatcagccataaaaaaccataaaaaagactgtctgctgtaggagatccgttcagagagagagagagaccagaaataatcttgcttatgctttccctcagccagtgtttaccattgcagaatgtacatgcgactgaaagggtgaggaaacctgggaaatgtcagttcctcaaatacagagaacactgagggaaggatgagaaataaatgtgaaagcagacatgaatggtaattgacagaaggaaactaggatgtgtccagtaaatgaataattacagtgtgcagtgattattgcaatgattaatgtattgataagataatatgaaaacacagaattcaaacagcagtgaactgagattagaattgtggagagcactggcatttaagaatgtcacacttagaatgtgtctctaggcattgttctgtgcatatatcatctcaatattcattatctgaaaattatgaattaggtacaaagctcaaataatttattttttcaggttagcaagaactttttttttttttttttctgagatggagcattgctatggttgcccaggctggagtgcaatggcatgatccaggctcactgcaacatctgcctcccaggttcaagcgattctcctgcctcagcctcccaagtagctggcattacaggcatgtgccaccaccatgcctggctaattttctatttttagtagatagggggtttcaccatgttggtcaggctgatctcgaactcctaacatcaggtgatccaccctcctcggcctctgaatgtactgggatcacaggcgtgagccaccacacccagccaagaatgtgaattttgtagaaggatataacccatatttctctgaccctagagtccttagtatacctcccataccatgtggctcatcctccttacatacatttcccatctttcaccctaccttttcctttttgtttcagcttttcactgtgtgtcaaaatctagaaccttatctcctacctgctctgaaaccaacagcaagttgacttccattctaacccacattggcattacactaattaaaatcgatactgagttctaaaatcatctgggattttggggactatgtcttacttcatacttccttgagatttcacattaaatgttggtgttcattaaaggtccttcatttaactttgtattcatcacactcttggattcacagttatatctaaactcttatatatagcctgtataatcccaattcccaagtctgatttctaacctctgacctccaacctcagtgccaaacccatatatcaaacaatgtactgggcttatttatatagatgtcctataggcacctcagactcagcatgggtatttcacttgttatactaaaactgtttctcttccagtgttttccattttagtcattagatagctacttgcccattcaccaaggtcacagattaaaatcatttccctacctctaatcaacagttcaattctgcttcaatttgtccctatctattaatcaccactcttactgcccagtcaggtcctcattgtttcctgaacaagagtagatgctattctttccactttaagaccttatcctggctggatgcggtggctcaggcttgtaaacccagcactttgggaggccgaggcaggcagatcacttgaggtcaggagttcaagaccagcctgaccaacatggtgaaaccccatctctactaaaaatacaaaatcagccgggcgtgtggtgcatgcctgcagtcccagctattcaggtggctgaggcaggagaattgcttgaacccaggaggcggaggttgcggtgagcctagattgcaccattgcactctagcttgggcaatagggatgaaactccatctcagaagagaaaagaaaaaaagaccttattctgttacacaaatcctctcaatgcaatccatatagaataaacatgtaaccagatctcccaatgtgtaaaatcatttcaggtagaacagaattaaagtgaaaagccaagtctttggaattaacagacaaagttcaaataacagtcctcatggccttaagaatttacctaacattttttttagaatcaattttcttatatatgaattggaaacataattcctccctcacaaacacattctaagattttaaggagatattgatgaagtacatcatctgtcatttttaacagttagtggtagtgattcacacagcacattatgatctgttcttgtatgttctgttccattctgtattcttgacctggttgtattctttctgagctccagatccacatatctaagtacatctttttgcattttacaagagtgcatacaatacaatgtatccaagactgtatttctgattttatcgtaccactaaactcacaaatgtggccctattcttgtgttcacgactgacatcaccgtcatggtccaagtctgataatagaaatggcattgtcactttcttccctactgcaacagaagcccagctatttgtctcccattttctctacttctaaaatacatttcttcactaagtgagaataatcttttaaagacacaaatcaaaccatgccaccacctttcttgaattattcaatatctttcgttggcttccaggttacagaaaaataacttgtaacaaagtttaaaggtcattcatggctcctctctaccctattttataacatttccccttgtgatcagaatctcaggcacatcatccatctttctatatacaaataaagtcatatagtttgaactcacctctggttacttttaatcaaccaaatgctgtaaaatgcatttgtatcgctacgtgttaagcagtagttgattcttttcatttcttgttaatattctattctttgactataccgtaatttatcaattctactgttggtaagcatttaagtggctaccggtttgaggtttttatgattattgctgtcataagcatttctatacatgtctttggatacacacatgcatgtgtttctgaatatctaaaaatgtaattgctaggtaatagacttatcaagcatccagcatttgtggatactattaaaggttttccaaaggggttatactattgtacagtgtcaccaacagagtttgagtttctattgatccatatcaccaccaaaatttgaactgtcagtcttatctcttctcttgtctcttttttcctcttttttttccttcccttcccctctcttcgtttcttttctctcctcttctcttctttcctctcttcccttccctttctctttctcttccctatcccttctcctctcctctcccctccttttttctcctctcctctccattatttatttttccttcttctcctccatcccttccatcctctctcttcccctcttccttccttcctttctccatttcttcctcctctttccctcaatccttccttttggatatgctcatgggtgtgtatttgtctgccattgtggcattatttgaattcagaaaagagtgaaaaactactgggatcttcattctgggtctaattccacatttttttttaagaacacactctgtaaaaatgttctgtactagcatattcccaggaacttcgttaaatttaatctggctgaatatggtaaatctactttgcactttgcattctttctttagtcataccataattttaaacattcaaaatatttgtatataatatttgattttatctgtcattaaaatgttaaccttaaaattcatgtttccagaacctatttcaataactggtaaataaacactattcattttttaaatattcttttaatggatatttatttcaatataataaaaaattagagttttattataggaagaatttaccaaaagaaggaggaagcaagcaagtttaaactgcagcaatagttgtccattccaacctctcaaaattcccttggagacaaaatctctagaggcaaagaagaactttatattgagtcaacttgttaaaacatctgcttttagataagttttcttagtataaagtgacagaaacaaataagttaaactctaagatacattccactatattagcctaaaacacttctgcaaaaatgaaactaggaggatatttttagaaacaactgctgaaagagatgcggtggggagatatgcagaggagaacagggtttctgagtcaagacacacatgacagaacagccaatctcagggcaagttaagggaatagtggaatgaaggttcatttttcattctcacaaactaatgaaaccctgcttatcttaaaccaacctgctcactggagcagggaggacaggaccagcataaaaggcagggcagagtcgactgttgcttacactttcttctgacataacagtgttcactagcaacctcaaacagacaccatggtgcatctgactcctgaggagaagactgctgtcaatgccctgtggggcaaagtgaacgtggatgcagttggtggtgaggccctgggcaggttggtatcaaggttataagagaggctcaaggaggcaaatggaaactgggcatgtgtagacagagaagactcttgggtttctgataggcactgactctctgtcccttgggctgttttcctaccctcagattactggtggtctacccttggacccagaggttctttgagtcctttggggatctgtcctctcctgatgctgttatgggcaaccctaaggtgaaggctcatggcaagaaggtgctaggtgcctttagtgatggcctggctcacctggacaacctcaagggcactttttctcagctgagtgagctgcactgtgacaagctgcacgtggatcctgagaacttcagggtgagtccaggagatgcttcacttttctctttttactttctaatcttacattttggttcttttacctacctgctcttctcccacatttttgtcattttactatattttatcatttaatgcttctaaaattttgttaattttttatttaaatattctgcattttttccttcctcacaatcttgctattttaaattatttaatatcctgtctttctctcccaaccccctcccttcatttttccttctctaacaacaactcaaattatgcataccagctctcacctgctaattctgcacttagaataatccttttgtctctccacatgggtatgggagaggctccaactcaaagatgagaggcatagaatactgttttagaggctataaatcattttacaataaggaataattggaattttataaattctgtagtaaatggaatggaaaggaaagtgaatatttgattatgaaagactaggcagttacactggaggtggggcagaagtcgttgctaggagacagcccatcatcacactgattaatcaattaatttgtatctattaatctgtttatagtaattaatttgtatatgctatatacacatacaaaattaaaactaatttggaattaatttgtatatagtattatacagcatatatagcatatatgtacatatatagactacatgctagttaagtacatagaggatgtgtgtgtatagatatatgttatatgtatgcattcatatatgtacttatttatgctgatgggaataacctggggatcagttttgtctaagatttgggcagaaaaaaatgggtgttggctcagtttctcagaagccagtctttatttctctgttaaccatatgcatgtatctgcctacctcttctccgcagctcttgggcaatgtgctggtgtgtgtgctggcccgcaactttggcaaggaattcaccccacaaatgcaggctgcctatcagaaggtggtggctggtgtggctaatgccctggctcacaagtaccattgagatcctggactgtttcctgataaccataagaagaccctatttccctagattctattttctgaacttgggaacacaatgcctacttcaagggtatggcttctgcctaataaagaatgttcagctcaacttcctgattaatttcacttatttcatttttttgtccaggtgtgtaagaaggttcctgaggctctacagatagggagcacttgtttattttacaaagagtacatgggaaaagagaaaagcaagggaaccgtacaaggcattaatgggtgacacttctacctccaaagagcagaaattatcaagaactcttgatacaaagataatactggcactgcagaggttctagggaagacctcaaccctaagacatagcctcaagggtaatagctacgattaaactccaacaattactgagaaaataatgtgctcaattaaaggcataatgattactcaagacaatgttatgttgtctttcttcctccttcctttgcctgcacattgtagcccataatactataccccatcaagtgttcctgctccaagaaatagcttcctcctcttacttgccccagaacatctctgtaaagaatttcctcttatcttcccatatttcagtcaagattcattgctcacgtattacttgtgacctctcttgaccccagccacaataaacttctctatactacccaaaaaatctttccaaaccctccccgacaccatatttttatatttttcttatttatttcatgcacacacacacactccgtgctttataagcaattctgcctattctctaccttcttacaatgcctactgtgcctcatattaaattcatcaatgggcagaaagaaaatatttattcaagaaaacagtgaatgaatgaacgaatgagtaaatgagtaaatgaaggaatgattattccttgctttagaacttctggaattagaggacaatattaataataccatcgcacagtgtttctttgttgttaatgctacaacatacaaagaggaagcatgcagtaaacaaccgaacagttatttcctttctgatcataggagtaatatttttttccttgagcacatttttgccataggtaaaattagaaggatttttagaactttctcagttgtatacatttttaaaaatctgtattatatgcatgttgattaattttaaacttacttgaatacctaaacagaatctgttgtttccttgtgtttgaaagtgctttcacagtaactctgtctgtactgccagaatatactgacaatgtgttatagttaactgttttgatcacaacattttgaattgactggcagcagaagctctttttatatccatgtgttttccttaagtcattatacatagtaggcatgagactctttatactgaataagatatttaggaaccactggtttacatatcagaagcagagctactcagggcattttggggaagatcactttcacattcctgagcatagggaagttctcataagagtaagatattaaaaggagatacttgtgtggtattcgaaagacagtaagagagattgtagaccttatgatcttgatagggaaaacaaactacattcctttctccaaaagtcaaaaaaaaagagcaaatatagcttactataccttctattcctacaccattagaagtagtcagtgagtctaggcaagatgttggccctaaaaatccaaataccagagaattcatgagaacatcacctggatgggacatgtgccgagcaacacaattactatatgctaggcattgctatcttcatattgaagatgaggaggtcaagagatgaaaaaagacttggcaccttgttgttatattaaaattatttgttagagtagagcttttgtaagagtctaggagtgtgggagctaaatgatgatacacatggacacaaagaatagatcaacagacacccaggcctacttgagggttgagggtgggaagagggagacgatgaaaaagaacctattgggtattaagttcatcactgagtgatgaaataatctgtacatcaagacccagtgatatgcaatttacctatataacttgtacatgtacccccaaatttaaaataaagttaaaacaaagtataggaatggaattaattcctcaagatttggctttaattttatttgataatttatcaaatggttgtttttcttttctcactatggcgttgctttataaactatgttcagtatgtctgaatgaaagggtgtgtgtgtgtgtgaaagagagggagagaggaagggaagagaggacgtaataatgtgaatttgagttcatgaaaatttttcaataaaataatttaatgtcaggagaattaagcctaatagtctcctaaatcatccatctcttgagcttcagagcagtcctctgaattaatgcctacatgtttgtaaagggtgttcagactgaagccaagattctacctctaaagagatgcaatctcaaatttatctgaagactgtacctctgctctccataaattgacaccatggcccacttaatgaggttaaaaaaaagctaattctgaatgaaaatctgagcccagtggaggaaatattaatgaacaaggtgcagactgaaatataaattttctgtaataattatgcatatactttagcaaagttctgtctatgttgactttattgcttttggtaagaaatacaactttttaaagtgaactaaactatcctatttccaaactattttgtgtgtgtgcggtttgtttctatgggttctggttttcttggagcatttttatttcattttaattaattaattctgagagctgctgagttgtgtttactgagagattgtgtatctgcgagagaagtctgtagcaagtagctagactgtgcttgacctaggaacatatacagtagattgctaaaatgtctcacttggggaattttagactaaacagtagagcatgtataaaaatactctagtcaagtgctgcttttgaaacaaatgataaaaccacactcccatagatgagtgtcatgattttcatggaggaagttaatattcatcctctaagtatacccagactagggccattctgatataaaacattaggacttaagaaagattaatagactggagtaaaggaaatggacctctgtctctctcgctgtctcttttttgaggacttgtgtgtgtgtgtgtgtgtgtgtgtgtgtgtgttgtggtcagtggggctggaataaaagtagaatagacctgcacctgctgtggcatccattcacagagtagaagcaagctcacaatagtgaagatgtcagtaagcttgaatagtttttcaggaactttgaatgctgatttagatttgaaactgaggctctgaccataaccaaatttgcactatttattgcttcttgaaacttatttgcctggtatgcctgggcttttgatggtcttagtatagcttgcagccttgtccctgcagggtattatgggtaatagaaagaaaagtctgcgttacactctagtcacactaagtaactaccattggaaaagcaacccctgccttgaagccaggatgatggtatctgcagcagttgccaacacaagagaaggatccatagttcatcatttaaaaaagaaaacaaaatagaaaaaggaaaactatttctgagcataagaagttgtagggtaagtctttaagaaggtgacaatttctgccaatcaggatttcaaagctcttgctttgacaattttggtctttcagaatactataaatataacctatattataatttcataaagtctgtgcattttctttgacccaggatatttgcaaaagacatattcaaacttccgcagaacactttatttcacatatacatgcctcttatatcagggatgtgaaacagggtcttgaaaactgtctaaatctaaaacaatgctaatgcaggtttaaatttaataaaataaaatccaaaatctaacagccaagtcaaatctgtatgttttaacatttaaaatattttaaagacgtcttttcccaggattcaacatgtgaaatcttttctcagggatacacgtgtgcctagatcctcattgctttagttttttacagaggaatgaatataaaaagaaaatacttaaattttatccctcttacctctataatcatacataggcataattttttaacctaggctccagatagccatagaagaaccaaacactttctgcgtgtgtgagaataatcagagtgagattttttcacaagtacctgatgagggttgagacaggtagaaaaagtgagagatctctatttatttagcaataatagagaaagcatttaagagaataaagcaatggaaataagaaatttgtaaatttccttctgataactagaaatagaggatccagtttcttttggttaacctaaattttatttcattttattgttttattttattttattttattttattttgtgtaatcgtagtttcagagtgttagagctgaaaggaagaagtaggagaaacatgcaaagtaaaagtataacactttccttactaaaccgactgggtttccaggtaggggcaggattcaggatgactgacagggcccttagggaacactgagaccctacgctgacctcataaatgcttgctacctttgctgttttaattacatcttttaatagcaggaagcagaactctgcacttcaaaagtttttcctcacctgaggagttaatttagtacaaggggaaaaagtacagggggatgggagaaaggcgatcacgttgggaagctatagagaaagaagagtaaattttagtaaaggaggtttaaacaaacaaaatataaagagaaataggaacttgaatcaaggaaatgattttaaaacgcagtattcttagtggactagaggaaaaaaataatctgagccaagtagaagaccttttcccctcctacccctactttctaagtcacagaggctttttgttcccccagacactcttgcagattagtccaggcagaaacagttagatgtccccagttaacctcctatttgacaccactgattaccccattgatagtcacactttgggttgtaagtgactttttatttatttgtatttttgactgcattaagaggtctctagttttttatctcttgtttcccaaaacctaataagtaactaatgcacagagcacattgatttgtatttattctatttttagacataatttattagcatgcatgagcaaattaagaaaaacaacaacaaatgaatgcatatatatgtatatgtatgtgtgtatatatacacatatatatatatattttttttcttttcttaccagaaggttttaatccaaataaggagaagatatgcttagaactgaggtagagttttcatccattctgtcctgtaagtattttgcatattctggagacgcaggaagagatccatctacatatcccaaagctgaattatggtagacaaagctcttccacttttagtgcatcaatttcttatttgtgtaataagaaaattgggaaaacgatcttcaatatgcttaccaagctgtgattccaaatattacgtaaatacacttgcaaaggaggatgtttttagtagcaatttgtactgatggtatggggccaagagatatatcttagagggagggctgagggtttgaagtccaactcctaagccagtgccagaagagccaaggacaggtacggctgtcatcacttagacctcaccctgtggagccacaccctagggttggccaatctactcccaggagcagggagggcaggagccagggctgggcataaaagtcagggcagagccatctattgcttacatttgcttctgacacaactgtgttcactagcaacctcaaacagacaccatggtgcacctgactcctgaggagaagtctgccgttactgccctgtggggcaaggtgaacgtggatgaagttggtggtgaggccctgggcaggttggtatcaaggttacaagacaggtttaaggagaccaatagaaactgggcatgtggagacagagaagactcttgggtttctgataggcactgactctctctgcctattggtctattttcccacccttaggctgctggtggtctacccttggacccagaggttctttgagtcctttggggatctgtccactcctgatgctgttatgggcaaccctaaggtgaaggctcatggcaagaaagtgctcggtgcctttagtgatggcctggctcacctggacaacctcaagggcacctttgccacactgagtgagctgcactgtgacaagctgcacgtggatcctgagaacttcagggtgagtctatgggacccttgatgttttctttccccttcttttctatggttaagttcatgtcataggaaggggagaagtaacagggtacagtttagaatgggaaacagacgaatgattgcatcagtgtggaagtctcaggatcgttttagtttcttttatttgctgttcataacaattgttttcttttgtttaattcttgctttctttttttttcttctccgcaatttttactattatacttaatgccttaacattgtgtataacaaaaggaaatatctctgagatacattaagtaacttaaaaaaaaactttacacagtctgcctagtacattactatttggaatatatgtgtgcttatttgcatattcataatctccctactttattttcttttatttttaattgatacataatcattatacatatttatgggttaaagtgtaatgttttaatatgtgtacacatattgaccaaatcagggtaattttgcatttgtaattttaaaaaatgctttcttcttttaatatacttttttgtttatcttatttctaatactttccctaatctctttctttcagggcaataatgatacaatgtatcatgcctctttgcaccattctaaagaataacagtgataatttctgggttaaggcaatagcaatatttctgcatataaatatttctgcatataaattgtaactgatgtaagaggtttcatattgctaatagcagctacaatccagctaccattctgcttttattttatggttgggataaggctggattattctgagtccaagctaggcccttttgctaatcatgttcatacctcttatcttcctcccacagctcctgggcaacgtgctggtctgtgtgctggcccatcactttggcaaagaattcaccccaccagtgcaggctgcctatcagaaagtggtggctggtgtggctaatgccctggcccacaagtatcactaagctcgctttcttgctgtccaatttctattaaaggttcctttgttccctaagtccaactactaaactgggggatattatgaagggccttgagcatctggattctgcctaataaaaaacatttattttcattgcaatgatgtatttaaattatttctgaatattttactaaaaagggaatgtgggaggtcagtgcatttaaaacataaagaaatgaagagctagttcaaaccttgggaaaatacactatatcttaaactccatgaaagaaggtgaggctgcaaacagctaatgcacattggcaacagccctgatgcctatgccttattcatccctcagaaaaggattcaagtagaggcttgatttggaggttaaagttttgctatgctgtattttacattacttattgttttagctgtcctcatgaatgtcttttcactacccatttgcttatcctgcatctctcagccttgactccactcagttctcttgcttagagataccacctttcccctgaagtgttccttccatgttttacggcgagatggtttctcctcgcctggccactcagccttagttgtctctgttgtcttatagaggtctacttgaagaaggaaaaacagggggcatggtttgactgtcctgtgagcccttcttccctgcctcccccactcacagtgacccggaatctgcagtgctagtctcccggaactatcactctttcacagtctgctttggaaggactgggcttagtatgaaaagttaggactgagaagaatttgaaagggggctttttgtagcttgatattcactactgtcttattaccctatcataggcccaccccaaatggaagtcccattcttcctcaggatgtttaagattagcattcaggaagagatcagaggtctgctggctcccttatcatgtcccttatggtgcttctggctctgcagttattagcatagtgttaccatcaaccaccttaacttcatttttcttattcaatacctaggtaggtagatgctagattctggaaataaaatatgagtctcaagtggtccttgtcctctctcccagtcaaattctgaatctagttggcaagattctgaaatcaaggcatataatcagtaataagtgatgatagaagggtatatagaagaattttattatatgagagggtgaaacctaaaatgaaatgaaatcagacccttgtcttacaccataaacaaaaataaatttgaatgggttaaagaattaaactaagacctaaaaccataaaaatttttaaagaaatcaaaagaagaaaattctaatattcatgttgcagccgttttttgaatttgatatgagaagcaaaggcaacaaaaggaaaaataaagaagtgaggctacatcaaactaaaaaatttccacacaaaaaagaaaacaatgaacaaatgaaaggtgaaccatgaaatggcatatttgcaaaccaaatatttcttaaatattttggttaatatccaaaatatataagaaacacagatgattcaataacaaacaaaaaattaaaaataggaaaataaaaaaattaaaaagaagaaaatcctgccatttatgcgagaattgatgaacctggaggatgtaaaactaagaaaaataagcctgacacaaaaagacaaatactacacaaccttgctcatatgtgaaacataaaaaagtcactctcatggaaacagacagtagaggtatggtttccaggggttgggggtgggagaatcaggaaactattactcaaagggtataaaatttcagttatgtgggatgaataaattctagatatctaatgtacagcatcgtgactgtagttaattgtactgtaagtatatttaaaatttgcaaagagagtagatttttttgtttttttagatggagttttgctcttgttgtccaggctggagtgcaatggcaagatcttggctcactgcaacctccgcctcctgggttcaagcaaatctcctgcctcagcctcccgagtagctgggattacaggcatgcgacaccatgcccagctaattttgtatttttagtagagacggggtttctccatgttggtcaggctgatccgcctcctcggccaccaaagggctgggattacaggcgtgaccaccgggcctggccgagagtagatcttaaaagcatttaccacaagaaaaaggtaactatgtgagataatgggtatgttaattagcttgattgtggtaatcatttcacaaggtatacatatattaaaacatcatgttgtacaccttaaatatatacaatttttatttgtgaatgatacctcaataaagttgaagaataataaaaaagaatagacatcacatgaattaaaaaactaaaaaataaaaaaatgcatcttgatgattagaattgcattcttgatttttcagatacaaatatccatttgactgtttactcttttccaaaacaatacaataaattttagcactttatcttcattttccccttcccaatctataattttatatatatatattttagatattttgtatagttttactccctagattttctagtgttattattaaatagtgaagaaatgtttacacttatgtacaaaatgttttgcatgcttttcttcatttctaacattctctctaagtttattctattttttcctgattatccttaatattatctctttctgctggaaatatattgttacttttggtttatctaaaaatggcttcattttcttcattctaaaatcatgttaaattaataccactcatgtgtaagtaagatagtggaataaatagaaatccaaaaactaaatctcacaaaatataataatgtgatatataaaaatatagcttttaaatttagcttggaaataaaaaacaaacagtaattgaacaactatactttttgaaaagagtaaagtgaaatgcttaactgcatataccacaatcgattacacaattaggtgtgaaggtaaaattcagtcacgaaaaaactagaataaaaatatgggaagacatgtatataatcttagagataacagtgttatttaattatcaacccaaagtagaaactatcaagggagaaataaattcagtcaacaataaaagcatttaagaagttattctaggctgggagcggtggctcacacctgcaattgcagcactttgggaggcctagacaggcggatcacgacgtcaggagttcaagatcagcctggccaacatagtgaaacctcatcgctactaaaaatataaaaacttagcctggcgtggtggcaggcatgtgtaatcccagcaatttgggaggctgaggcaggagaatcgcttgatcctgggaggcagaggttgcagtgagccaagattgtgccactgcattccagcccaggtgacagcatgagactccgtcacaaaaaaaaaagaaaaaaaaggggggggggggcggtggagccaagatgaccgaataggaacagctccagtctatagctcccatcgtgagtgacgcagaagacgggtgatttctgcatttccaactgaggtaccaggttcatctcacagggaagtgccaggcagtgggtgcaggacagtagtgcagtgcactgtgcatgagccgaagcagggcgaggcatcacctcacccgggaagcacaaggggtcagggaattccctttcctagtcaaagaaaagggtgacagatggcacctggaaaatcgggtcactcccgccctaatactgcgctcttccaacaagcttaacaaatggcacaccaggagattatatcccatgcctggctcagagggtcctacgcccatggagcctcgctcattgctagcacagcagtctgaggtcaaactgcaaggtggcagtgaggctgggggaggggtgcccaccattgtccaggcttgagcaggtaaacaaagccgcctggaagctcgaactgggtggagcccaccacagctcaaggaggcctgcctgcctctgtaggctccacctctaggggcagggcacagacaaacaaaagacaacaagaacctctgcagacttaaatgtccctgtctgacagctttgaagagagtagtggttctcccagcacatagcttcagatctgagaacaggcagactgcctcctcaagtgggtccctgacccccgagtagcctaactgggaggcatcccccagtagggcggactgacacctcacatggctggtactcctctaagacaaaacttccagaggaatgatcaggcagcagcatttgcggttcaccaatatccactgttctgcagccaccgctgctgatacccaggaaaacagcatctggagtggacctccagtaaactccaacagacctgcagctgagggtcctgactgttagaaggaaaactaacaaacagaaaggacatccacaccaaaaacccatctgtacatcaccatcatcaaagaccaaaggtagataaaaccataaagatggggaaaaagcagagcagaaaaactggacactctaaaaatgagagtgcctctccttctccaaagtaacgcagctcctcaccagcaatggaacaaagctgggcagagaatgactttgacgagttgagagaggaaggcttcagaagatcaaactactccaagctaaaggaggaagttcgaacaaacggcaaagaagtaaaaaactttgaaaaaaaattagatgaatggataactagaataaccaatgcacagaagtccttaaaggacctgatggagctgaaaaccaaggcaggagaactacgtgacaaatacacaagcctcagtaaccgatgagatcaactggaagaaagggtatcaatgacggaagatgaaatgaatgaaatgaagcatgaagagaagtttagagaaaaaagaataaaaagaaacgaacaaagcctccaagaaatatgggactatgtgaaaagaccaaatctacatctaattggtgtagctgaaagtgatggggagaatggaaccaagttggaaaacactctgcaggatattatccaggagaacttccccaatctagcaaggcagcccaaattcacattcaggaaatacagagaacgccacaaagatactcctagagaaaagcaactccaagacacataactgacagattcaccaaagttgaaatgaaggaaaaaatgttaagggcagccagagagaaaggtcgggttacccacaaagggaagcccatcagactaacagctgatctatcggcagaaactctacaagccagaagaaagtgggggccaatattcaacattgttaaagaaaagaattttcggcccagaatttcatatccagccaaactaagcttcataagcattggagaaataaaatcctttacagacaagcaaatgctgagagattttgtcaccaccaggcctgccctacaagagctcctgaaggaagcactaaacatggaaaggaacaactagtatcagccactgcaaaaacatgccaaattgtaaacgaccatcaaggctaggaagaaactgcatcaaggagcaaaataaccagctaacatcataatgacaggatcaaattcatacataacaatactcaccttaaatgtaaataggctaaatgctccaattaaaagacacagactggcaaattggataaggagtcaagacccatctgtcgttatgtattcaggaaacccatctcacgtgcagagacacacataggctcgaaataaaaggatggaggaatatctaccaagcaaatggaaaacaaaaaaaggcaggggttgcaatcctagtctctgataaaacagattttaaaccaacaaagatcaaaagagacaaagaaggccattacataatggcaaagggatctattcaagaagaagaactaactatactaaatatatatgcacccaatacaggagcacccagattcataaaacaagtcctgagtgacctacaaagagacttagatgcccacacaataataatgggagactttaacaccccactgtcaacattagacagatcaacgagacagaaagttaacaaggatatccaggaattggactcagctctgcaccaagcagacctaatagacatctacagaactctccaccccaaatcaacagaatatacattcttttcagcaccacaccacacctattccaaaactgaccacatagttggaagtaaagctctcctcagcaaatgtaaaagaacagaaactataacaaactgtctctcagaccacagtgcaatcaaactagaactcaggattaagaaactcactcaaaaccactcagctacatggaaactgaacagcctgctcctgaatgactactgggtacataacaaaatgaaggcagaaataaagatgttctttgaaacaacgagaacaaagacacaacacaccagaatctctgagacacattcaaagcagtgtgtagagggaaatttatagcactaaatgcccacaagggaaagcaggaaagatctaaaattgacaccctaacatcacaattaaaaaactagagaagcaggagcaaacacattcaaaagctaacagaagacaagaaataactaagatcagagcagaagtgaagaagatagagacacaaaaaacccttcaaaaaaatcaatgaatccagaagctgtttttttgaaaagatcaacaaaattgatagactgctagcaagactaataaagaagaaaggggagaagaatcaaatagacgcaataaaaaatgacacggggtatcaccactgatcccacagaaatacaaactaccgtcagagaatactataaacacctctacgcaaataaactagaaaatctagaagaaatggataaattcctcgacacatacactctgccaagactaaaccaggaagaagttgtatctctgaatagaccaataacaggctctgaaattgaggcaataattaatagcttatcaaccaaaaaaagtccgggaccagtaggattcatagccgaattctaccagaggtacaaggaggagctggtaccattccttctgaaactattccaatcaatagaaaaagagggaatcctccctaactcattttatgaggccagcatcatcctgataccaaagcctgacagagacacaacaaaaaaagagaatgttacaccaatatccttgatgaacatcgatgcaaaaatcctcaataaaatactggcaaactgaatccagcagcacatcaaaaagcttatcctccatgatcaagtgggcttcatccctgccatgcaaggctggttcaacatacgaaatcaataaacataatccagcatataaacagaaccaaagacacaaaccatatgattatctcaatagatgcagaaaaggcctttgacaaaattcaacaatgcttcatgctaaaaactctcaataaattaggtattgatgggacatatctcaaaataataagagctatctatgacaaacccacagccaatatcatactgagtggacaaaaactggaagcattccctttgaaaactggcacaaggcagggatgccctctctcaccactcctattcaacatagtgttggaagttctggccagggcaatcaggcaggagaaggaaataaagggcattcaattaggaaaagaggaaggtgaaattgtccctgtttgcagatgacatgattgtatatctagaaaaccccattgtctcagcccaaaatctccttaagctgataagcaacttcagcaaagtctcaggatataaaatcagtgtgcaaaaatcacaagtattcctatgcaccaataacagacaaacagagagccaaatcatgagtgaactcccattcacaattgcttcaaagagaataaaatacctaggaatccaacttacaagggatgtgaaggacctcttcaaggagaactacaaaccactgctcaatgaaataaaagaggatacaaacaaatggaagaacattccatgcttatgggtaggaagaatcatatcgtgaaaatggtcatactgcccaaggtaatttatagattcaatgccatccccatcaagctaccaatgactttcttcacagaactggaaaaaactactttaaagttcatatggaatcaaaaaagagcccacatcaccaaggcaatcctaagccaaaagaacaaagctggaggcatcacgctacctgacttcaaactatactacaatgctacggtaaccaaaacagcatggtactggtaccaaaacagagatctagaccaatggaacagaacagagccctcagaaataatgccgcatatctacaactatccgatctttgacaaacctgagagaaacaagcaatggggaaaggattccctatttaataaatggtgctgggaaaactggctagccatatgtagaaagctgaaactggatccttccttacaccttatacaaaaattaattcaagatggattaaagacttaaacattagacctaaaaccataaaaaccctagaaaaaaacctaggcaataccattcaggacataggcatgggcaaggacttcatgtctaaaacaccaaaacgaatggcaacaaaagacaaaatggacaaacgggatctaattaaactaaagagcttctgcacagctaaagaaactaccatcagagtgaacaggcaacctacaaaatgggagaaaatttttgcaatctactcatctgacaaagggctaatatccagaatctacaatgaactcaaacaaatttacaagaaaaaacaaacaaccccatcaaaaagtgggcaaaggatatgaacagacacttctcaaaagaagacatttatgtaatcaaaaaacacatgaaaaaatgctcatcatcactagccatcagagaaatgcaaatcaaaaccacaatgagataccatctcacaccagttagaatggcgatcattaaaaagtcaggaaacaacaggtgctggagaggatgtggagaaacaggaacaacttttacactgttggtgggactgtaaactagttcaaccattgcggaagtcagtgtggcaattcctcaggaatctagaactagaaataccatttgacccagccatcccattactgggtagatacccaaaggattataaatcatgctgctataaagacacatgcacacgtatgtttattgcagcactattcacaatagcaaagacttggaaccaacccaaatgtccaacaacgatagattggattaagaaaatgtggcacatatacaccatggaatactatgcagccataaaaaatgatgagttcatgtcctttgtagggacatggatgaagctggaaactatcattctcagcaaactatcacaaggacaataaaccaaacaccgcatgttctcactcataggtgggaattgaacaatgagaacacatggacacatgaagaggaacatcacactctggggactgttatggggtggggggcaggggcagggatagcactaggagatatacctaatgctaaatgacgagttaatgggtgcagcacaccaacatggcacatgtatacatatataacaaacctgccgttgtgcacatgtaccctaaaacttgaagtataataataaaaaaaagttatcctattaaaactgatctcacacatccgtagagccattatcaagtctttctctttgaaacagacagaaatttagtgttttctcagtcagttaac

SEQ ID NO: 451 - protein, 147 aa, Homo sapiens; identical to SEQ ID NO: 220
  REGION 1..147: note = misc_feature - NCBI Accession No. P68871

SEQ ID NO: 452 - protein, 147 aa, Homo sapiens; identical to SEQ ID NO: 220
  REGION 1..147: note = misc_feature - NCBI Accession No. NP_000509

SEQ ID NO: 453 - protein, 374 aa, Aeromonas salmonicida
  REGION 1..374: note = misc_feature - GenBank Accession No. ABD57356.1
MNEQAKQLVAVTRQPALNAGVGLVLAQLAEVEARQIPGSLAEARAHCLAQGAPDILLVEVENPQTLAADLAALAECCPPQMRLVLLGERGDVTLFRWLISVGVDDYYPAPLDPDALRTGLLRLLGVPLVTSLRKGRVICVVGAAGGVGTSTVAANLAMALADQHHRQVALLDLNLHHSRHPILLGSDYAPPGEQWWQATDRLDGTLLAHTAHQLGPRLFLFYDEGQELVLGAEQLVAAVNVMAEHYSTLIIDVPDLRTHGLRALLQEADVVLWLHDFSLGALRLLGQCPQGGQAQRRLLVGNHCRGKEGRVPAQELERVCGQPHAAVLPYDHGVFVRAERAGQPLIQQKSKLARALTLLAGELVGAQVTGRGRR

SEQ ID NO: 454 - protein, 432 aa, synthetic construct
  REGION 1..432: note = Synthetic: GenBank Accession No. ANW61888.1
MAPKKKRKVMSQFDILCKTPPKVLVRQFVERFERPSGEKIASCAAELTYLCWMITHNGTAIKRATFMSYNTIISNSLSFDIVNKSLQFKYKTQKATILEASLKKLIPAWEFTIIPYNGQKHQSDITDIVSSLQLQFESSEEADKGNSHSKKMLKALLSEGESIWEITEKILNSFEYTSRFTKTKTLYQFLFLATFINCGRFSDIKNVDPKSFKLVQNKYLGVIIQCLVTETKTSVSRHIYFFSARGRIDPLVYLDEFLRNSEPVLKRVNRTGNSSSNKQEYQLLKDNLVRSYNKALKKNAPYPIFAIKNGPKSHIGRHLMTSFLSMKGLTELTNVVGNWSDKRASAVARTTYTHQITAIPDHYFALVSRYYAYDPISKEMIALKDETNPIEEWQHIEQLKGSAEGSIRYPAWNGIISQEVLDYLSSYINRRI

SEQ ID NO: 455 - protein, 323 aa, Human adenovirus; identical to SEQ ID NO: 166
  REGION 1..323: note = misc_feature - GenBank Accession No. AP_000601 ; Human adenovirus 35

SEQ ID NO: 456 - protein, 319 aa, Human adenovirus; identical to SEQ ID NO: 22
  REGION 1..319: note = misc_feature - GenBank Accession No. YP_002213796 ; Human adenovirus 3

SEQ ID NO: 457 - protein, 544 aa, Human adenovirus; identical to SEQ ID NO: 25
  REGION 1..544: note = misc_feature - GenBank Accession No. YP_002213774 ; Human adenovirus 3

SEQ ID NO: 458 - protein, 944 aa, Human adenovirus; identical to SEQ ID NO: 26
  REGION 1..944: note = misc_feature - GenBank Accession No. YP_002213779 ; Human adenovirus 3

SEQ ID NO: 459 - protein, 325 aa, Human adenovirus; identical to SEQ ID NO: 58
  REGION 1..325: note = misc_feature - GenBank Accession No. AP_000564 ; Human adenovirus 7

SEQ ID NO: 460 - protein, 544 aa, Human adenovirus; identical to SEQ ID NO: 61
  REGION 1..544: note = misc_feature - GenBank Accession No. AP_000543 ; Human adenovirus 7

SEQ ID NO: 461 - protein, 934 aa, Human adenovirus; identical to SEQ ID NO: 62
  REGION 1..934: note = misc_feature - GenBank Accession No. AP_000548 ; Human adenovirus 7

SEQ ID NO: 462 - protein, 325 aa, Human adenovirus; identical to SEQ ID NO: 76
  REGION 1..325: note = misc_feature - GenBank Accession No. YP_002213828 ; Human adenovirus 11

SEQ ID NO: 463 - protein, 561 aa, Human adenovirus; identical to SEQ ID NO: 79
  REGION 1..561: note = misc_feature - GenBank Accession No. YP_002213807 ; Human adenovirus 11

SEQ ID NO: 464 - protein, 948 aa, Human adenovirus; identical to SEQ ID NO: 80
  REGION 1..948: note = misc_feature - GenBank Accession No. YP_002213812 ; Human adenovirus 11

SEQ ID NO: 465 - protein, 325 aa, Human adenovirus; identical to SEQ ID NO: 94
  REGION 1..325: note = misc_feature - GenBank Accession No. AAW33140 ; Human adenovirus 14

SEQ ID NO: 466 - protein, 558 aa, Human adenovirus; identical to SEQ ID NO: 97
  REGION 1..558: note = misc_feature - GenBank Accession No. AAW33119 ; Human adenovirus 14

SEQ ID NO: 467 - protein, 945 aa, Human adenovirus; identical to SEQ ID NO: 98
  REGION 1..945: note = misc_feature - GenBank Accession No. AAW33124 ; Human adenovirus 14

SEQ ID NO: 468 - protein, 353 aa, Human adenovirus; identical to SEQ ID NO: 112
  REGION 1..353: note = misc_feature - GenBank Accession No. AAW33461 ; Human adenovirus 16

SEQ ID NO: 469 - protein, 555 aa, Human adenovirus; identical to SEQ ID NO: 115
  REGION 1..555: note = misc_feature - GenBank Accession No. AAW33439 ; Human adenovirus 16

SEQ ID NO: 470 - protein, 940 aa, Human adenovirus; identical to SEQ ID NO: 116
  REGION 1..940: note = misc_feature - GenBank Accession No. AAW33444 ; Human adenovirus 16

SEQ ID NO: 471 - protein, 323 aa, Human adenovirus; identical to SEQ ID NO: 130
  REGION 1..323: note = misc_feature - GenBank Accession No. AAW33370 ; Human adenovirus 21

SEQ ID NO: 472 - protein, 561 aa, Human adenovirus; identical to SEQ ID NO: 133
  REGION 1..561: note = misc_feature - GenBank Accession No. AAW33349 ; Human adenovirus 21

SEQ ID NO: 473 - protein, 949 aa, Human adenovirus; identical to SEQ ID NO: 134
  REGION 1..949: note = misc_feature - GenBank Accession No. AAW33354 ; Human adenovirus 21

SEQ ID NO: 474 - protein, 323 aa, Human adenovirus; identical to SEQ ID NO: 148
  REGION 1..323: note = misc_feature - GenBank Accession No. AAW33501 ; Human adenovirus 34

SEQ ID NO: 475 - protein, 558 aa, Human adenovirus; identical to SEQ ID NO: 151
  REGION 1..558: note = misc_feature - GenBank Accession No. ABC49791 ; Human adenovirus 34

SEQ ID NO: 476 - protein, 951 aa, Human adenovirus; identical to SEQ ID NO: 152
  REGION 1..951: note = misc_feature - GenBank Accession No. AAW33485 ; Human adenovirus 34

SEQ ID NO: 477 - protein, 365 aa, Human adenovirus
  REGION 1..365: note = misc_feature - GenBank Accession No. ABK59080 ; Human adenovirus 37
MSKRLRVEDDFNPVYPYGYARNQNIPFLTPPFVSSDGFKNFPPGVLSLKLADPITITNGDVSLKVGGGLTLQDGSLTVNPKAPLQVNTDKKLELAYDNPFESSANKLSLKVGHGLKVLDEKSAAGLKDLIGKLVVLTGKGIGTENLENTDGSSRGIGINVRAREGLTFDNDGYLVAWNPKYDTRTLWTTPDTSPNCTIAQDKDSKLTLVLTKCGSQILANVSLIVVAGKYHIINNKTNPKIKSFTIKLLFNKNGVLLDNSNLGKAYWNFRSGNSNVSTAYEKAIGFMPNLVAYPKPSNSKKYARDIVYGTIYLGGKPDQPAVIKTTFNQETGCEYSITFNFSWSKTYENVEFETTSFTFSYIAQE

SEQ ID NO: 478 - protein, 519 aa, Human adenovirus; identical to SEQ ID NO: 187
  REGION 1..519: note = misc_feature - GenBank Accession No. ABK59086 ; Human adenovirus 37

SEQ ID NO: 479 - protein, 949 aa, Human adenovirus; identical to SEQ ID NO: 188
  REGION 1..949: note = misc_feature - GenBank Accession No. ABK59070 ; Human adenovirus 37

SEQ ID NO: 480 - protein, 323 aa, Human adenovirus; identical to SEQ ID NO: 202
  REGION 1..323: note = misc_feature - GenBank Accession No. AAW33547 ; Human adenovirus 50

SEQ ID NO: 481 - protein, 560 aa, Human adenovirus; identical to SEQ ID NO: 205
  REGION 1..560: note = misc_feature - GenBank Accession No. AAW33525 ; Human adenovirus 50

SEQ ID NO: 482 - protein, 940 aa, Human adenovirus; identical to SEQ ID NO: 206
  REGION 1..940: note = misc_feature - GenBank Accession No. AAW33530 ; Human adenovirus 50

SEQ ID NO: 483 - protein, 581 aa, Human adenovirus; identical to SEQ ID NO: 40
  REGION 1..581: note = misc_feature - GenBank Accession No. AP_000226 ; Human adenovirus 5

SEQ ID NO: 484 - protein, 571 aa, Human adenovirus; identical to SEQ ID NO: 43
  REGION 1..571: note = misc_feature - GenBank Accession No. AP_000206 ; Human adenovirus 5

SEQ ID NO: 485 - protein, 952 aa, Human adenovirus; identical to SEQ ID NO: 44
  REGION 1..952: note = misc_feature - GenBank Accession No. AP_000211 ; Human adenovirus 5

SEQ ID NO: 486 - protein, 561 aa, Human adenovirus; identical to SEQ ID NO: 169
  REGION 1..561: note = misc_feature - GenBank Accession No. AP_000580 ; Human adenovirus 35

SEQ ID NO: 487 - protein, 952 aa, Human adenovirus; identical to SEQ ID NO: 170
  REGION 1..952: note = misc_feature - GenBank Accession No. AP_000585 ; Human adenovirus 35

SEQ ID NO: 488 - protein, 207 aa, Homo sapiens; identical to SEQ ID NO: 1
  REGION 1..207: note = misc_feature - GenBank Accession No. NP_002403.3

SEQ ID NO: 489 - DNA, 310800 bp, Homo sapiens
  misc_feature 1..310800: note = GenBank Accession No. NG_052673
  source 1..310800: mol_type = genomic DNA
gttacaaataaagcccttcccgaaaatggatcaaaaacactttgtaatgagtgaaggagctggtttaaaaagggccaacatcaaacaaaatcccagtcctgagtcacagacactcaaatagccccttccagggtgggaatgtcctccaaagcacttccatttgtgtgagtagttcttcaagccaacgtatccaaatacatacatctgatgagcggactttgcttgtttacatacattatgtacattcctttgatagtcaattgtctaaagttggaacagttcggagggaagagctatataaggtttgcaatgatctttgtccaccagttactggacaactggatccaaattccacaaatagctgtggttctttacctgcatggttctcctcccctgagacatccagtgccatgcattttctcttgcaggtctttccttgcatcacccctccaaccccagcagatatcctggctgagcctgttttctctgtgaggggctacactgcacactggggctcttgaaaagggcttgctgggctgggcacggtggctcacgcctgtaatcctgacactttggtaggccgaggtgggtggatcacctgaggtcaggtgttcaagatcagcctggccaatatggtgaaaccccgtctctactaaaaatacagaaaaattagctgggcatggtggtgtgcacctgtaatcccagctactcaggaggctgaggcaggagaatcacttgaacccgggaggcagaggttccagtgagccaagatggcaccattgtacttcagcctaggcgacagagagagactccaattcaaaaaaagaaaaagagaaaaaaaaaaaaaagaaaaaaaagaaagggcttcctgcagggacagtcagtgcaggaaagggcctctttcgtactcccactgcccctacgcatctcctgggtagaggtcgctgctccagagagcaaactatttcctcatctgtgtgccattccactacaagccccacaggggcctgcaacgagtcccataaatccatctccaggccctgcacccacaaactggcaaaggaagtttcaggaaaagtctttctaataggagtctgtgggctgcctctggttcgtttctttaggaattctcctccatgcccttcttgacacaaaagggcctgaagggttccagttctcaacaggagctcccaggggctcctggcaggaggatgttctgcctctttggaggaaagcaagagctaaggagcccctcctgttttagttgcacctccatcccctttctccaccctgcaccattcccttaccctctatgtgaggcaaagcctgaagtccctccttcccgccctctctcctgcccactagtagattacactccctgctgcagttacaccatgatgcctctgccatgctgacaactagtgtcacacaggagcgtaatcagaagcacctggcattcaaccccggtaccgatggcccccaccttttcatttcaggcttcttcctccagagtgcttgaggctccctggcctcctggcctctcccaggtccaaggcgctgactccagctcttggctccaacatttacaggaacactgggactaagaaaatcaattgtgttaatcagcaaaaccctccacttgagatgctatcctaaaagcaaactatatgtaaaacacttaacgtggggagctctgtaatatgtttcttttgttacacgaccatcacacatttgtccggagtttggggctttcaaaccacataaggttttatgtgatcgttataaaatcccttcatttcccaaaggtagggtagtaaggattaagtttgactactgaaggcagctttgttgtaagtggtctctaatgtcacaaaagtagcttgggaagacaggcttattaaacaaatttcttgggttgcaaatcattagaagcaatcgcatgtcatgttcatttgcttaacccgaaaggtatccatttggatgtttaaagaaactatgcagattaacattgttcccagtgcccacaagaaagctggctgatcttaaaggaaatccagggagctccttgaggaagtcggactgcagttgagcatacccttttgtggttttcccacctcttttgtaaaaagttcttcataggaatctgtgtctggaggaaaaggggttgtgatttgttaatctgaagatgggagacctcaaaggaatctcacccaaccagtcctgcactgtcatcctatgaacagagaagtcaggtggttgctcagtgaggggcagggctggcaccacatccgagcctccctgtcctgtgttccttactcttcagtggacccggcgacctcccggctttggagccatcctgtgttcctttaacagtaggacgaacacacaggcgatgatgagattgtaatgggacaagggggagaggcgtggggagctcttgatgaaaacttgggtttttgaaattaccatgatgaagggaggagcttgcaccagcaggtgtaaggagtgtgagtttgagttctgctcatcagacagcctaagcagtcacatccttgaatcctggtcttttgcaggccagtccttggtcaggtggtggcctttttcctctttcccctctgcactgagacccttatttggctcctgatcctggagcccctgacacagtccttaccactgaagtagctgtggcccttcacatagttcttcccaccacgccagcaaggggactgagttctttcagtacagccagggccaggtccacacatctccctgggaagccagcactttctctcgtggaccgcctccccattcccacagggccctcctaaagggcctttggatgaccacattggcctttctttcctagggtggggaattagagatgctaagactggccagtctctttttcttaagagtttagggattcgtcttaaaatattattcagataaacgtatgagtcatgtgttaactgcaaaactacttaacagcacacttgttagaatatcagtcggcactctgattccatttcggcattgtttttcctttggttctattaagatcccggttctaactgggtcctggtagtaacaggctgtaagtggccaggtgtatagcattatttcttagtagtgtggtgtggtgctggtggtttattttccctatgcacacatgccctaatatggaaggatagtttgtacacacgtagggtacgttatcatgagactcctttacagagtatgaaactgaggattagagaagtcagacgagtttcccgaagtcttatagaaggctaatggaaaaaaccagagccaagggcaaacatgtttcatctgtccttccacattagtttaaatgtgaatggctgcttggaacacagtgttgagaaggattccgaggctgtgtccaggttcagtggggaaaaagtgccttgatttgaccattatatcgtgtactcagggcctagtttatttcccacaagcagctatttaaaacatgtctcatccaaggcagggtcggggtggggaacctcagaggatcaatgatgcagcctgtattgtcaccagggctcatcccaaagcaaatcctgctgaagttctcctctgaacaacccttatcactcatgctaatatgttggatcctgcaagtcacaaatacgaaggtatgagcattggccgaatcccaacagggaaacttcaccgggaaggtgaagacccctttccattaagataacaaacagaacctagaaggcccgtagcatggtggcttagaacatgtgggccttggatgggatcctgccaaggggtgtgtgacctctccgaagcctccagggatgatactactccctggggtgcttatgccaaccacgttagagacaatggtttctgtacccattgcctggggctgccataataaagtgccacacactgagtggcttaaaacaacagaaacctattgtctcacacttccgggggccagaagtttgaaacccaggtgtgttaggatcctgctccctctgaaggctccagggaagagtgtcctctgctccctccgaaggctccagggaagggtctgtcctcttaggcttctggtggcttgcaggtgcagccctccaatcctcctccccaagcggccttctgcctataaggacacgagtcatactggatgaggggcccactaattgatggcttctgtaaagtccccatctccaaataaggtcacattgtgaggtactgggagttaggactccaacatagcttctctggtggacacaattcaactcctaataacgtccacacaaccccaagcagggcctggcaccctgtgtgctctctggagagcggctgagtcaggctctggcagtgtctaggccatcggtgactgcagcccctggacggcatcgcccaccacaggccctggaggctgcccccacggccccctgacagggtctctgctggtctgggggtccctgactaggggagcggcaccaggaggggagagactcgcgctccgggctcagcgtagccgccccgagcaggaccgggattctcactaagcgggcgccgtcctacgacccccgcgcgctttcaggaccactcgggcacgtggcaggtcgcttgcacgcccgcggactatccctgtgacaggaaaaggtacgggccatttggcaaactaaggcacagagcctcaggcggaagctgggaaggcgccgcccggcttgtaccggccgaagggccatccgggtcaggcgcacagggcagcggcgctgccggaggaccagggccggcgtgccggcgtccagcgaggatgcgcagactgcctcaggcccggcgccgccgcacagggcatgcgccgacccggtcgggcgggaacaccccgcccctcccgggctccgccccagctccgcccccgcgcgccccggccccgcccccgcgcgctctcttgcttttctcaggtcctcggctccgccccgctctagaccccgccccacgccgccatccccgtgcccctcggccccgcccccgcgccccggatatgctgggacagcccgcgcccctagaacgctttgcgtcccgacgcccgcaggtcctcgcggtgcgcaccgtttgcgacttggtgagtgtctgggtcgcctcgctcccggaagagtgcggagctctccctcgggacggtggcagcctcgagtggtcctgcaggcgccctcacttcgccgtcgggtgtggggccgccctgacccccacccatcccgggcgagctccaggtgcgccccaagtgcctcccaggtgttgcccagcctttccccgggcctggggttcctggactaggctgcgctgcagtgactgtggactggcgtgtggcgggggtcgtggcagcccctgccttacctctaggtgccagccccaggcccgggccccgggttcttcctacccttccatgctgccagctttccctccgccagctgctccaggaagcttccagaagcccctgcgcgggccttggcttgcagcaaccctttagcatacttaggcagagtcccatatttccttcctgctggaggccaagttctaggggccttctggttactatggctggtgtttgtgtacatcataccctaactgtattcatcaacacttagagtaagcaaggctcgctggagagccacacacactgggcaccgtaatgtcggttataacaccgcagaggagttctgaactatgtatttcgcactcctgggttcatcatctcctgaaatctcagggtggtgtttgctctcagttgcttcagctgagtagctggctttctgtcctggaaagcagactttgtacatgtgtgtgcaacctatgcctgctgagatcatcatcagacagggaagcggcttggtccagagagctgttctcagtagaatgttaagcacagagagctgagaattagactggttatttacatagacatccaaatagaaacctatagagtatctgttaagtcaggctctcccgtcatctcccccatccctgggcaggtgtctaggagatggttttgttattttcagggccctctcaatggctaaaacactctgggagatgaacaagattttaaaaacccaaagcttagcgcacctggtgggtgggggtgtgaaaactttgaaggaaaccgcgtcaagagcctggctgattgttaatatcacgttaactcagagggccaggatacttgcccagacccggagtctgcctgcaagtagcagaggagagctggccttgctctgccgcgtgtctttcttcctgggccctctgtctcgggttggaatttgaatagtggagtagtgtctgccacagtcaggggcctggatgaagtagaccaccagtacggagctatactcaggtacttttcaatgtatatatcttcattaaaaaaaaaaaatctgggccaggcacagtgggtcacgcctgtaatctcagcactttgggaggccgaggtgggtggatcacctgaagtcaggagtttgagaccagcctggccaacatggtgaaacccagtttctactaaaaacacaaaaattatccaggcgtggtggtgcatgctggtaatcccagttacttgggagactgaggcaggagaattgcttgaacctgggaggcggaggttgcagtgagccgagattgcgccattgcactccaacctgggcgacgagagtgaaactgtcctgaaggggaaacaaaaaaatctgtatcaaaataaggatttaactaatagtattaggcactactttaaaaaggctttgctgttagtaaggttgaaagaaatagagccctaggtatacattgggtagcaccttgttcagctgctcagattcttgaaccttgttgaggtcttactttgatatcacctgggccttacttttcgttgtttgggtttcctccccaggtgtctcaatcagggcctcctctgtccttttgcagggaagaagggggtaggaagggcctgaaaaagaacttgccttccccattgccccctcagagtttgttcctctccagtcctcttcccaccctttcttaggacaccaaaaccctgactctttcagtattttataataaaataaagttactaaattgtctgttctgttttgcagaggacacacatttaggagccagtgattcagaccttccatttttctttttggtgctaatgctcttttcagtatattctctttgatagaaaaaaaatggaggcaaaactgaattttctgcattatcttttcctttagcattattcttgtttctgcacttcattctgacccccttccccagcataaagttccatgtccagatccacttgccctgagatttttgacttccgtttgggactctagtccctccaggggacacattgagcctcccagaccctgcagggccctgtgctcattcggctcttgggctgttgctacggtccttcctgaccctctgtttcctgggacaagtagtttttaatgcagctactttctgaaagagctggggtcttaccgcagaatattattttattatttttagagacaaggtcttggtctttcgcccaggctggagtgcagtggtgagatcatagctccctgcagcctcaagctcctgggctcaagcgaacctcctgctttgacctcccaagtaccagggactacaggtgtgcgccaccatacctggctaattgttgttgttgttgtttttagaggccagggtctccgtatgttgcctagggtggtctcgaactcctggactcaagtgatcttccctcctaggcctcccaaagtgctggaattataggcatgagccaccatgcctggcctcgcaggatattatttaaacgaaacctgaaggatttaaaatcagagaagacacataaaccatcacctgactgtggggtgagagtggtctttatatagacactcatgatgcacaagccagcccttcgccccactcttgttttgaagtgaaaggatttatatgggagggaggaggtttgagctgtgcaggagggtccttggttggcatgaggattttgtgaacctacgctgttagctctgcaggcctgtcttggacataggtaagtagaagttggagaccttgtgttgtggaccaaatgttgcaagatgtgtgttctgtggcttttcattaactgctgcatatctgctggttggtggacatagtctagttttcttttgacttaaaaaaattaacagtacagcttatatcggagggctgcatagtttgggggaaactaatgaatatagtatggaatgtaatgaatgactgacttcttcatagagctattgaagtgatttatgaagaggaagaaatcatttttgtgactttgttgatctttgaagtattagagtggctttggcaggtgtggatcacccggaaaggaatcaaacactgagtcctgccaaggtgctcggtcccggcagcaaagccagtcctcagcagcctgcgctcccgaagctcctccagctaagtaactgaataggccgccctgggagctgcccatgcggatgctctgaatggtgaaacttggttttgacaccacaagttgttttcagttaaatcagtggctcagcagcagagcagggttctccaaggaggcctcgtgtccccttcaccccacctggaggtagctgttctaaaaccagtaaaaaattctacaaaaacattttcttagggttgttaaattagtcatagtgtgtgtaaccatgaaaggaatggtgagagtgcaataaatgcctggtgtgttcactctcctactcctaaaagtttcttggtagaataatttcctacctgtgatgcttgcgaagtcagcagaggctcccacccagccctgccgcccattcccagaagtctgggctgggggacaccgaatggatagtccaccagcggcgtggcttgtgaaaggaggtacttgttaaatctatgtgtttttattatagacatcgttctgccagtcgcaataatgtgtttatggacatttttctgcaagcacagcgcgggtggcagtttttactgacaaattgagtcatatgcatagaggtttagaaagcgcttgccttattgacggatcaggcaattctggcacgggatgttcagagatatttaggtgggtgaagagagtgaatgaatctcagggcagagaaggagatggggcattatatgttgaaatgcaataaataatcgctagttatttatcatttgtttttaaacttttagctacattgtacttcccagtcaagaggactccggtgggcagccggggatatcatgttcaggtgtctctcctgcttgtgtggggtaagagccactactggaatgcgattccagcaaggcctgacgagtcacagccccttgaacctgttgctctccgtaaagtgggatcttcacaggcaacagtggaggagcgtttgagggtgacctgggccctctgcatcagaattactgtgggtgctggctagagaggtctctcgattgcagggccccatgggagacctacaggaccagaacctggggatgccaggggattctggcagaccctaatgcttgagcacctctagggaaggccttaggatcctctgggaagtagcactctccagcccaggcaagatccgagtcccccttccagaagtatccatcggcagttggcattgctgcaggttttctgtgcatatgggtctgagtacggttttgtaactcctgagagacgtgaatctcttcaaattgcaaacccaacatgttattattgcttttgagttttcagttttgtggttatgacaagatgcagatgttaccaaaactttggcgtcagttttacaaacacacgcgaagcacgggcaacccgtatcatatttcaccccttctttccttttgagagggttgtcttgtttttaatccccctctgggtcaaggcattttcctggtctcaggtgagggtgcactttcagaggcacagctgaatacattttgtgggactgaattgagcttttctacaggaagtgccaggccgtgtgtgggagtgatgctgtttcctagctgggtccccctgggcaactcttagccctccaggcacctcctcatccattgggtggggacgattatgcttattcggtctacccgggtaagtataggcacacgagacagtaaatacatatttttttaaaagtaaaatttctatccactacatggatagaaattttaatttggagctgagtctcacggaaggatgaaacgagaagacggcgaagaaccatttcgagccctcgttttccccccagtccaatccgaatctgtattttgcagatctgcacacacccaagccctcactgggggcatgtgcacggtggtcagaagtgcaccttctgggaacagatgggcttccgtttggacctgctttacaagttacaatcctgtgcccttgagcagagttacttaaccttccaaggccagatttctccaaaagcagggccagggacagttcccatccagaaggaggcctggcgctggggaggcctgaatgaaggcggttggtgtttgcggatgcagagtcgctctgttttggtggaggcaggactggaggtcgggatcacttggccacatttgccacctctggtgcgtctgaggtcacagtgcattgtctgtgtgcagcataaggtagttccctattcatttactaggtccctgaagtccttttgtctgtaaagaggctactggctctgccacctgcttctgtcttttcacagtagacattctcgacgtggcagcattctaaaggttcaggtgtgccacatcggcctagagtgggcaggtgggcttcatgtgtgctcctaggggcacttggcagttgctgatagcccgagacactgggagccttgacattattcatctgttatattgaaagaacttcccaaaggacggacacaggatctgacacgatggcagtggccaggaaccagcagtgacaccagcatgtgacagtattttcccatgtgtgacggccgtttagatcacagcagtgaggggtaacgcaggtccgctgggtaaacttggtcaaaaatgggaagtctgcagcatttcgtgtgtttgtggaaatgggccttatttttatttggggtgtctccttaatctcctgtcatggttcagctcaccctggtggttattctgggcgtgctgcgcttgttgccttgtacagaccaacttaggaaaggctcaccaccaccccatgaaggagaaggcgctgtgagtgtctttattttgcatatgaggaacccgggcctcggagagtttgagtgacttgcacaggtctcctgggatagaggtagagttttgttttcaacccagatttatttgataaccaagtgcaggctcataaccacttgtgccaggctggctttgcaacgatgagcctgagaagctgttagaagtcctttaaggggcaagacagggtgtaaacagacacagacctgtttatgtagctaatgttttctgaacatcaatgtgaccaagtgttgtctttagcattgtgggaaaagcaattcgcccaagtgtattcctgcttgaaggcgttgagccgtagctgaggctgggtgcagtgaggacttggggatggcaaagctgtccctgcgtgtgccttgtgcctaccccgcaccccactagagagtggaacgaccagggcagtggggccagaggaaagatgggaggatgcagagggccagccatgtcccgggactgtgcacacgcttcaccatgtccctgcaggccagggacccatgcctgattccctctgaaacatttgcgggactgtggctaccggtcaggtttctccaagtggcccaaggggtgggcattttgagcagagcagtgggactatggatgcgggtacatttggggacctggccatagttgaatttgagcagggtgtggcaagcatgtggggctggacaggaaggcagagctagccagtggggccagggcctgcggagcccaaatgctgcgctgggtgaagggccttgggagtcttgtgagtggggaacactagcctgtcagtgcttcccagagaagatcacggggctggcaggggactgattggggcagaggatgcaggatggtggcagcaggcctggcagggcggggacagttccaggaggtatagctggggtcaaccctggtggcttctggtgagagcggagcaggtgggagtcgcagagtgtggttgtgagggactaagtttagaatcgcttttcttattgagagagacgaaagccttggtgtgtgtgctttttatgtgagggaagccagataaaggatctggctttggaagggtagacaggccgccctctgccctgcctggcatctgggttctgaggcgggagatttcccgactgcagccgcgttcaggcgaggatggcagcggtggacccaggctcattaccattgctcccaccccagcctgtccctgttgggggcaacctgtacgtcctgcaggagtcacggaattttaaaaaccaaaccgtcaggtgttagaggtacagtcacatcagaatgcaaattagaaatagtgtgtgctggggccttaaacaccatgacgtgtttcgtgggctggtgcggctgagtgtgcccctgggcagcagagattgacgagggtggctgggcttcctccgggccctgggctcgcagtggccttgtcttcaaggggctccccgtgtggtagggagacgtgcttgtcacacccatacattttgtaggtactggtgagggctggctagactgaatgaggtgaagagcctggcctttgttggggggggtgttggggagcttggtaagtggttgaagatgttgaagaagtcccctctgaggaggtggctttcgagtggagatttgaacagtgagaggtggcaaggtctggggaggaggcttccaggggacgagtgagagctgcaggtgcctagatggctgcaggtcggtgtgttggaagcacagatgggaggtcctatgagggtcacggggtggggtggggagcattgaggccactgttgcaggcctggattcactctaggagtgttaaagccagggtctcagcctcctgcagttgtcatctagttaaagtcatgccagcagggcagggctgtgtgtgtctgggtgatgggggatcagatgagaaagtgcgtgccaccctcagcacagtgcatgagaggcgtgaggcacggcggatgctgcgggtcttataaggcctttaacgctcgaggggaagttcctagaataatgggcgaagaaaaggaatgatatatttctaaaagttactgaatttagctagctagcccaagaaaagcccatgtgtgctattctttattgtgcagaaaaattcgtttctgtcaccattgtgttatcatcagattaagctgtcgagtcagatggatgctgtggttgtgcggggtgcgggccgatcagcacactcccagtgcctctgcaggccgtcagcctccagcccaggccagcctgagaggcaggcgacgtgggaagggaggggcttcccaccaggacacaggaggttgctgaggaggttgcttccatggtgccacttctgaaataagaactgttccttggaaggaatgcacaggttctgaagttagtgttcttaaagttcaacgttatctaccctcttggccatagttgaccaccctgtggtcatccttggcccagcaagagcacaggctcttggaaagccacaatccatgaccatattcacagctgaccaaccatttgccaggaggcaggactttctgtgctaaaatggggatgtcccaggcagactggggtgggtggtccctgcctccctcggctctcattccagggtcctcctggacatcactgctgtcactttgccactagcttgagtccacctgggccttgaggcagaagcagtcgttgaattttctttttttttggttctccggaagcatgggcttataagccttcctgttgtattttgccatgagtgtaattagaacatctcccagagcctgggtcacttccctttagctggacatggcccccgctgtccttgtcacattttttggattgtttgtcactccagaaagccttcagggtcatggttctcacttcctcagacatttttctcttctgggtgtgaggatcttttgctcataagacttgccttctttgggcctgagacgcttctcccccagctgtggagatcatgacagttgcagcagacggcttcttggaaaggtagaaggctctggtgttggctgaggagaagcagctccgtggtctccaggggtgtcctgggttcccaggaatcccatggctcctgggggaaccgctgcctggggcagtgctggttccatggtctgttggggttcctgggtgctcacactgccccagcttagccggcgtgactcaggatgctaggacccatcgccaggctgctgggagtggctgggtggggaggtcagctctggcaccaaggccatgctggggctgcagggcttggctggaaggggtgctgccctgtgtgtcctgctacaaggggccggggaccctcccaactcagggtgtcctgcacgcccacactgcctccctcttctatctttaagacacctgggaagcttctggacatgtcaaacccacaccagactgagtggcagggtccaccacaggagtagcttagtgaagaccagaaatggttttgagctgggcactggcacagacagggtgagagccagccgcatggtcctcgcagcctccccgcctgtggacccctctctcaggccaggcaagtctgtgggctcgtgggaccccggcagtgctggcctcctgtgtttgggcctctgcatctgtgctctgccctgaggttgggtgagtgggggactcgtgtccctctcttcccagagcagcctctgctctatcctcagggaacctcttctgacccgatccccacgcagacatgctctgctgccctctctctcaatcttccccactctcacttcttccagaagctacttcagcccccacgatctctctctgtctggggcccttcacacaccactgttttctactagacttgtattgtttccatctcttgatggtgggatgctagattggatgctctccaaggcctggtgtgtggtttctactggatggaaggcccagcacagagtgctggacacagggtgctgtggactgaaccgtgtccccaagattcacaggctgaagtcctgacctccaatttggctgtatttggagacagggcctttaggaggaaattaaggctaactgagtcataagagtgggatcctactctgctaggattgatggccttggcagagaaagagaggatcttttttcttagaagagaaagagaggatctctccctcccataccgtgtgaggacacagcgaggaggaggctgtgtgcaagccaggaaaggagccctcactggaaacggaatcagccaggaccagcagctctcacttgccagcctccagaaccgtgagaagataaatgtctgttggttaagcccccagtctggtattttgttacggcagcccaggcaaaccaatatataggtgaattacagactaaagttgtttcaaaggcacaaaactcatcaagggattgtgtatgaagttggaatttggggctgaggataactttgtcatcagacagtgctccaaaaaggcactgttctcaggtttagctcttggcatcccaaaagatatgagtgtattgcagtaaaaaacaagtaacaaacagaaacccagatttcatgaccagaaacatcagtggttgtgggaataggggacagcaggcaagacaggagactccagaagccagcagaccatggaaaggcctggtgctgtcctggccctgggtgggcttgctctggtaagcggtagaggaacctgcgccctgatgggaaggagagaccagctcaaatgctgccagactgggtttttaaaaccagtctctacaggttcattgggattctttttgttggttggttgattttttccccccctccagattggtcagtatacacacactaatccagcctggttcaaaggacagcatgtggtcgtctggttggacaccagctacatctctcagaaccatactctttgctgcttttcaggctaagatagctctctgagactgtttggaggtctctgttgatttaggggccttgcaagacatttcttgctgaaagccccgctggcccacacctcaccaaattggcttatgtggctactgatggggggacatagaaaaggtagatagaaaaggttaaatttacttctgtctaactcaccaattcatgctgtggattgtagatctgcaaaatatatcaagttcacagggattttatgattgttgcaaaggaaactcaaattgtcagccttttcctgaaggatcttgccattcctaagctctggctatgcccctacttctggctggctgtggccttgcagtgcaggctggcactgtgcccctggcatctggctttggggggcccagctgtgcagggagcagatgctgtggtgaatacaggtgaagccagagtcctggcttggggaatgtgttctgcttcctgtagtgctctatttgaagtgtggatttcagttcttcgttatcttttatttatttatttacttattagcacagcttgtttgttgttcagttccatagtgagaatctctaagaatatgattaaccttgagggtcatcttatcctgtaattattaatgattgattctgtttatccttgaaatcaataagagaggcataatggtttggtctgtagttgggcgtgatttcttacatttcgtaaacacggttctgtgacagcagttgtatcagtttattacccagaacatgtttgatgaatctgaagtgtatgattagttttatataattattgtgatatgtagtgttccttacatgagttatgttaatatggcaaatagtgttaacatctcctgccactaatagttagggtggggacatataataattgatcttcctgggagtgctgtaatgtaaaaacaattcaggctgttggaagtatattttacaagtatgcgttgggccttggggatgttatattgaaaaacccaattgtacagttaccatgggaacccaattaaaatagattggttgatttttttttgtctttcatcttgaccaaaaatctaatgtattttaaatgttttcatatggaattgtagtcatatactgacttgctgtgccaaagtattctgctcgttttttccaactttaagctaaaatagtgaaaagttctcgagtggatccttatgagaacgtctcccaaagagaatcagtcatgtttttgtggaaaagtttgtgtgagtgatgatggtagagtggaggtggtggaaagcttttatgaaaaaagggagaacaagcattttcctacgagggcagacaagaaccctcatgttcttcctttggtggaggacatgagtgtgtttctccgttctcacgtttgtagaaggtgagattaggtccctaaagggccctctccgtgttgtggaggggttggggtgggggtggagtggtggggtgggatctgtgtttgccctccttgctgggggtcctcacattgtttggtctcagagcctttttgcacagttaaaacttatgagggatcccaaagagattacctgagttatatattaataccccattagaaattagcagtgagaaattttaaaatattgattcatttagacaataaacctattagctttttgcataaataacattttaaaataaaaactagctatattttccataaaaaccaattagggaggaatgttatcagtttccattttttaaaacttcataatgcctggatgaatagaagacagctagcttctcctgcttcattcagtctgttgtgatatgtttgggttgaagcgcatcaagagaatctggcctcactcaggtaagtaattaaaagggaatagtgttttaacagcttcctcagataattgaggatgttctcctttgacactacatcaggactcggcaagtggtaatttcctgagggtttgtagcagggtgcaatccgagacccgctctgtgaactttttgctctctatgacgttaaaatccacaggtatgccttgcactttgagtgattttgtagcgtctttcatcggccctgtggaaaatgttgcttcattgagttatacagatctttcaaatattgatgtttcctaatacagtcctaaaaataatatttgttaatatcaccacctttctccttaggaaagtcatttagtattgggaagccatggtggtgggtaccagtattctaacattttaatcatcacttgaaagttctggctgggcacactggctcatgactgtgattccagcactttgggaggctgaggtgggaggatcacttgaggccaggagttggagaccagcctgggcaatatagcaagatcccgtctctacaaaaacattttttaaaaagaaagttccccttttatcatcagcagcagatactgtcagttgtgttcattacaggtacagactattcatttttgagaaaacatccgccagatatgcaagtctgaataactgttgtttgtgagtcattcacactagcaaagcttttgttctaaaatgaagttggtaagttcatcagcagtctctgccatttgcggagccctcctggtggcagcgtcattctggtttgtggcagaagtgctttgctgcgcttcccgttaggtcacagaatgtttagaaggtcaagatttagtgaagtttgattgcttcctcagggcattctgaagtgaacctgcctgttgccctgaccgtgccttcctcctagagtttggtgtcaatatcttggcccttgcggaggcatccacggttttccccagcatggcttctgtgttgtctttcaccgtgcggtgtgtggtcagccatagtttgtgcaggtgccctttagcagatgggggatgttttactcttttctgcagtgaatatggtggataactctcattggtttccatgtcttcaaccaattttgtgttcctggataaatgcccacctggacttggtgaattactgttttcatagattgctggatttgacgtgtggatatgtttgaggattgtgtgtctgttcatgagaggtgttggtcagcagcattcctggagtgtctgtctgctttgttaggagggcaatcttgcactcataaaatgaggcctcttctatattttggattagtttgtgtaccgttagcattgtctcttctttaaatgcttcataagatttaccagtgaagccatttgtgtttgaagttttctttgtgaaaataacattaactatgaattcagttttttttagtagctatagggccattcaggtcatttatttcttcttgagtgactttttgggattttgtatttgtcaaggaatttgaccatttcatctaagtttgttgaatttattggcctaaagttatttttatattcctttattatccttttaatgtctgtgggattttgagtcatgtccttatttttattcctgatattggtaatttgcactttgtccccttttttgctaactggtctggctagaggtttatctgtttcttttcagagagccaactttcgttacttgatttttctctcttactgatttctcctgtttattattgctttcttgtgcttactttcagtttagtttgctttcttttttgtagtttcttagggtagaggcttagatcatttggttttcctttcttcttttctcatataaacatttaatgctaaaaattctctctaagcactgctttaggtgtgctcacagatagacatgctgtgttttcattttgattcagagtggcgtatttcccaattttccttgtggtttcttctttaatgcttgggttatttattagtacatcatttaatttccaagaatttggggatttaaaaaatatttgggtactttcccagtatttttctgttattgatctgcaggggtgagttaccttgtaatcagaggacatacctgttatgattttaatcctcctagatttgttgagagttgttttacagcccagaatatggtctaccttggtggatgtttgaaaagtgtatactctgtggttcttgggtggagtgctctttaaatgtagttgggtaaggtttgttgataatgctcttcaagccttctatatccttattgaattttgtttccctattctaaaaattattaggagtattgacatctccagctatgattggagacttattacccctttcagttctgttggttcttggttcatctgttctaagtgatttcattaggtgcatacatgtttagaattttaacatcctcatggggaattaacctttactcttatgaaatggccttctctagttttgttgtcatattccttttttgaaattatttgatattaggatagccactccagctttcttttgattagtgtttctgtggtaactgtttttccattcttttatgttgaacctgttcttgtcattacatttaatgtgtgtttcttgtagaaaacacagttgggtctcttgctttaaaaaatctaatctgacaatgtctttgtaaaattggagtatttagaccatttacatttaatgtaattattaatatggttgggtttaagtataccatctggctgttcatttgtcattcaccaatttgttctttttgcccttcctccatcttccgtagcttcttttcagttatttggatatgtttttgaatgattccaatttaacattctgtctacactgttggcttgttagctatctctcttcttttttagtggctgctttaggatgtgtaatgtacatacttagcttatgcttatcataatctgcattcatgtgatataatacaacttcacatgcagaataagcaccttaacaaaagtatgcttcaatttctctcatcccattttttgttatattattgctacatatgtaatattctccaatatatagagttactatttttatgttgggcaatcagttttcttttaaagagatttaaaaaatccagaatttacatttatttgcatatttactgttttttgaaatcctcattcctttgtgtagatcctagtttccattgagtaccattttttttacacctgaaaaccttgtaccatcatttctcaagtgcaggtctgctggtgtctgaattgtcatgcatttgtttttgttttttgaaaaaagcctttgtctcacctgcattcttgaaaaaatgtgaattctaggttgacctgtttttttgctttttaatactttaaagatgttgttccattgtgttctgccttgcatagtttctgatgatcagtttgccgtcattcttaaatttgttcttctgtatgtaatctggcatttttgccacctctggccactaaggttttctctttgtcacttgttttcagctgtttgattatttgtttttatgtttcttctgcttgggtttcactgagcttcttgcatctgtgagaatgggttacatatcccttatctgaaatggttgggactagaagtgtttctgattttggattttttttggattttggaatatttgcatagatagataggtagataaatagatatatagatagatagatatagatatagataccttggggatgtgacccaagtttaaacatggaatttttgtttcacatataccttatccacatagcctgcaggaaatcttatgtattattttaaataattttgtgcatgttacaaaattttgactgtatttcaactgagacctgtcatacaaggtcaggtgtggaattttccaattgtggcattgtgttggtgcagtttttgggttttggagcattttggattaggtgtgctcaaccttgttttacctcatatagatttttcatcagatttgaggaaatgtcactgaatatttcttcagatatttttcctgcctcccctttttctgaggctccaattgcgcatgtgctgcttcatactgtcctgtgtctccctgagccctgctcatttcctcagtctttttgtgtttctgtgccttgatagtttaaaaaacgttattttctcattgttgctattttttccttctgctgcatctaatctgtacatcctatcgattgtattttttactttagagactgcattttacatctctatatgctccatatgggccttttaaaatatcttctatttctcatgtcatatgtgggttctcctctatcttctcaaatatggagcatgtttataagaactgtttttatgtcccagtccccttgttttacgcatctctacttttctgggtttggttctgttgaatgatttttctcctgattgtgggttatatccctctgcttctcatgtgtgtgtgttttaaatgggatcctagacattgagagttttgttgtggagtgctagattatgttgtcttttaaaaaacagttttggactttgttctgctgcaggttcagtttcttgaaattgtttgtatcctttcaaggtatcatgctttttttaaaaaaaggttttgttagggcaggtccagaccaggttttagtccagggatagtttagtcctactatttacataatgtctttactttataagggtgtgtgtatgtgtatatatgtatgtgtgtgtgtattatatatatgtatgtgtgtattttatatatgtgtgtattaaatatatatgtattacatatatatgtatatatatgaaaaataaggcagctctgaggtctttacctgatgaatgttgtattaggagatctttccacactggctggtgagaacatgaaatattcccagctctgtctgtgatcaggaattatttgggctgctacttctgggcatctttctttgacctcagggagttccttctcaagcagtgtctcagtagttaggcagaggccacagggactcttctggagatgcctggcgtgttctctgagtaggcccttcttccctggtactccatcctgatgattctaggtgttttgttctttttgaattctaatctctctccccactttggtgagagcacccactggttttgtgccagatgaccctcctcctccttggcacagcctggaggctgcatccagccgttctctggcggctggctcacttcacttccctttccttggggagcatagcccctggctgctgttgtccttgttctgaagaccattgttttatataaaagttgagcacccctaattcaaaatctgaaatgctacagcatctgaaaatttttgaacattgacatgctgctcaaagctgatgctcaaaggaaatgcttattggagcattttggatttttggattagggatgctccaactgtaagtatttgcaaatattcccaaatccagaaaaatctaaaacctgaagcacttctggttcccagaatttcaggctactcatcctggactttatttcgttttagctgttacatgtggttcttgctgctctgtcatggctagaagtgggatccccaccaagttattagtggactcataaaaataaaagagaggcctgctgggctgttaccagactgagattgctcagattacacaaagccctctggccctgaccccagactttttaccagcctgaagtgggtgaaaagaaagcttcactgactgctttctaggcatgtttaagcctgcttattctggccctcacagaataagaattcaaaggacaataattttcaagaagacttaatttaagttcatctaccttattagacttgatatagatagatagcctttttaatttttttttctcatggaaacagagttgaagaaaactaatttaccttctaaatttaggcacagctaaccaagtcaaggtgtggttctgttcttctctgttctcttctcttctctttttttttttttttttttggtggggggtagacagagtcttgctctgttgctcaggctggagtgcgatggcatgatcttggctcgctgcgacctctgtctcctgggtttaagcaattctcctgccttagcctcccaagtagctgggattacaggtgcccatcaccacgcctggctaattttttgcatttttagtagagatggggttttgccacgttggccaggctattctcgaactcttgacctcaggtgatccacctgcctcagcctccagaagtgctgggattacaggtgtgagccactgcgcccagccggttattgtattttctgtatgctttttggtcgttcagctcatactcagtctttccctgtactgtttgagaaattcacaagtgaatcccagatcacaggtgtttggtgaaattggtataaaccttaactgactttctgttaagaaacataaaaaaatttatttgtatttctactctgaagaaggactgttcaaactttatatggaggggacccaagattgggaaggcagaggaaacaaagggcgtctttgattcacattatttttctcttgtcatcattgcaggcttaagtgtgtgtcatcactagaaatgtattctgttgatgtctgtcatttcagcattttcatgttgtcaaaaatgagaccagacagaagaagagtgtattctttcctgctagaactcgcacaacactgtcattaatgcctctggcagtcaggactttaatcagttaaatgtaatagtggtgataacgttaaagccttgtatggcagtctacccgggcagcctagagagccctgtgcaactctgcatttgaaaaatcaatcaactagggctgtcttttgtcctgggctacttggatagctggtatgaaccacccagcactagcctcctgcttgttgagatgacacttttcctgaagccatgcccactcttgacaaagaataattaggtgccctgcataagtgtatggggacctgcaggtggcttggatggtttgccctgctctcatgggggtccacatgagcatacagaatggaagaagtcatgatggttgcagtggttcctcagaggaacagtgagtttttcaagtaggactctgattatctgtaaaggccaaacttgttccagtgacatcacatctctggggttgctaggaagtaaaggagaaaatgggttcacttgcacagttttggattacatgtaagttttaaagaataggaatgtgtgtgtgtatgtatggtatatacactatattatcattaccaaaaatgatgcctcctatagacttttggtagaaaggaaatttctttctcttctggttgtctgaattttgttttcctttttttttgcttccctccggaagggaatcaaaaaattgtatatatatatgtacacacactatatatgaaatgcctgttcatatcctttctgcctgtgtttctgttgggatttctttttcttattgatttataggattattttatatagtctggattctaatcctttgtcaggtatattggctgcaattttcttctcccagtttgtggcctgcattttcattttctttatacactgctaaccatgtaggtgtatgtatgtatatattctgattgtgggttatatttctttgcttcttatgtgtgtgttttaagttggatcctagacattgagagactgtgtgtgtgtatatatataccatataggggtgtgtgtgtgtgtgtgtgtgtgtatatatatacacacacaaacacacataggtgtatacgcaggtatacacacacacacacacataggtatacacacacacacacacacacacacacacacacacacatgaatatacctatatggttagtagtgggaagccaagctgtttctcactgtcagatggttaagttttgaaattttctctcattctactcaagggtagaatgattggagtgtcagtgttcaatgctacaggacaataacttttgtaaaaatggttaaagcagattagaccccagtcagttaatccacctcctcaccaaaacttggagttatcatgctactaacactgctaacctactgggtaaaaatcctgtctcatagtgatcttaattagcacttccgattgagagcaaccttcagcatcttttcgtgttgccattcatcttttgcgaaatgcctgttcataccctttctgcccatatttctgttggattttctttttgttattaacttataggattatcttatatagtctgaattctaatcctttgtctgttatatgtgctgcaattgtcttctcccagtttgtggccatgttttcattctctttatagtgccttttgatggacaggagtttctaattttaatatagttgcatgtaattgaatttatgattcttttcctttatagtttgcacattttgtgtctcgtttcaaagtgcttccttatccccagtcataacaattccactattttcctatgaaagtatcagttttccttttcatatacaagtctgcagctcatttgaaattaacttctgctgtggtatggagtggaagttcagttcttttttaatatgaataatcagtggctccagccccatgtatagagtaaccccacctttctccagggctctgcagcggcttcactgcaaatatatgacaaacatgtgacatgtggatatagagcaagagaggcactgcagagccctagagaaatgaggagagacacagtaaatggtgctggagctgctgactattccaagtggacgcatgcctttttctaggctctcctgttccattgatctttttgtctttctgtactaacgccacaatgcattaattactatagctttaggctaactcttaaaattgatgagtcagccaggcacagtggctcatgcctgtaatcccagcactttgggagactgaggtgggcagatcatgagttcaggagtttgagaccagtctagccaacatagtgaaaccccatctttactaaaaatagaaaaaattagctgggtgtggtggtgtgtgcctgtaatcccagttactcgggaggctgagacaggggaattgcatgaacccgggaagcggaggttgcagtgagctgagatagcgccattgcactccagcctgggtgacagtgcaggactctgtctcaaaaaaaaaaaaaaaaaaaaaaaaaaattggtgagtaaatcctcatatcttgattttccattttcctcttcaggagtttcttgattcttttggggcctttgctcatccattcgcatttcacaatgagcttgtcacattcttagactaacctgtttggtattttgattgacgtccttgggtctgtagactaatgtggggagaataagatctttaggatatgaatctgcctcttcaggaatatgcgctcttgcactctctgtctctcttggatttccttaatgtctctcacattttaataagttttttcataaacagcttgtgcaccttttgaaatactccccgtgtccttattttttgttgttgccattaatattataaatggtatctttttctaggattagatttttctttatgactgatatgcggaaatgctattaattttcatgtcatctttaatttactttctaattttttaaaatgaatataccacatatatattctttgttttttctacatagacagagttttgcttcttctactctgtaaaccatttctttcttttacttgtcatattgcactaggatctccagttccattttaagtcgatgtggggataatacactcatcttgttgcttattttaaagggaaaactgctaactcttcattaacaaaaatgatgcttgctatagacttttggtagaaagaactttccttctcttctggttatctgaattttgttttcttttttttcttttttcttattttgcttccctccaggagggaaacaaaaaattgtcagaaactatttcagagctgaagaaaacttcttaatctccttctcctctactgttccttgaaaactttttaaaaattatgaacaggcttcaaattttattaagtgatttttctgcatctatttaactgtttatgtggttcccatccccatatctgttagtgtggatcatgacttctagggaattattaatgttaagctatctttgcattcctgggatgaacattacttggccactaagaatcatcctttaaacacctgctctagaccaagcttattaatttattgcttttaactttggccaaactagtggtttaattgtttttaaggttatttattctttattgttattaagattattcttttttaaaaactggttaggttaattatatgaagctatatttttgcacagtctatctttttctaccctttagctttcagcctttgttcttatatttaaaatatgtgtaaagtaatatagttttaaaaatatccagtttggtagtctttattttttaattatttagtccagtcacattaaaataattatagttgagcttacttttaccatcttgctatctgtcttctatttgtcccatctttatttgttcctgtatttctaatttattttgctttctttatgattaatagtttttaaaaccatttttctcccctttctggttatacagatttgtatgtttcatttagtgattagcctagagattataatatacaccctggacttactatagttcacctaaattgctactttgccacttcctgaatagtaaaatactttacaaaatgttagtcatttccctttctcccagcttggatgctgttgtattttaattatatatacacatttaaaatgcagtagtcacttttgtcactgtttaaacgtttggtgtttgtgtcaccgtgccccatgcttgccctccagtgctctccattggttctccatcatcatgccttcgtctggggtgacttctgcttgaaggacttgtttgtttacttagtttttaatgctagtcaactggcagtgaattggtccatttttaaacactaatagttattgattgttgagttagcaattctttaccttataaaatatgacattccatcgtcttctggtttctgaagtttgctgaaaagtcagctgtcagtcttattgttgcacttttgaagataatgcaaatgtttttactctggctgcttttaagattttttctttggtttgaagctaattgtgttatggttctttgaggttttcttcatatttattctgcttagggtttgctgaacttcttgaatttctggattgctctctgtcatctattggcaaattcttgaccctgatcccttcaaatattgctctgcctcatccaatctgtcctttcctctcggagttgaattataggtaggttagtccttttgactgtccctcggatctctattcttgttttctttccattcctttcccctttcttgaccacagtttggatattttctgctgagctctctggcagatcacggaccttgttttctgatgtgtccagtctgttactaaacccatccaatgaatcctgaattacaaattttgtatttttcagttctagaatgcccgttttgtactttaatatatattttaattctatatttaaaattcttctctttcccacttatgttgtctgtcttttcctcttattattaagtgtatccattgtaattattttacacttcttatctgctagcaccagtattgtggacatctattcctctgcttgtattttcttcttttttcccttctctttattattattaaatacatgtttttgctttttgcatgcttttaaaattgtgagtgtttgctggacttgtgcataaaggactgtaaaacctctggattgtcgtgtttttcatcaaagcaaaagctctctttgcccttggttaggcatatggagtgaggggtgaaggaccttggtttcatgagggattgatctgggtcagggctggcctgttattttactaaaactcagtccctagttggaccttccctttgagcatggtcttttgattggaagcccatggtctctttctcctcagcctgtaaatgctttgggagatcccttggttctccccttagaaggttttgagctgagctctttagcttcccacgtcccctgtttcaaagtctcctaaatgtcctgatgggagatgtgactatgtgtgaagcaggcccttctctctctgtctttccgcctacctttcctcccaccccagtctcgtaagtgctattagattaagggatagtgtgcttttccttttaggagccctcacttgacccagctctctaggctcatgaacgcagccccataggatagcaaattgattgcacttttggggttctgattctgatctttcatgccatccccaatgggccacccagagcttccctggtttcccttcccaggtggagtggctttgtgtggactgccacggtgctccccatctgcacccaggatcagcaagtgtttctgggcagcaaagggcagtctccactgtacagtcccagtccccctagtcctggttgcttccacagctctataacattttaaaagacgagttttgtaatttttctgactttttccagttcctgtgggaacattgggctgcctccattagttcgttttgcttggaaatgaaagtccattctgagcacttgcttgaaatcttgattgaagtctttgatttctgctttctccttggtcatgctttctcctgtcatctatcttcctttgcccacacatttcataaatgcttatttcgtattctacacaggttgctttaaatatctgcaatcctgtgggtggagtgtgggctttgtggttttcatctttctgtgatttcttgtaactcttacgatgacacgggaccttgtttgatgacttggttgattattaatttatatgggctgagcctgatctgtttgactcctgagtgcctaaattagggatgcttttccctaagggtgggtgtttgggtttctgttgcctggaaccagggggtctcaaggcagcaccactcagatctaggactttctaaggcttctcactcaatcagggccctcgggttgtcagggaggccccagtggagcgtctggaggtcatgaggtgtgcaccttctctgctgatgctgcccactttccctctgcttcctccagccctggcttactctcctttttccaagtgccccgattctctttggattgcccctgcttactagagaggccattcaggaaactttgaaacattgccatttattcaatatctagtgcatcgtagtcccttaatccaaaacaactggtttggtttttgcataaagctaccagaagataaatatagataaaaatcttgaagatttagaaaaagtaatattaaaatagatccttagatatgttcttatcaacatctgcaagtgttcatcccaatatggattccatcagttagaggggttttaagaggggtcactgtgcgccaggcccagtgtgggatctgggggaggttgtcaaagttgtcttctaatccagaacaacttgctcactaatatttatatttctgccttcaatctgggaagcagcccttttcagaaaggtttgctgcaatactctctaggggacaaagctgagtgaaactctagaggcttgtcttatacgcatagacatcacgtgcacacttacaccccagtcatttccgcatgtgggatcatcacagttgtgtgtttgactttttcacctgaccttgtaagtgcttagccatatattgaactctttaatatcatttttggagatggcatagtgtcctactgtaaagatataaccttcttccattgttaggaatttagggcaatttcatatctgagactctgtcttaaagaattaattaaaattttgtgcacaaagatgtttaatatagtgttttgagaagtcaaaacacagggaagacttcttgtgtcttacactgagaaattcttagccagcctcttagtttcctgaattcaggactgtgttgtgtaattttgaagccccaatagtgatatggtcatttttttcatatcttcattcaaaaaacctcagtcacctggggagtgggtggggtgtgtgctggaccctgaccttgaactgtccagacaagttcctaaccacgtggagctcaagcttccctggggcttacctgaatgacctgctcagtggccagccacttgctgcgtgtcagccggtgaactctgggttcctggcttatcagagacttcaagtcctcattaccttctgggtctcagtttccctaatatgtgcaatgacaggattggccagggctttccaacagaagtttttgcaatgatggaaatgttctgtgtctctgctgcccaatgtggtagccactagtcacattggctgctgggcacttgaaattgactcctgtggcttagaaactgaattttaaattttattacattccaattaatttaaatttaaataagtagccacatgtggctaacagctgcgtatggacactgccagtctagacggatatgatgcttgtttaatggtcttaagaggtctttagagtctattctaatcctgacatctggttttctttgcttgtttgtatttatttgttcctttatttttaccacgactgctctgagtaccaggaactcctttttgggatgtcacagatcaccaacttccttctctgtgctgtgtcaatagggacgtcacccctgtggggaaaggaatttgcctgaacaagacactaaaaagataaaataggctgaagcggagaagaataaaagattgtgctggcatgagctagttttgcaaaacccatttaaataaactcaggatattaccgaccccatgcacacattctttccttgactctgcaatgttccgttaaaccagattgtgaatttttttcaggattaacaatttacatttatgattctattttcttttataagtaactgctatttgtaaatgagactaattatttgaattcatggtacaaataacgtaatttagagttacagaactcttgatcctctgggtctaagcaaaataaacgtagtacctaatgctggaatagagcaagagttttctttgaatctcaaaatatctgcattgtgaaactgggttaagttattttggaaactataaatagtcacttggtaattaggtgtttggttttatttgttctaatggagtgcttattacagtcggtgcatttttaccccacggatcagaagcttttataggccaagtgatgagagaccatcttctacatttcatttgctgattgtgactcatcactgatgatcgatggactgctgaactttttaattcctgtttgcttgtagagaaagaaaattctcatctcttttgataggtcctactccaaaattctgcagccgttttgtacaatcataaccttacacgatatcacacaaaggcagagaaacgattgcatggacatgccttcctgtcaaacgtgtatggaatctggcccgtcctaggcttatctctttccaccaggattcttcttcccatttttctcagcagagcatcttcacgtagttcacatgacatcagaacttcatcaggatgtaagttcctgcagaaataggcctgtgtctggtcagtaaacagagaatgtaatgacattcccagagcattcacaggccagagtctggtgtcctccccagcgtccagcaggctgcggatggatggcatgcagctgacaagattgatactgcattagacattcctggaggtccctgcggctggggactggcactcgcaggcctccccctgcacacagctgtctttggagagcacagagcaatgggaggcggttttgttttactatttgccatttagagtctcacttttaatttatcctcactctttaagaaataattggtaatttatttcttagagatcaaatgttgctacaagctgaaaactgttttataaatatttcaggaaacttgaatgcctggaattttcatcgtcacgcttaagtcttcctccaaaaggggatggacttcgttccatcccgctccaaaagctggtccgattcttgcctgggtgttgtatgctatttgccttttccataggctccaataacaataagtacatcttaaaattgatgaaagtttaatgaatggctagcaagcagagagactacttttataacaagattaataccttggctcaggggacataacattttagtaaaatcaaaatttgtatagttatcctagcggtgcttgcaacctctggcttccatataaaaatgtctaaataaaatactggcagccgtctctagccattatttccatctgctctaggtggcctgacccggaacccactcagggtggtgcactctgggccggggtctctgggatttctgtcgcatcagcttgtgcagccgtggaatggggatggggcactgaggctagctgtcccgtgctctagaggttcctgggaaaaaaatacagagagaaataactcacaagggagccagcatttggtgttgttttaaataaattcattcatcatctataccttttccccttttaattactacactttaaaagggatcttggtatatatttatttttgttttgttaatttttttcttttttaaaaaattaattgtagagatggggtctctctacattgcacaggctcgccttgaactcctggcctcaagtgatccgcctacctcagcctcccaaagtgctggggttacaggcatgacccactgtgcctggccagttttttttccccctttttggcaagggaaggctatcggggtagaagttctgaagcaagtactctgaatggtttctgattttaatagggggagcatcatttcctgatctaatttataatgtgatataaagctgctggccagctgacactaatcttaatttatgatctatttaacctttatatttcctagccacagctcgtaccactcccccgtctctgcaccagcatgtttcagaggcaggcaagcagcatcagttctggatcctggaggcaaggggagggttttcacggaggggcggtgcacagctctgtgcctccccggtcagctggtccggcactgcagtcagcagcaagggcgtggtgagggccctgcagattcttcacactgtcctggtcctctctcctgtttctgaatggcaggactttggggtcagattagaccctgcatgtacatagatgacaacggaatggctttttggggggactttttattttgagataaattttagacttgctgaaaagttgcacaaatagcacaaagtttctgtatgcagccaccatctggtttctgccagcactaacacctcacacttaccacaaccagggcgctaacacgggtgcactactgtaaaccttgccatctctcctttgtctcctctagtgcaatggtctgaatttatgcttcctccaaattcctgtgttgaaactctacccccatggtgatggcctttggaggtggggcctttgggcaatgactaggtcaggctggagccctcagaatgggattagtgtgcctataaaagaggactgagggagctcactgtcctcttccaccacgtgaggacgcggcgagaaggtgctctctgtgaaccaggaagagggcccttatcagacacgggctctggcggcaccttgatcttggacttcacagcctccagaatgtgcgagatgaatttctgttgtttacaaagcacccagtctaaggtattttattccagcaaccagaaggaactaagacgtctaacttgtgacagttcctcttgccttgttttttgtgaccctggaccctttcgaagaatactggtcaggtattttgtaggatgcctctcgtttgggtttgctgatgttgtctcacagagagacagaggttacgtgtttttggtaagaaggctcagaagtgatgtgcccccttgggccatcctgtcctggggacatatgtctgtcagttactgtgatgttagcttggtcactgggtatggtgaatctcttgtgcatttcctcttggtaattgaagttttcccattggtaattaataccttgggggagatattttgagaccattttggttctgctcaggctttcacccactcatcttagtgaccgtgggtgtgtcttgcctgtggcagttattactgtactgtttccctaatgtttgtatttccctccttcccttttcatttaccaacgggaactgttctgtaaggaagagctgtcttttctttcccttttatttattagtcattgaattattcacatcagcgtagactcatggatatttattttaatttctggggtatagtccagtgctgtctttacttaattttgttactcaaatagcccccagtttggctttttggaaactcttgggtttggctcctatgtcttttggacctgcccatcgtttttctagcgctttcctactttctgggatcatagtatgatccaggtgtatcttgtgttttccctgccccagccctggattcagtcacttctccaaggagcctctcttccttttagctggaggatgatgtttagcagccaagatctgggtgctgagtgtgcttgctgctgctgagtcactgctcttcctgcccttctcagtagggggagctaggggctgtatgtgtgtctactgacccgtgcatctgcatttatttctgtgtctgctgtctgcatgcatgttaaaaactgcaagttcatctgatgcctctaacttgaattcatcacagcaggttttattctaatctctgcctttcctctttgtagctgccttctccaacattgagaaacctggccctctttatctgcaacatgtttgcttatatggtggcttcctttaaaaagaatctggtaaaacctgtgtcattgtgtttcagccactagatgcagatgaggcttagtaggaaaagccctacttgtgaagaacagtatttcctatgcttgcttggtggaaaaagtcacagaattttctatagaattctctgtaaacatggttaggaatatagggttgacatttggactcaaatagaaaatgaaatccttttgtttcattacttatttcgttactcagctttcaccttgactcttggaaaactgatggcatgtttccaaatggatatgccagctaattagcttatttctcaaatatccatgttggatgtggaaaacaaataaaaataaagcaaggaagaccctctactgttgttatgtgaagaataacaattacctttaatagcattttctgctaatttagagatttttctttttcttacacttattttctaactcctatgatttgtgtaattcatatcttatacctacatctgattcattatgattcttaattctctttgttgtaaacagaaatattgaaaattcattcgatgaacctaaaaccctttaaaaggtctggttaaattttaacattaagggtgatacagtattcatgctatagaacacagacagtcagaaatcttatgaagtgttggagactttaatggatactgtactatgtagaatctgatcacgagactcctgcttcatcacgtttttactcgaattgggtttcctggtgacaaaagactgtgaagtagctgacggaaatacatccttatgtcagttttcacccgatgactgaaaattgttggatatatgcgtgaaataattaggtcttatttttggaagggagagaatataaccgactgaaaaataatttggagttaattgtcctgaaaattcacctactgtatattaataggttaggtgtttcctaattctttctttcttaagcatatcttccttttccttacactctttttgacacaaacttttgaatatggactcacattataaatcttgggattggaaaggccataaagattggatttttaaaacttcaacaatgtagaggaataccagtgttgtatttgttcagaaagtcctcattggcgctgatttgggcaccgcctggtttcctaccgtagaagcgtgtgctgtggtggggtgaactgggcgggggattcacaccagcctgggccctgggccatggggggctgcctcccagggctgcttcagccgacaggagggtgcggtggtgaagaggcagggctctggggattggaatctccacgcttgactttaggcttctactgctcactcgaaatgggacctgaggcaaattattcacctgcattgtgctgggttcctcacctgtgatacatggattataatatcatctctcttcatgggttattgtaaggattgattttattaatatttcgaatgttaacgttattatttatttattttgagatagagtctggctctgttgcccaggtgcagtggtgcgatctcagctcactgtaacctccacctcctgagcaatcctcgcacctcagcctcctgagtatctgggattacaggtacccaccaccacaccttcctgatttttgtatgtttttgtagagacagtgcttcaccatgttgcccagactggtcttaaacttctgagctcaaactatccgcccgccttagcctcccacagtgctgggattacagacatgagccaccgcacgcagcccaaatgttaagtgtatgacataaaattcagggttactttgcctaaacagttcagtgtctctgattaatgtgatttctgtttcactgacagctttcatgtaaatttaaaactagatagaattacagagcttcagagttgtacagacttgtagaggtaaagtaaagccaaaacattgagctcagtgacggggtcagtcacttcctggtgtcagagtccactgacaggctctggcaactcttgcatcaaaatcctttgcacacaggtcctttcttgctcttagccagtagcagctgtcctgggcagagttccctcagtgaacctggaaacggcagtggctggaggtgagaggtgtccatgtactcacttgttcaaagttgccccctcttccctctctgggcttgggccctgatacctctcagagctaccctgcctcctgcgggggtgggggaggatgcctttattatctctaggccaaaggttggacctccacatatgtccatgatgagggacagcagtcatccctttcaagaccgagaaagtatttaactccttggaaaattgagggtttattttgcagtggtttggaaaatgtgctgagggtggctgtagagttaactaaatagaatgtttcagagtcacagagatttgtaattggtgggcttggtttgtttttatagtgcttactcctttttatctgccttgtggatttatgcatttatttgataagtcagtcatttacctccccattctttggttttcatgtttctgtttatcatcaagataagcaactgtgggttttcttccatcgaagcacctgccgcaggtgatgattttaatggtatgactgccatggtcaccacgaccattccgaggactctaaacatgtttcttgtccaacactactttaatttgaaacaaagcctgaattgagcagcattcgtgtctgtggtagaccagggaggcagggctcacctctgttttcagttcccctttgctggatgtgcaggaggactgccccgttccactccttcaagggtggcttggtcatggacttggtttggctaatgagcgtggcctggagtggcatgtggtgcttcttggtagatgtgtgtgcacaccagctcttggttctccccatgtgatactgggacagctgtgggatgggatgggcgcagcctgtggcatcaagcttgcatgaatcaaggccgctgctggggctagcccagacccgtagtgggtttggtggtggttgttactgcagagcgtcccagccatcctgactagtacagcgtggagtgtgtctatgtcctggagcttggggagagtcctggccgcagtccaggctttgaagaatgttgacttgacctggaatacccacctgtccctggagtgctgtgttcttaggctagttccgtaacctccctgtctgcttcttcatctacacaccatttgatcttccttaggtttgctgtaaggagtaaatgagataacgcatgtaaagcacctggcccggtgccaggcatatttagttaatacgttgcgttcctacccagctagaccttttaacagtccattggcatcaggtcacctacaaaaaggtacagaagctgcctttctctgtggtatttgctttttgattaaaaaaaggaaataaatgatcacataattgttttattttgccttaaaaaatgagtaaaaaaaaaatgtggctcacatatgccagaggtgtgatatgtgagtcgtctctccctgaggaaggctgcagctgaggttgggggtgaattttttcccctgcatgaagaggggtgactggggatggggccgcctcccttcctaaatttccgtgctccctgttggtgtaattaacttaggggaaaccacacgtggggattcaggggcttctccctttattcttttccttaaaatcaagttacatttttttttgagcaataaactttagaacaaaatgaggaatagaaaacaagatgtcgagacaaacaagccttagcgaggcagctgttaaaagcagccggacccaaacagagcataaaaatgcatgtagtccagagaagcactttttctttttacggctctaccccgtatttcatttatatttaaaactgagttgacgaatatgaatacagatatttagagttattgtaaagtcgtatttgtttatgtgcgtggtccagtttccaggccatatcttacagtttaaaagggagagcagttaatggtttcgcccacactgcttggatttttttttttattattatcctccagctcctattcttcaggtgtgcagctattttagtattatgaagaatgatggatgatgcaggaaagtttctttggaagcacttctgatattgtgcaatgcacttgggggtcagctacacttgactgatgcatgatttatccaatgtccctgccacttcccgagataaagctgctgctttatcgaaaatgccagcaactgtgatttagaatttataaacctccgttttcaaataattgttctgattactttctgccttggcaataaaatgataaaggtaattgcacacaaatgtgagatagcaccaaaatacaataaaattaacctgaattagcttgacttgtcgatgagaagtatttatgaaatgtggtgttgcaataagggagggagagtgatattatggctggaaggtgagttattgctttaatgtgatactctttgaaatttaaaaaagagactgtttctgttgagggtgattgtgcttttgaaattaagttgaagtgattcttataattggcaacgagaatgcattttgaaggtaatatcttttattgtgttatgcctagttgcatcaccttttatttagctgtttctggcttcagcttttctaatactcaggtagaagcagacttggaattctgtcggatccaggggctgaaatgttgtattctctttgtagcaatgcccctggtcttaatgttacagactttttcctcctacatttgattaaattgtttagatatcaaaggttaaatattatagctagttaatgtttttttaagtttaaaggcggttttagaaatgtgttttgtttccctgtctttgtgtgcactgggaacatctcattgtagcctgatggtttcaacagtatcagatcagggttccatgtctgatacccatagttcgtaatctgccttttacattcctgaaatgaaattcctggataatatccatctacatgtactatttaaatgaaacactttaggagcagtaatttataataaaataacatgccttcagaacaggaatgcttgggcaggactctgctagcagacataacgtggcaatcaggtgtatgtacctggaacacagcagctgcaaatggagattgagacagttttgtttattggacattcatcatctggtcaacgttgacattggtgatataatttttccaaaatggtggacagcttttgtaaagtttcaaagaaaatgaagttcacctttccattgagttacaggatagttgtgttcttagaaaactttgtgtagagaaaaactgtgcagaaaattttgtgtttgcagtaaacagaattctagtttagggtcttatgaattttagatttgaatgtgttgcaggacagttgaaagtgacacaggttgcaggacgacactgttgtttgggatgggagaacattctacattcttgattccccccttttaaatgtcgatagctcccacaaccattgtgacaactaaaaagtgctttcaaattctcaataaccccctcttgagaaggactagagaggatgccctccagaacatcctcccctggccagattgtgattagatcaggagcttcccagcaccctcctgctcagagagcctgtgccacctcacatgccaccatgggaagcctgagattttggttcccactgttgcctgggaatccatttccaaatgagtggggagagagatgtcatcaaagctgagagtccttggcaattgattgtactgtagtgccctccaccacctttaggacctgattttgtctagcctaggtttgtgtgaatgtggtagggtttttttttctgacttggtaataaagtttgtagtattagtgacttgtaggatatctaacaaagatgaagttttggaaactaaggccaactttggaaagtgttatagacttaaaattgcagcgtgtgtttccccctgttgactttgggagtacagcactggtatgctgtttttccaaggagaatgaagtattgggaaagaattgctcaggaaaaatataactagtaggattttttccagaaataataaatggaattgagaaaattgaagtgaaacaagattctgtggtagataaatatctcttttagtcccccaaccccacttttattttctagtctattgataaactgtatattattatgatagcctactttgactcttggtttgtaaaaatgaaagtataatacaggctttatgattaggctagtgtgaagttacatgttaaaatagggggctgacaacatatcaaatacctgtgtaatttaatattatgtgataaatatgtaaagtaaaaactgagattccattttttccaacattttgacttaaggctgaattttaggggtcattaaattatcatggagctcagatagatacacggtggttctttgtcttactctgggtgtgagcaagctggtcttttccttctttaaaaatggttgagttactttctgtctgcatctgatacatccagtatctcaagtctttgcttgcttattgtacattcatcatctggtcagcatggatattggtgacatcattttcctaagatggtagacagcttttgtaaagtttcaaaggaaattaaagttcaagaacaagctaataaagttttttggcttgttcttgctcatggtgtcttatttccatgttttcctgtttctttgattatactgggcatcatatttgagagattgctcattattcatgagagcagtgtgaagcctgaggggttgtgcttgtccctggggtagtttgatcccttcggtcaggtgctgagcacaccaacaggctttgtgaattgctcagatggccacgagctgagacctgcagagtggtctctcgtctgcagttgctatttttttttttttttttgcagcatttcctcactaggccagtggttttcaactgggggcagttttgtccctcaggggaactttgtcatggtagacatttgtggttgttacaactgagggggtgctgccggcatccagtgggtggaggccagggatgccagtgaacatcccacaacacatgggctagccccacaacaaagaggaattctctctcctgcaatgtcggtactgtcgtggttgagacagttcattggtctctgtagaacttgtttaaagcccagcttgtccctggccccaccccggatttccctgcctaccctcggttcatccatggcatcccatcctcttgggcaggattctcttggtgccatcttggaccccttcttctgttgtgtctttcccatcaccctatggcaaaagagttttccatttctgtggttttccaagcatcccacacctccccttgcagccacatacttagggctggtgaagtagccgttcagtcatctcactggctccagattgttctccaggcatccagggggcatttatgctcatgcccagcgctggtggctgcctcgatgctattgtagatgtccaagtcctgagccctcggactgctttcaaagccccagctgccctaccctgtcctcccatctctcgttcctataatccgctctatccgaaagagtcgacttgccatttgtacaactccatacttcacatttttcttttctctgcctttgtacactctgtttattcaacgtacatagtacaaataccttcttaatctaccccctttaaactcctaaccattgttcaaaactcctcctcctatgaaacttttcttagtccttggatttggatgttgtcatcttcagggcatcttctctgggtttctttgagatcaacacaatatagtcagggctgtgggccctgagcccatctgaataggatcccagtcttcactctgccacttaggggccatgtgtccatcaccaggttacttgagatccccaaacctcagtttccctgtgtctaaagtgggggttccagtgctatgttatgatgctttgccaggctacagtggagagctaggtgaaaatgttcctgcgacgaccagttcctgtgaggaccgggtgaaacaggactgatctagtgttgaaaggtctctgtgagccgtcaggcaggtgacgttggagccagcctctccagggtggtgtgcgtggtgctgcagtctctgcatttatcccatgtccttgggtttggcttccagacggatgtgaatctcccctctggagcatgtagatggaggacaaggcctctggggcaggggtggcctggagacatcgcagtggtcttgtctggtggcacacagacatttcccagtttggtgcgggccgccctgtgcacagctgtcctacagcatcagagcaggctgtggaggcagggccaggctcactgggagcaatggccctgctggaggagatctggctttcagtccctgttcacagagggtcctgctgaattggggacaggggtgccccaggagtgagctctgcagtatgtaggaagtcctagttccggtgctgggggaggaacgtcctgagagtgggccggaggagatggggatttatgagctgagctgtgggaagcaggcttgcagagcctctggtgagtgggccaaaatgacaaatggattctgtgcaactttttattgtccagcctcacactgtatttcttcgcgcactgctgtgtttgccagggttttgattgtattagttacttgtgagatggagaaacctttccgtctcccaaaataaatatggatctgctttcaaaatgttttagctgttaaacttcagcagctagcaaacaagccgaaagcttttgttctcattccaccacaggtttgtagagtttgaatcccagataaaacatgtaccaagccactggattctgggtgggatactaagtcctttgcagggaggtgacgccctttgttctgtgacatttttgtttttgaggagtctcccatttccttctctcaccaagttagttttctgtcttgggtggggctccctaattcttagggacctctggtacagcccagtagcagttctcagcctgtaggtcctagcccgtaggtagacagatgctgtggggcagggccagcccttttgtggagtaaaaagcccttttgcgggtggttctgatggccacaccactccagcccgcctggaagccgccatagagatagctttcacatacctggtgatacgtggcaggtcctagaaggtatgggtgaaggtggtgtgtaccaggggttggcaggggaaggaggaagagaggagtcgtagggctggaaaaggagaaaaaagttgatcttcacctaaaacagtgtgtttgtcagttgagaaaactggttttacacttagaagttaaaggtggagtatatcgaggtaaatgggtgctgacctctctggtatacaacagatttaatttttctttctttcttttttttttttttgttttttgtttgtttttttatttcttttgagatggagttttgctcttgttgcccaggctggagtgcagtggtgcgatcttggctcactgcaacctctgcctcccgggttcaagtgattctcctgcctcagcctcccaagtggctgggattataggcgcctgccacatgcccggctgactttttgtatttttagtagagacggggttttcaccatgttggccaggctggtcttgagctcctgatcgcaggtgatccacccgtctcggcctcccaaagtgctgggattacaggcatgagccaccaggcctggccagatttagttaatttggaaaaccccattaaatagctcagatcagattgcttacttggttgaaaaaaaggcaaaggtaatattttctgtcatgaacaaggtttgtggatattgctaattacttatttgaaagaaataataaaatgaaattcagtaaaatcaaataacttggcagttatttgaaggaagcggctcttttctgctgggctgcgactttgaggagcagttgcgtcatttccgggtgaagccaagagcccttgccatcacctggctccaccagggttctctgtgtgttttccttttgggttgaaattttcccttttagctgcatgagatgtttattattgctactcagaagtgcctggaatctatattgctttaaggtgtgggatgaagtttcctttcatgatggtttaatttttattgcgttcgcatagagcgttgccgccgttcacaggatgcccatgatagtcccgcccctcgagacgacatgcaggattgcaccttccacgcccagcacacaccaggccctgcacacggttcctgtgtgcattagtgtggttgggctccttctctgtgtgtgtgcctggcacattcggatttccttgtgtccttgtgcgatttctatagaaaaaggtgtgttttatcaagtggaaaatagcttacagtaatggtagttaattattttggagttccaagttgtttagaattgatcgaattcctaaatcttgagttaaaattctactctaggatgactaagaaagacatgctgtgtttacgtgtattttccagtttaaccagaggtgactttagacaagtaattctgttctgccaatttatttctctaagtattgtcaatttagctttttcatgggattctgggatacagagttgcttggtccattgaaatctatatatgtaattttgtttttaatcaaacctaacttctgggttttagaaagcatctcctgtccacagcttttgagaaaggtcccgtaaattggatgacaccaaatggctccagcaccagaatgaaaaggaagagcagcagagacttggggcacccacctgggggctgtttcctagtgctgggcagaatcctggggtcagggttggagggccttaaggccagattggaggtgggagcatggcaaggttgccgtgccaggatgcacagtgtccatctggggtcctggagcggcctgggttcttcccgcagggtgctgtcctctgcctgacaagtcctgttccctgtctcctcgggagaacaccagtaccaggactccaggagttgccaggtgggggcatctaaggaaaggaaatgttcatgggatgcgccacagagatgatccctcggagaatattttccggtctttcatagaggctaaaatataacatagttgttagaaatatgtggttttgtaggaagttacataccttggggaaaacgctggaattgacacctgagaatgggtgaaatgttggaagatgttgaacaggtgagaggactgaatcggtgcagagccacacctggtggtgggagcacgttgagggcctgcgggtgcccttgaggaagggttttggtggatgacaaatatgataggaaccacgtgtcttggggaaaacactggaattgatgagtgagaatggatacattattggctctattggaaattatggctgacagatctgaagctctgtcatgcattgggggcttgctggttatttcagtttagtaatttcattgatctgtaacagatatgtgtcaaagagttttaggaagttgatagaagtgtacatattgatgaaaataaaaattcgtaagaaatagatgatgggttcaggtacagaataagggcaggaaaataaatgaaaccagtataccagatgcaggcatgtgcttcccatgatgggaaccccagataccagacgcagccagatgcagccacgtgcttcctgtgatgggaacccggtatactagacgcaggcacgtgcttcatgcagtaggaaccccatatatcggatgcagccacatgcttcctgtgatgggaaccccgtataccagacacaggcacattcttcctgtgatgggaacctggtataccagatgcagccacgtgctttccgtgatgagaaccctgtataccgtccgcagccagacacagacacgtgcttcctgtaatgggaacccgtataccagatgcagcctggtgcttcccatgatgggaaccccatataccagactcagccacgtgcttcatgtgatgggaacccagtatactagatgcaggcacgtgcttcatgtgatgggaacccggtatattagatgcaggcacgtgcttcatgcagtaggaaccctgtatatcagatgcagccacgtgcttcctgtgatgggaaccccgtataccagacacaggcacattcttcctgtgatgggaacctggtataccagatgcagccacgtgctttctgtgatgagaaccccgtataccatctgcagccagacacagacatgtgcttcctgtaatgggaacccgtataccagatgcagcctggtgcttcccatgatgagaaccccatataccagacgcagccacatgcttcatgtgatgggaaccccgtataccagacgcagccacgtgcttcttgtaatgggaaacatctttgaatatgccaggaattaagcagtgagcttcttgatggtcagaacactgatggcacccaaagtagttgcgttaagccagcaccaaggttctgggttgtgtgttttgtttaacacagccatattcacctggccatcagttttttagtgaggagaccttcccagggctattggggatcagatgaggggcctagcatatactaagggcagagctctgaataggttaacaagagccctagatcccattagagctgggactagttttatctgtgcaggcctagagcccccctatgcaaagtggcgtctgggctggcagcatcacctgggcctacccactcctgctgtatcggaatccgcattgcacaagctcccagcactggccgctgtggagggaatggcgctgtctcgtggtaccttctccccaaggctggctgctgctcttccttaggtctgagtctggctgtcctctttccaggtcgaggatttaaagccgcctagctcagggctcagtcctgggtgtgtggctggccaggaaagggcagtgaattcaatttgctaagtgtctgctctgcagatgcaggatgctggagatggggggcgcagaaagaaacaggccctgattctgccctcgcacgtggtggggtagaggcggcgaggtgttggcagccatccctgctttaattgacctgagttgtcattccctcagcgatcagtttcacctgtttgcggactgcctgtagtactgcttgcttcttgttttctttatatcaacttatttttaaacacccgctttaacttcttcctaaggaattgcagtgagaacaagtgtttgctatgctcattttgtttattctgttacacgttaatttaaatctatagttaataaactagtgtctcaactaatctcaccacctgaggcgtgttcaacaccctagagtcagaccacagcctccctgtgacttccccacaccaggtctctggaagggtcgttctcatgcctttgagcttcgggtctttcatcatcagaggaatggactgtgtctcatttgcagggctcttgtaaggattagagaagaggaaagtgagtgcctggcatgaaggaagtaccatcaatgtcactaaacaactcttactattaagtgtttctgagttgagttgtggcttagcgatgcgtgaagcagttgttgaattgtagtctgtgccgttcagtgccttgaatataagtatatttgataacgtttatgataagtgttggtgaggatgtggagaaattggaaccctgtgtgttgctggtgggaatgtgaaatggagcagctgctgtgggacacttctggaggttcctgaaaacatgaagcatagaattcccatgtggcccagcaattctacccctaaggacataccccccaaaattgaaagcagggtcttgagtagatatttgtacactggtgttcatagcagcatcattcacagtggccaaaaggagaacacacacaaacgtctatctgtgagtgaacagatacattaaatgtggcctatccatgcaatggaacattattcagccttagaaagggtgggaattctggcacatgctgcaacatggacaaactttaaagacattacgctgagtgatataagccagtcacaaaaggacaagtactatatgggtccacagacatgaggcacccagaacaggcagattcagagatcaagtagaatagtgggtgctggggggtggggagagctattgttaaatggggacatagcttttgctgaggttaatgagaaaattttggctatagatagaggtgatggatacacaactttgtgaatgtatttaatgccactgaattacacacttacaaaatagttaacataaatattgcattttgccacaataaaaatatatttcctaacatttaaacaaaaggagtgtctgggacgttacctctgacacacctggttatttggcaccaccggcgacccctggctgctggcaggtgtctggagcagcagctcagagcaggaggcccagaatccacagtgccaggtctaggagtgcaggggtgtggcaggaaacgtgaccccgcggctcctcttcagagcctcggggaccaccaaggcagttcttgacactttatcctggccttggtgttcagcatcggaaaacaaggagaactagaatgtcttgactttctaaaggttgttgtaaaacaagggaaggccatgatgcagtgagttttatcacactcttgctgtgaccttcatgaggatgttggagcgtcttttcttcattgcggacagaggcttccaaactccacggctgagccccagttacagtcagtgtgcagtaagtcctgtgggtagtcgtagaagtggagaaaatggcagtatcttttctctaaaaaacgtttacaaacagatacttaatgtgagtttgcttgctaataggttaggttcttagagtttaaagaagtagttaattatcaaagctttttcattcttgacaaccagcatttttcctctaattcaggctacctttgaaatgaacactgcagatctctgagattttcatctgtgaatgttgtttgaagaattcattctgctgcaatttagataaaatgtacctgctgaattttgtaataacattcacaaagttttatatttttgttcgtgtttgaaatatacaatagaggttttcctcgtgatagtgagaatatatcaatatgagagagatacaattatatcaatcaattatttgaacaaagattgggtattgtttacatataattttgtaataattcctatttccaaggaagaacaatgcacaatactttgtcattgtgtcatttatttttattgtagtcttttgtttttattgaaacatagattccatgtataaatgtggattttatgtatatctttccccgtgtatattagaagtatttcaaatcaaataatttggccaaatgatttttctatattaaacattatattttcatttaaaccactataatttctcctagttcagtctgattccttcttgcttttttgcatacagtgagtactatggtccaaatgtttgttctcccacaaaattcatgttgaaacctcgcccgtaagttgttggtattaagagttggggcctttggggggagattaggttagtgcccttatgaaagagactccaaagaggtagagccctcgacgattgaggatgcagcaggaaggcgccatctgcgaggaagtggggcctcaccaggcactgaatctgccggcgccttggtcttagacttcctggcctccacaactgtgagaaagaaatgtctgttgtttatgagccacgcagtctataggattttgttatggcagctcagatggcctaacacagtgagcatgccccacccggagatggccttgcccctcttgctgtcagcatcaggactgacagaagctgggcccatgcagattttccggaagctgtgtcaggtattgggggtcattggactctaaccagtacccagcagacagatgggacctgagagaaagggttggggtctgccccttctccgctcctcagcttcctgcagtggctgggggcaggaaggagggcacagttcaggggattgagagacgtgtgctgactgtccagcagcagcagatccacctgcaggcacagtgcagcctggtgtctcgtctgagaggacacgtgtgcaggacaggcgggacccacagctgctgcttccccactcgccaaggccccgtcaggagcagcagctgcggccctgggagcccacagtccagccaggaggtggtgagcacagggcggagtgtggggttggggactccacttgtggtgttcccagatttgggggatttccgcaaggccccgttgaagggcagtgctccttagatacagtgcagagtccttggggtgagggtcctgtctcattacttgatagcacgtgtcctgtctcattacttgatagcacatgtttcagctggctctttaatgggaaagttggtgctttagtggaagctccagtcccctagatacagagtgtattgcggatatttatcccttcctggctgagcgcggggcagtttctgcctgcagatttgggctctggctctgggttatggacctttgaatgtggccatgccagagtttgtgaccttgacgtcttgaggcatcctgtaagtggtatgacctcaagggaagaaagctagcgtggcctgcatacaggtgggcctgtggactgtaaaagcaggtttacttagcgggagtaattacccatgttgatgacagcctctaacagaggtgcagtcttcaaattcacatttaaatgtctctgcctgctactgagaaatccacagcaagggaaaagagcaaaacagtctttctgtgaagggtctgttttattttttattttattttattttaattaatgagacggtgatcatccagggaacaggatctaaacgcagtctttgaacttgaactctgtatgtggtgtctacaggtttgggtgtgagcagcctcactctgtgctggttcccagcttaaacgtccaaggaagagctcatgacagtttttatattagttctttaaatattttattgtaagttcgtctcttcccagcccctcttgctatttttattgctccatttgaagttccagccaatagcccaggccctttctgtctttgatgtctgtatggtgggcaagatctcatcacgacccacatcagctttgctgttagaaacgtgttgccacagaggagcacattcataattgaaatcaccaaatagggaattctttctagaggcagtggctgcctcagtgaaacgtgcatggctgagcagagcaaggaagagttagtggggccgggggcgtgctgatatcacagtggcgtggggtggggtgaagggatacaggtgtgtccctcctcttacccggcatggtgtttccagaaagcagatgggagagctgtgtgatgaacaggtgagacactggctggacccaggtgagctgctatagaagcagaatcaaaaccgtgtagcacgttgccttccctttcccaatactgtaaagaattcctcttcaatggaaatctacttcaaacttttatcagattaattttaataaaaagctgaatcaatacgaagcagcttgggaaaacagctttcccccaccccagcccccaccaccaataacattttacagattcaggcccagtatttcttgtttctaatgagatggaaggagcggtattcttggcacctgctcatctccttccctttggaaactcagccaggtttttgtcgttagcttatgggtcgctaatgttatgtgcactcatagcagaaatggaaatccgccatcggtgaaagtggagacctttgagaatttatgcagcatcaaaatgtaaataccaactcttatagaatattggggttagcaatgtcgacagttctaccccgagtgcggttggtggtggggctccaatggaaacaaactggtgtccagcagtcagctgtctgcgcatccgtccctcccactccagcttctccaggtaagactggccatgtgagcacagagggtagaagaaggccttagggacaccttagaatgggaggagaggtcatagctggagctccgcttgggggtttctggtgctccgcccatggctcctggacagcgaggggcagtcttctgaatggacctcagaggtcctgtggtcctctttggccagagggcacgggcccccttagctcatttctagtaatgggatgggtgggtgttaggaggaaacacgcagcccagcacaggctccccagagcacatcgtgaatctttctgtcgcctccctgccccacctcacctctgttctgtggcctccctgcactgtgcccctcctgtgtcctcagttgccacatgactgacacgtgcttggggctcatttgatggctctggcaactttctctacctcggtttaccttttggctgcccagtgctggatcgccagtctgctttactgttcacgggaggaagggtgtcacggcgtcacacatgggcatggcacctgcgctggggctcacctgtctcatgaggccgtatgtcgcacaaggcttcttgagggtggggtggccatgagcgagagcgctcgcctctgtccttttcctgttgcagaggaggaaaaagtctggggccctgtttgctcagggtgggctgaggcccagaccagcttcctgtctccacaccctgactccaaaccctcactgtgaccccacgggaaagcatattcccaaatgtaactgcgacgccgcagcccgggactgctgattgaatgaatgagtattctcctttgggtttcccacagaagttttcccccagttccctaccatgatgggttgtggctttgtcacccgcagtgagaatatgcgaatgctttagcagatgttgtgtggctcgggcctgcctgccttatttggagatatttcgcacctctgtgggctcccagtggcaggcatctctggggagggagcgctgtctccatcgtcctttgggaggatgtgggatggctgcaccgggcaccactctcacatggtctccacatcaggaagcgtatctcaccgtgtccagcattggtgtcctggccagatgctctgtttataatgatagaaaaaaaatttttcatctctgaaatttgccaccttctttcagcagcatttcacttggtttacttccttaattcacgaaatatgtgaaaaaactttataaatcttaaagatgagaaaattctaaatgatgtgtgtacagatacacacacatacacacacacacacacacacacacacacacacacacatttggcccttggacaagacaggtctgaactgtgtggatccacttacacttagatgttcttctacctcagccaccgcagagacagcaagactgcccctgcccctcctcccctcccttccccctgcccctcctcccctcccttccccctgcccctcctcccctcccttccccctccccctcctcccctcccttccccctccccctccccagcctactcaccatggagatgatgaagaccttcatgataatccacttccacttaatgaatagtaaatagattttcacgtccttaggattgtcttaataactttttctagtttattttactgtaagaatacagtgtataatatgggtaacatacacaatatgtgttagttgaatgtttatgttatcattaagacttccattcaacagtagggtattagcagttaagttttgggggagtcaaaaggttatgtggatttttgactgtgtggggcttcaacagcccaacccctgcactgtccgagcatcagctgtatacatacatattttgccgtttgtattatagtagctctgtgcatggggcatgtctccgcaggaagagggactgtcctgactcttgggcctggtggtgattgtctggggcactcctcccagagccctgactactgacaggtcacttcaagaatcaaagaacctcgactatgatgtcatttttctgtaagccctggactactataaattatgttttatctgtcataattaagactcggagactaccaagctgtcttcgaggggaaaggcctgtccctttctccagagaaataattaattgttagagtatatggtttttgaagaatttactgtaagataaaagactggtattttattcttgcatttattagtatttaatcaaatggaaagtgcactttcagcctggaaatcttggcttcagctgcaggattagactgaattattgtttaaagagtaaaaggtatagaattatatgttcaagttatcaagccactgataggttttgggtataatgtaactaatttagaacataaaatttcctgccttgtggactagagcatcggattaatcatttggaagcggggcgcacttcctctgctgcgtggccttgcggtgagatggagcctgtcgctccaggagcacgagacctttacggagttcagtgccgtcaaggcccacttgtccacagccaccggagcatgttgggaacaccgggagccgctggaacgtgtctggaacaccaggctcttccattcgggacactgagtcataaatcatcccatgtgtctcatgcaagaattcttccctgcagaaatttcatgaaacttagtctttgctaagggtaaagaggatttaattctctttgttctcagtggtgtgcaggcttaatgctcatgggtgttgactggtggccggcacatcagtggctcgtgggtgttgacttgtggctcctggcattgctttgcattagaggatagccggcctctctacaccatgacttagaaaattccagccaggcacagtggcttacacctgtaatctcagtgctatgggaggattgcgtgaagccagaagtttgagttcagcctgggcaacatagcaagaccctatctctaccaaaaaagaaaaagaataaagaaaattccagaaaacgtttgtgacagcatcactgttgaggttgtagtgccacaggcagtgcagcaagcatctggtttatctgcgtgagctcatgacgtgttcatcagtgggcagaaaaagatgggatcagacaaaacagatgctttcaggatccttcagatcaggatggcaaatgtttcctgaaatgggccaggccagaaatatttctggctctgtgatgtacagccgctggcacagctacctgaccctgctgttagagctgctgcagacaggacccagaggaggagtggggctgctacccatgatgctagaccgaggttgccgaaactggagtgtcccattgtatgcacgtgtcctaaagcatctccttccatctccttgtctactcctaccgtgcgcatacagagcccctatggtgcgagtacagagcccctgtggtgcatgtacagagcccctatggtgcaggtgcagagcccctacggtgcaggtgcagagcctctacagtgcatgtacagagcccctaccgtgcaggtgcagagcctctatggtgcggtgcagagcccctatggtatgctttcagagcccctaaggtgcacctacagaacccctaaagtgcaggtgcagaatccctacagtgtatgtgcagagcccctacggtgcgggtacagaacccctacggtgagggtgcagaccccctatggtgcgggtacagaacccctacggtgagggtgcagaacccctaaggtgtgcctgcagagcccctatggtgcgggtgcagagcccctacggtgcgggtacagaacccctatggtgcatgtacagaccccatatggtgcgggtacagagcccctacagtgcgggtgcagagcccctatggtgtgcatacagaacccctacggtgcgggtacacagcccctaaggtgtgcctacagagcccctacggtgagggtgcagagcccctacggtgcgcgtacggggcccctacggcacgcaggcttgccccgccacctgctgtccccggattcctgtcagatgtccgggtgcccagcctgactgggcatggccctcctggaagcagtttcagggccagttctgatctcaggtggggatggagagctggtgtctgggcctctcagagctcaggccccgcacatcgtcagagtgacctcaccagctccaagtgccccttttccctcagtttcattatttgggaagtgaggaggtcacaccaggctggacacgggatttcaatccgtgtgtccccctgttgcccggggtggctgcatgcagggtgagttcagggaagctctggatgcagtgagcgaggccccgcccagcctcttggtgggagtcactggcctcacagctcactgcaattcagagacctgcagtgtgaagattcttccagattactggatggaagggacttcagtgacctcatgtaagaaaggaagtcacccactggtagcctcagagagggaacctctggcagtctggctcacagccggggctagattcaaactgtatccaagagcagctgctgagagacccacctcagtcctgcaggagtccaggctctctcccaggcccccagggagggtgtttccacctggtaccttggggagatgtgaccagagctgctggagggagcgtctacctgctggggtcagggggtctccatccgcccacagtgtcggctcaagaagtgtgtgctgtccaccccaggcccagggcaagtcccacgaggccgaggctgcaccttgctgtccagggggccgcagctgaggcctgtgcagcctccccggtgctagtgccagcatggtacaggagtcgcagctccaggaggacatgcaggctgcctgccatgagaacatccctctgctgtttgcagaccgaggcccatgggtgcagaaggaagcgtgccggtgcagggcacgcagggccgatgggagatggactgaccagtggtctggaccgagcaggcagcaaagggccctgtgtgctgaactgagctgctgggacttaatgcacacagaaccacagaaccacagaacgtaatggagaagaattgggtaagggtgagtgggagataaagaagccatcagaatgctgctgagtctggtgggggttggaggtcaccggaaatagctcctcccaagttttactcagatcttcttggcagggtgcatcttagcatttgtagaatgcaccaaggaatgcctgggaagggcatgggggccctgcaggggtcacaggctgggagaggaggggcttactgccttgggcccctggacacaggtaatgcctttgcctcaggtggccagaagtgcctgtaggctttgcagaaagctactgttcctttcctgtgtgggtgtgtgactcctggacggttgccggagattgccctgaggctggggtgggtgcccgtcctggagcccccatcccacagtgctctttgtccgtaggatctgcgcacacaagggtttggttgttgaacctggagacacacattatggtgaatcccagtgttgactgattatatcattaagtgggtcacatgacacaaaaaccacacgttctgaatgtacaaattccatcccagtgcaggtggaaatttgtattaaccatggctttcttcacatggcttctttgcaaacaaacacttggtactttgctagtacaaggtccttccttggtggggaggggtgtaatcccatgtcgatgtctggacgaggagaaagaggaacttcccctcagccagtggacgagactgtccaggctgctccacagtggccacagagagcccccggcacctgctcggggcaggaattggtggctttggccaccttgcttaattgagaaagttgatgtttccgtcagatcttcttgtgttcgcacatgttacctattctctaagaagtcagtgaaacttcacccaactttagaggctataaagaatgaggttattttctgccatgacatatttaagctgaagcttcccaagccataacagttttaagaagtgacatttcattttgaacaccagcctgccacctctttactcctcatgacagactgtcactgtgcagcgcagcagttagttggttcctgaagtgccagaaaattcccaggttgtgaggagtgtgctgctggtggggtgagatgtgcgacccggcgggggcctcggcgggcacaggcgggagacccgggccagagccctgtggggtgagcgccatcctggccaggccacacggccggggcagcttctttcccttctgcaaggcagttggcattatcgcggatgttagcataggaagttctagcgggactagttaaaaatgagggaaaacatggtgttctctcattgtctttttcctagtaaactaaaggaatcatgcttgatgaaggctcaagtgtagtatgattcaatcgggcatgagactgtgctgaggtctcggatgtctcgggcctggggtcagcttgaagagattcataggcgggtctcgaagcccatgctgctgggagggccgggctgccgacgtggacgggtacagctccctggttcacacaagacttggggttccctccaccgtggaatccgtcttgctttcacgggatttggggactgtgaaatctcttctcttctaatgcattcccgttgtctagaggctggggagcaccatttgattttaaaggacagccacagtcctgccagctccatagagagagcagaggtggcctcatgttctgagcagagggtgccatggtatttctgaccaggcgggaccctggctggactcacgagattgtgtgagtccacaatgtgcttgtcagaagccaggcgtcctggagttagggtcagattcccatggtgggtttcattaccctcctagagactggcggggtcccagcctcttggaagtgtccgctcagacactgccaggtgccttggaggtagcagaagcatctcttgatggcaagtgtccattgtgacctgtgttgaagacaaggtctgtgtgagaaggtgcactggtacctactgtgtcctgatgacctgggagtgtcgtgaagacagagcagccagtgaccttctgaaaccaaaagagtggctgcccactctgcctcctggctctggcacggggacggctccagggttctaaggcctaagctggctgcactacctcccgccctcaaggacgattggcatctctggcgtgctcaggcccctgcagccttgccaaacaaacaaacaaacaaaaacaacttgtaatttttcattttatctgtattttgccattaaaatgttgttctctacacaattagctgcaggacgcacagtgtttagcctgtggacgtgtctcccagctctgccatgcaccgtgcgtgtacacctgagtgtactcaggtttgcatacccccgacactgggacattgatgtcatggaatctcttcatatagatttttctttggtctgcagtgacatggcaagtggtaaagccttttatgaaacctcttaaagaaacagatgatagttactaagaagcttccaaaaagactttttttttttttttttttttttttttgagacagagtctcgctctgtcgcccaggctggagtgcagtggcgtgatctcagctcactgcaacctccgcctcccgggttcacgccattctcctgcctcagcctcccgagtagctgggactacagacgcctgccaccatgcccggcttatttttttatttttagtagagacggggtttcaccgtgttagccaggatggtctggatctcctgacctcgtgatccacacgcctcggcctcccaaagtgctgggattacagttgtgagccaccgcacccggccccagaaagacgtttataggctcatcttgacagtgttctggtatcacaaaccaattgtcagttagagctagagttggtttagctaaactgtcggaatggatatgggagtggcagttataatctggaaacattgttccaaagtgctttaagttccagggaatttttggagcaatttgttaaaactgtacacatttacgttttctgcccttttctctaggtgtgatctatttctttcacacacacacacagcagtttgtatgttaactgcttgctgactgatttcctgcttgattgcacagattcaaagcagtgcatgagcttcagaacagcgtttatcttcctgcattactcatatttagttccatatatgtaccaaagagaagagttcagaaaagaaaaccagattttattttaagtatgatttttaaatgtagacaggtgccagtttatatctcaaaatgggtgatttaaagaccagtgaacagatttccttagatgtccgtctgcttctgggatctgatgtgtaggcatcttcacgttggttttataatgtgccacgcgtcaggtgttatttcgatgactatgctgagccctttaataagacgcacgtgcctggggtgcttctggaaccttgccaccagggctcattctttgaccatccctaattccccagggctcttgttgttagagtattctttacaaccaaagcatcattaatcagaaaggtgctgtgcggtgcggggccggctccgatgacagtaataaaaaccggcacacctcctgttccaggacccagaccctggaagtctgtgcctaagccaagacatgagcagcgtttgtggaatgcggcttcagatagaaaccttctttcaatttgcaggcctggttatgtaattctaatgcagaatctcccccttcgtgtttgcatgcgtgtagccgggttcacagaactttagccacaaacaggagtgtttccctttttccagggctcccgtgttaggcccccaccaggaggctttggggtggcgtttgggaacgccgtttggatcccttctcagtttgacatcctaggtggcagctccagttttgtttggtgaaacgatttcaatgtaacagaacccctttcggttgtgagagcagaatgaactgagccgcacttgactgtcttgtgctggatgtgacccagccgaatccacggggagacccctggttacagcggggaccacgggtggggtctcagccgtggccctttatacttggtgagcatcagccacaccacgtggccaggtttatgatcaggtgatagggatgaagtgtttttgacacatgcttttctttttttaaattaaaatactatctcatgcctgattttgaggtgggctgagcatgagtcctgaggatgagaggggcttccccaatgccccttattccctgttcagaagggagattgcaaagctagttttcatcttgtgatgtctttgtgggaggttgtgaggcagtcagacacggtcctcttcctcccccaggtgagccaatctcccccttcacacagacccgaagcccaggccacaagggacctgggctaccttgtttgtaaacagcttacaaggaggctggtgatttctcccttttaacatgttcgtttttatgtttttgaggtgtggtctcactgtgctgcccaggctggtctgcaactccaggactcaggcgattctcccacctccgcctctggataggtcggaccgcaggtgcacgtcaccacacccggctagtctgtttctgtgtgttttcattgcacaggataccagcagtggaaatggttaagagggaaagacacagagctgcaaagatggtcctggaaggacggtttttagacctgacagtttttagtgcagcaggcctggaaaacgactaccagtaggggaaaaagaagagtttctgtttctgggtctcttccttttaatatggcaggaactggcctctggcgccaactgcttaattcagaacattgttatttaaacgccattcatgttaaaagggagatgaaacgaaattcatttttccagaggtctccaaatagccatgaaaaataaatttttttctgccaccaagtaccatcagccactcatgtggtttaggtggatgccgtggtggtgccgggagcactaccagcctgtggggccgtgggcttgtgcttcgccggagtgggaagtggggacattaggaagcccgactgttgaatcgcctgggcgtcctaaatgtgggctgtgttgtcgtccctgtgcaagcctgagaggcagacagcactgagtccactggatgcctgcttgtctggttgccccttagactatggtactctcagcaacacggctgtcccattatgtgcacatgccctgttacagcttttggagccccccttaggaccgatggttcgaattctggaagtcctaaacatttgggtcttccacgtcgctgtttattctgcagatttgaggctggcgtgtttgagttagacgggacactggggctgcccgctttcctttgatggtacgccgagggcctctctgccccgtgtgttccctgaggttccagtgggctgcttcagggaaggcgggccgggaattcctctctgtaagacaggccccgttttatgcagctgtgaaccttgtgcttgggtgtagtaggtggtcggctcttttcttttctcctgttcacagcacgcttatagccagagcagactctatggtttgcctggagagagcttgcacacacatcgtcaccctgtctctggtggttgtggctgcagcctcccagacgcctctccctgtccccacccttgacacgcctggaatccgtgttctccctcgtttctccgacttcatcccaggacttggccctcacggctccaggagctgctgaggcagcttcatctcaaagccaggtcctctccctcctggtgacctggccaccaccttctgctccttaatgctctgtgctgcttccagcgccagtgcctttgcctgtgcgcacctgcctgcctcagtctctcctctcctcctcctctccacccagaaaactacaacactatcccttctctctcagcacctcctccaggaagccttcctggactccccaggacatccaaccccttgatacaggctctcattaatcctggagttctccttctgaattcctatctcaattatcattgcatgattcatataattagatattttgttcaacatatatttgctgagaaatcgtgggtgccaggcactgttattctaaatgctggggatacagcagtagatcagctaagactactctggtttgaagaaaaaacaggaattcctcagaacacagacttgaaaccagcccaacgttcctgttctcacacaaggagaagcctagccagccatggagagctgcagtggtatagtggccatggagagctgcagtgtagtggctgtggagagctgcggtggtgtagttgtgcttctctgagaaagtgacgtctgagcatggttgtgagtgggatgacagtggccactgtgcaggctgggaaggagacagcagtagcacggaggctgtgaagcgagagcgaggctggagtgtgaggggcagtggcggggggagcgggggcgtgggtgcgatggggtcatgggggactgaggccagagaaggaagtgtggccctgccgaatttgggaccatttgggctagggggcccccaaagagacctgccgtgtggagactagccatggagaaccgtggtggcggagtggccgtggagagctgcggtggtggagtagctcacagtgttgggccctgatctgtcaaggcttttggccttttcctcatgatcactaggtggttgccacagctccagccatcacatctgccatgtcaaggaaggaagggtaggggatggtgccatctgactttagaaaaagtatatgaaaacaagaactctctgcaggcttctcctcgctctttggctacagttgtgacacatttgctgcctgtattggagcttacattctagtgaaggtgacacaacaagtaagcaaatcacgtcactgtgattccaggtcatgtaaggaaaataaggcagagaaagaaggggtggaggtggtgactgttttcggcggcttctctgagaaagtgacgtctgagcatggttgtgagtgagatgacagtggccactgtgcaggctgggaaggagacagagcggtagagcggaggctgtgaagcgagagcgaggctggagtgtgaggggcagtggcagggggagcgggggcgtgggtgcgatggggtcatgggggactgaggccagagaaggaagtgtgggcctgccgaatttgggaccatttgggctagggggtccccaatttttttggcaccagggaccagttttgtggaagactaacttttccacagatgggagtggggggatggtttggggatgaaactgttccacctcagatcaccaggcactagattctcataagaagcgtccagcctagatccctcccatgcacagttcacaataggcttcacactcctatgagaatttaatgctgccgctgacctgacagtaacgctggctcacccgctgcttacctcctcctctgtggcccgtttcctaacaggccacggactggacccctggtttaagccatatccacaggaagtgttttctcatcgtgatggaaatgaagggaagatgtgatctgatttacttgtgtgtgttttcattttattctaatctttatttttttaactcagaattattttacacctcagtttttattcagaaaagcattaaccatcatttgttttgcatataagacatggtgagatcacaataagtggagaatgtttgccatcgtttttctacttgacatcaacagtgtaacattagcttttttttgtatgttatatttacccatgtattcataatttggggtactctttatttctttgtatagctctcatttttctttttccttttttttctttctttttgtggggacagggtcttgctctgttacccaggctggagtgcagtggcactaccgtggctcactgcagcctcgacctcctgggctcaagcaatcctcctgcctcagcctcccgagtagctggaactacaggcacatgccaccagcctggctaatgtttttatgttttttagtagagctggggtttcgccacattgcccagactggtcttgaactcgtgggctgaagtgatcctcctgcctcggcctgccaaagttctgggattacgggtgtgagccaccatgactggcccagattggatattaatacagtttttttctccttgaaaagttgactcgtactaactgtagaaagctgagagaatgcagataaaaaaggaatagtttaaatcatcctaccttatttgattttttaaaaataaactgattttggaataatcttagatttttggaaaagttgcaagcaacgtatggtgtggtttactttttgtgggtaatttttctccccccaggagatcacatttgtctccttccagtttctggcaccttagcccagtagctcctgtgtaggggtgctaaggcattggttaaacgtctcttgatcgttcctggtttgtttcccgttattttgtctcccttttgcttctcccctggttgggtttctcctcacttctcagtgggttatttccacaatcgaccttggttctggaccagtcttgacagagctgccagagggagcctcgaaatgcaaaccagctgcatctcctcttgttgaaaactctgtggcttttcagggaaaaggcagccagcaggaccggcctggccatggcggcctcagggcccgagggtggctgtgtcccccacgcctctccaggcacaccaggcctcatcccccagctctcgtggcgggtgccttcaccctggcctgcgtggctcctcgcccgggggcccctccccatagttcagttctctgtgtaggtgtcagtttctccataagctctcagctgcccacactctccccccgaagtgtggccccagccctgcggagtggttccctaaccgccactctgcccacctcgtgctagcctgggtgtgggcttgcctgctggctctgggctcaggctggggtgctgtcagggttgcaggggtcacagtgaatcttcatcttccgtgggccagtccccttcccagcgtccctcctggggctgtgggtctggcctcccccgttgaatggccctctcttgaggttgttgggcattggtgaagatcctgatggggtctcatcactggagtcagacgtctttcttcctgggtctggggcatggcggtattactgtgcgggctgttgggagagggtctgttaccctcatggctgcttgtgacctgtccaggccaccactgtgccagcctttgtgtggctggtattgtggcttctaagttgagcctccgcctggctgggttgcgatggtttcactcctgtcaggttttcatgctattgaaactcacttttctcactgcctgatttctgccttttgtgggtccctcctggtgtccgtgatgccctcatttagtctgcaggcatccccccacctctctgctcgcccggtgtgcacacctgctaggtcagccctgggcatcgcatcagagacgctgccgtgctcggtggcctggggcttctgtcctgtagaggcctcagccattgcattttaggaatcggcactaaactaacttctactgctgcccacagaagaactgtgccaaatgctctggttgtctaccggaaaaaaaggtagtatgcaggtttcagtggcatatcaaattccatttctgtgggcctttgtgggaggcttgctcttagcgggggctggtgggggtgggggggggtgggggtttgtgggggtgggttccagctcattgttgtgttcaggtgaaatgaggcagggctttattttgatcctatttaggttgtaagcaggtctgaggaattcacttcctcatgcttcacatacctaaataattagccagttggatatggacaggagctggaatctgttgctcatttgtaagccagattctgaactcattcattgttgcagttataaactggttgccttttttcggttcttggaatgatttggatggagctcacctggtccccccagctccctgctttgtgattgattcagtgtgttcccatggcttcaggccacctttgctggtcaggggagctggttcagagggcttgaggccagcctgccctttggatgagaggcccatgccatgatgctggtcatggggatagcaccacagggctcagtcggggatatgccagagctttagggtcccttgggccagcagctggggtccttgggcatttcctgggtggcggtgctctctggggtgcagagttggtcattccagggcaggcagttcacttggccacaccaggtttggctggaagccttctccaccgcattcccaaccgctggcctcccaagtttggcttcttgtggtcagggcccagaccatgataaccttgaggactcctctctccgggagactgtcggggctaagctgcctgtggccctccaccgccctgctccttcctccgggtgggggacaccccatcccccatgcccctacttcagcttgctgggattcacccccagtggccttccaaggctcctacctttctccctggccctgtctctgcacactccaatgtcttcccctttggctgacgcttggattgggggtgaactcgaggtgtggtctgtgcagaatggcgtgacagcccttccagcccgtcacggtgtgtagtgcccaaagccctggccgtggccatctcaggttagaccctcagagtggcactgtcaggtagaggagtcaggggtcttattgatgaggaaatagaggcttgagagaggagtgcgcagctagtgtctgaccagcccccacatggggcactccccagtccgaatgtctgcagtgcagcttcaggcgctgatgtgggcaaacccttcctctcccaggccgtcccttcctgcagctgctcggacactggcacatgttggcaggcgtcagcaccagggctgggctcctgcctgggactcgaatcgggagcaggtcccacggaggcagagcagccgagaatcaacggtggccatagccaccacatcctgtttccaggggcaatggtggcaacagtgccagctgccctgcctgctgtgcctggttgccccacagatgtttcctgaagcttgattttggctgtgattggagcgtggccagttctggttcctgctattttctgagcctgctcctccagccttcccagaagttctttgagttgtggagtagcctttcagtaaacggcatttgtgcttaaattagcccgtgtcagtttctgacacctgctgttaagagtgctacctgatgcaggtgctcggggctggccaggatccccacctgagtctggagccctgagcccaggcctcctgactccgacagcctgcagccctgcccgaactgggatgatagagcagcaaacatggctccatggagagcgaaacccaagctgggctgtttactgccagtctgctgggagctttgacccaccatcgtgcagggcgagtttccaagaaatggcgagagagcatccagatttctcacgttgcctctagagccctgttgtctgaccagtatcttctgtgaacatactttgggaaatgatctcatggacgcttggcctggatggtggtcacactggtaattcagttccacaagtattttatgagccccttgtgtgtgtgatgtgtgctgttcttcagggagccctgagcagagctgccagcatcctgcctgagaagcagtggcccgggatggtgggagatgtctgcaggcgcagggcggaggctgtgggccaagattgtggctctgagaaatggagatgggagaaggggaggcagtcactttggaagaatgggcgggatggtgatgatttgaatgagacttgggggagttggggcagcgtactccaggggataagatcagaggtgaagggggttgggctaaaatgttgatcatggtgggaacagtagtgatccccaaatcctacagagcctttgggaagcctggtctttgcatacgttccctctaaactcgtgccgacgttgtgatttggtctgatttatcctacagacaaagacagttgaagcaccaagagtgattttctcacagcaaagggacagagggtgggaggccgtgatttgcaccccctgcctttatctggcccctgccacatggtaagtggaaggcaggtggctccttccacagggctctctttgccctctcgggaagcctggtttttacccttgaggcagcagggaggctgcagggtgagatgttgaaggagtgtgatgtgggcagagcctctgtgatggggcatggtttctggcacatcccatttccatattctggggtgatcgaatgggatccggttcaaatccctgtcagtctgcacagaaaaggggaggttttgcaggcggctctggagtgtgacagttgaggattgaatcttgagagtaatgcttctacaaaacacttgtgtagtttgcggtccgctgcccgaccctggtccctttaagggacataaatgcacctctctctcctcgttcttggaaagacagatgagagaaccaaagagtggccttagaagcatatgtaagacacagaaaggaaagatcagctggagtgctggtgaagggtttcacaggataggagaccaggcagcaaggtgcccagcggacaagcagggagggggccttcagtgaaggcgcagagatttgggatgcatgtgggattcagacctgcttcattgtgggaacagagcaggaaggtgccagtgagctgcccttccaggggtcagcagacctttctgtagagggttccaggggtccgcaggccttttctgtagagggccagagagtcagtgttctgcgcttgcagggccacactgcctctgtcacaactgctcacctctgccactgtagcacggaagcagcaggagattgtgtgtaaataaatgaacacaattgtgtctcaataaaactttatttacaaagacaggtgcagtgagtgagctttgccccacaggctctaatttgttgcccctgctccagccccttgatgtagggagcctttgctttgttgttctcagtgaactttgagggctgatggttgggttggagtggaaagagcccaggtgtgatgggagccgtgaggatggccttccttgagtagccacgagctgctgtgggtcttcctgagaagctgtggcaatgggaggacagaggtaaaatagcaagacccagtgcctaaggaggctgaagagggaggatcgctagagcccaggagttcaagactgcagtgagctaggattgcaccgctgctctccagcctgggtggcagagcaagacctcgtctctaaaaaaaaagaaagaaatgtacaagtgtaaaggtagcctatagatgtgttcccctgtattccccaggctctattcttcagcctcctgagcagctggaactacaggtgtgtgctatcatacccagctaattttaattcttttggggcagggtcttgctacgttgcccagtctggtttcaactcctgagttcaagtgatcttcctgtctcagccttccaaagtgctgggattacaggcatgagccactgcacccagacttgtacatctctttaaatgtaaattaaatgtgctttccacagcattagtggaacaccccagcattgctcatcctctccgggctggctcctaacacaggtgccgtggcataggtgctgagttgaatctctgtttttgtaagtcattgcatacatgcttcattctaaaatgtactttattccaaatattgaacagtttgtcttcgggatttattgtctgtggtagttgttttattaattgttttagtaaaacaaagttagcttagttgtgggaattatttaaaaggagctcttaccaggtcagcttccttcggtgttgcgttggttaaagataaacgagaagaatcgggatacagtaattttaggaaataaaaggagactgtagtattggttggctgctctaggtaatggtggtaattttctgtcttcagagtaatcatattgtgaaaatgatgcatcgtataattccaaaaatgaggaagagctttggaatatattttgtgtcttaaataaccagtacttctgttgtgtgttttatatacgaccagcctcttacctatacactttgtcttaaaaattatttctgtttaggtacttggaaaaatggacaaggattgtgaaatgaaacgcaccacactggacagccctttggggaagctggagctgtctggttgtgagcagggtctgcacgaaataaagctcctgggcaaggggacgtctgcagctgagtaagtatgagcccacgtgatcctgtataccgcacatgctgaagcaaccgaggagtatatgtgataacggcatgttttccattgatggcagggtaacgcatagccttacccccacaaccgcaaccacgagtccgtctctcaaaacagtgtgctgcgacggctcctgcatttgcagcttccctgtgtgttgcccaggagctctccacctccgatgaacccagggccgttcccttcataccctttcattagtagctctaagatgtttgattaaggtgtacgtttacagaggagttggttggtgatgagcattgaacatttgggttcttcggcatatgtctctggaaatttagagacagggagatgcaggattaatcttgattaaaaaaaaaagcccagatcagcgttccctgttcctccagagtctgccaggtgagtttcatactaggactgcttgatgttctggaatcccttaaccaggagtcccagttgccttttgagagccgtggtcagacccttggcgagggtgtggctgaggatggccctgccagggggaagggcccgaaagccccttttcagcatgactttaagttcttgtcatttctaagagcgtacatgtttctctttttgtgaacagctcccactatatttctctaattgcaaaaacgtaagaaatgtaaagcattccttagtgttttgctttgaaatgtaacatttaatttcctccgttcattctattaaaattgtagctcttgttatttctgaccaaagaagaagaagaaaaaaaaaacacccactcctatgcttggtgtttctcttaactggctaataaacacaatgccaagaacattagataaagaaaatacataagaaacataaaaattgattttaatgggcccctgtccgagacagccataatgagcacaagcgcagtcataaatatcagcactcgcctccgctgtcgagatttttcctgtagagctgcacgttacaatcaatatagtctttttgagaccaaaaaataagcaaacctttgaaccatgtgaatatactcttttcagtttctatgagaaccatctggctgtagtgttcagaaagtcacaggcaccaaataatttgtaggggaaaatgtcattttgtcttttagcatgttcagttgcacaataaatcatagaaattatgtgttggttttttttttcttttgggaaaaaggtacaaagtgaatttggggaagaaaaaggaaaacaaaacaaaacaaacattataagatatgtttagttaaatgcccattgtggattaggcaaataggatgaagacgcttaattttgaatttctactttatgaactttctgaatcaagttaggatcaggttcaggtgtaaaaacagccgtgaaataatgctaaatcctgaataggatctggctgattgctctcatgaaaacacacctgtggacaaaccatgggagctggggctggtgccttcatggcccctgggaacttgggctcctctgagcttggggtctccagatggtggtccctgccctggtgcttcaagacagctcctgggcctctgccacaggtaggggagaaagaaaggagggcgtgtcatatatgggctaaaattaggtgtcttgtgagtaaggaaggagtgggatttggggggcagccagcagtatttgtgtgtagttaattttagtggggggagcatttaaaagtttgagaatagtatataaaagtatatgaatagtcaattaagtttaacattttatcatttttaaaatttaggtaaaaattacatagaagtcagatttcaagtgtacaattcatttgacaaaagtgtacaaccgtataactaccgccgaagatatagaacattcaagatatggaacattccagaaaattcccttgtgccccctaaagttagtcctctttgtgaatttttgtttccatttctccagagtaaattcctgagtgtggaattgctgggctggatggcaaatgtatgtttaacttgacaagaaattgccaaaactttcttcagagcgggatggaatttccactagcagtgtgtgagtttcagttactccacgttcttggcagcacttggtggtgtcagtttttcagattttagccattctggctggtatgaagtatatctcattgtggttctaatttgcactttgctgatgacttatcctgatgaagtcttggccattcctatgttttctttgtgaaatatctactcaagtcttttgcccattttttttttttatttctttgagatggaggcttgctctgtcacctaggctggagtgcagtggtgcaatctcggctcactgcaacctccgcctcctgggttcaagcaattctcctgcctcagcctctggagtagctgggattacaggcacgcaccgccacacctggctaatttttgtatttttagtagagacagggtttcaccatgttggtcaggctggtctctaactcctgaccttgtgatctgcctgcctcggcctcccaaagtactgggattacaggcgtgagccactgcgcctggccaccttttgctcattttaaaattagaggtttcttgtttgtgtttttgttgatgttattgatttgtggttctggatgtaagacttttgtcagatgtctgtattgtgatgattttctcacaagttggaggcctgcttttttgtttttccaatagtgtcttttgatgagtagaggttttaaattttgaacaagtccatatgtctttttttccctttatgtttaacactttttgtgttccctgtaagaaatatttgtctactgtaatgtctgaaataaattctcccgtaatttcttttaaaagctttgtagttttttttatgtttagatatatgtgatccattttgaattacctttttgtgaggtacagagtttattttttccctgtagctatttagttgttttagcatcatttgttggaaaataaaaattgtctcctttcttcattgaattaccatcagttgaccaagggtgtgtgagcctgttcctgttttgctctgtttggttcagcctacctttgcctgttctatgcccgttccatgctggcttggttaggtagctttgtgatacatcttttgttttgttttgttttgttttgagacggagtcttgctctgtcgcccaggctggagtgcagtggtgtgatctcgactcactgcaagctgtgcctcctgggttcacgccattctcctgcctcagcctcccgagtagctgagactacaggcgcctgctgccacgcccggctaaatttttgtatatttagtagagacagggtttcactgtgttagccaggatggtctccatctcctgacctcgtgatccacccacctcggcctcccaaagtgctgggattacaggcgtgagccaccgcgcccggcctgtgatacatcttgatgctaggtaatgtgagtccatgaatcctctaaatttatttatttttgaaaggtttggcttctatgtctcttaagtttgcctattacttttagaattcaggtgtaaatttctgcaatgattcttttttggatttcgactgggagttcattgaacctggttgtcaattttgggagggttgacatcttgatactgaagtgttcagttcttggctttgactggcgtctgcatttgtttgggttctttcattgtcctcggcagcgttgagtggtttttcagcctggaggctttgcttatctggcagactccatttctaaatactttgttcttgatggtattctaaattaggttgaaactttttaaccttttaatttattgctgcttgtgtttaacaactgacttgtatgttgatcttatattctgggatcttgacttaattcatgtattttttccagggttgttttgagattgcttaggattctgtataaaaattcatgatgtctatgaataaagacaataggcttcttcctttctgattgttatgctttaatttcttctattgagctgtccagaaccctccaggatgacttcagtaagtgtggtgacaacagacgtccttccctgtttcctggtttgggggagcttgcaggatttcaccagtgaggacttgctccccatgttgggtttcagaggcgtcttcctcactgtgtggaatttttgtcaaatgatatttcatgtatgtgttgacatagtcatgtgctcttgctcctttattctttaaatttggtagaataaatttttagaattttaaaccaggtgtatacttttctttttttggtactgtctttgtcttgttttggaattagtctcattctgatgacagatcaatttggaagcattccctcttctattttctgaaagagttaagtgttggattgatattactttatctccaaattttgggatgaatgcaccttggatgccatctgggtctggtgtcagaagccttttgtgaagcttcctggtttagtagaattgggtgctgccttccctcatctcggggtgctcccacctggagccatctgtgctctgtgtggctgctgtcctctggttgctgagtgacagtggctgctgggatttggggcagcatcctgctggctctggcccctgccctcacccttctccgagtgcctatgagtcccagggtggtccttgcttcctctgaatgggtgtttctttagtagataaattacaggttgaccactgggccttcttcagtgacattgcatctgtgcttgtgtacaaagtgtgattcccgctccccaggtgaatccacttacctgtgtgtggcttcgcacggggaccaatgacttccttgcatagttacctttccctccctaaaaacgtgtgagaagcacatcagttgggaaagtggtatattttccaaaagggaagcaacataagctgcttttaagttagtttcataactgcctgacagtatcaggtttctgtgaatgccatcacgtccaggagcacttggcctctgcaagagcggagcagctcccccgcgccatcttcccgcagctgcagagctctgacctcgtcagattccctgcagtgcccacagtctaatgagaggggccaggctgtatgtgtttacttttctaatgttattttggggcttgtttagttttccataatgttgattgccgtatttgattacttgaaaaaatggaccgtatcaccctgggtcatacttagattacaaaaatagtagcagtaggacttgtagatcttggaagctggggagctaagggggctcatctttcacttaccaagggcttacccttgtttttcattcttttatttttttcacataagccttttcagaaaaatataggaaaagctgatagagtccaattgaactaaaccactttaaaactttttgtattttggaaaatgtggggactacacacagactgtcttctactgcagaggctctttttctgtcttcatggtagggatccatttacagggtttgtgggtctgcttttggcatctggcccagccagcccttggattgaggctgggtggggcatgcaggttggccctgaccctcttctgagcacctggctggctggacagatagggccttcagtcaccagctaggctggcctgaccctagaccctctggaacgtgagaacgtatcctgccgggcctctgtgttgaacctgggaggagagttgtctgatgtcattggatgccctatgagtttctgccctcgaaacgtgccccatggaaagcgtgaagatgcctttgagcttcccgaagggcagctgcagcaggaggtgacctgcgttttgcctctctcctgctcatctctaaatgtgttcaggaactcagtcgaccctcagccgtgcatggggtcccggctggcttggtatgtgcacctgccgagtctgtgctgccagttatccccacggcctctccgtgcaggtcggtctgaccagtgccagtcggatggttcctcaaggtccacgggccatgagaaccttcctgggaacttcacgaattcgtttttttctgacagattgggaaattaatacagacacttgccgcattcacgttactataattgatctttcaaggaggagaagaaactgttcttaaggacaaacacttagagaagcactgccagtaaaaataacatccaaaaaaacgcgctctgtaggacttttacctgcggcaagttcggctgtctcattgcttttcctcagtgccgtgaaataatgatttgtgttgtatgtgcttaaaaaatgtgattattttactttatagagtgttccttaaggaggtctcttgagtcaaataagcatgtttctgtgaggaaaacttgccaggcgctccttggctttatagaaatcgtctgtttttcaaaaacgaatggctgaatgccctggcgagcctggaaccccttgttcttgcccctgctggctctgcgattccatgtcggtgaggcctgtccacgctgacggatgttgcctcccgtttctgcctgagaggggtaaatgatcagtggtggatagggagttcctcttgtgacttatgttatcaataacacaaattgtgcatatacttcaccccatgctaaacatttatagtgcagtgtcctttagaagccagacaatggcctcgtctttcaggttgatggctaaaaagacaagacaggaagccaaggtgtttcttttcagctccacagatccttgtgatgaattatgttccgtgacgagagggtacgatgggggccgactgctggcccccggacacacagtgctgcacatggggcctgcagaggtgttagcgtagcccgtgatggtggcagctcttggaccttagtaaaataaagggaagcagcataacatatgcttttaagtgagggtatggcgtgaaaaccctgccgttgtgtgataggagacgggctctgcaggctgagccttccaagtcgtgaatgatgaggtttgctgtgctcctctgattggcagctgaaagggcaggtcagagctcctctctacagcactgcggagaatcccaggctgtggagcactggcccatccaccccaggacagagctgcctcgccacagaagagcgaggttctgggattcactgtgaaattgttgtatggtttctgatctagaaaatcaaacctaaacaatgcgcaacctcaccagcttcggtgctcttgatgttttctccctgcagctggttctttgctgacctgggggcagagtagacagtggtggcagccaggtggatagtatttaaacaagtgtcactgagatttagggtccttatgtgctggactcatctaagaaaaaaaaaagcaatgcaaaagttttatttctgtcaattttgtaactgtgttacaaggagacagagatggcaaacgtgtgtgcctgtgtctgtgagtcagaagcaaacttgttcatttcatttaattttaagtctgccaggaacttcttggaaggaagaaaagaatggttgaatgacagctacaaataggtgagttcagaatatgatccaaagtgtcagagcaaaagattttttaagtttccaacatttggagtaaaagagcactttagagtaacaggtaaatgggttaacttcaggcagagagaggtggatgtttctgcctctctggtatgttaaaataaaaccccttaaatcccctgctcttaacaataagtttccatttaagagtcattgggcttcacctctgttcggctctgtttgtgaagggagggcagcttttctggggagatcatgcccctctctcctttatgtggccacagagatcctttccctgttttcatgaggaggaaacatggaaccttggcacaatccagttctcatctagaattacattgtatgctgtgcaggccaggggaggaaagatcccggaagtggcagccaccggataggcacgttgccgccacagccagcatcggcgtctgttcaggtttcaggaaggtcacttcttggctcaaatccctggtatttccaggttgtcttcagactgcggctttcaccctcaggaagccccagcatggccttgggcccagcttagaggcttgtgggggtttgggtgtagccccgtgcacagtatcctgtctaggattcataatcttgcaacagccatccctgatgggattgggtaagatgacagtgtcctttctcgatggccctggtgccctgtggagttgggtcctggccctcactaccctgttgcgtgggtgggccacgcccctcctgctgatcagcctctgttgcagagagtctggccctgtggacccctgcccccggccccaggccctgtgtctgcgctgggcttgcattgcctgcctctcggtcccctcgcctcattgcagtttggtgcttctaattagttgtggtcttgaaaagctggtgaacaggcttgtccacattgtatgggaaataaggttcaatgaacccctgtgagaaacgccaagtgtgggatttctgacagtatcccacagaaacatctcagagcccatttctgtttcctcctggagtctctgtttctcccagaagaggcggcgtggccaggggtcaggcagatgtcaaggaagtgaggactcggagggactggcacctgtggaatagcccctgcttcgtctgtctggcctggtgggaggaggtgtccttccgtcactgcacttcgtccttgggacccctctgtgaagttgttggcatcaatgtgcgtttaccaataagagaaatggagatggggtgagggatggtgggttacaagtcctggggaagacttcagggaagaagtgggtattccctctacttagctgaacttgcagtagagactgccactctgggagtgacttctgttctcctgtgaaatcctctgtgactcttgcctgcagttgagggagcctctgagaccatcctgattgggatttggtcagtgggaactcaagtcagtattgtcctgggggcctgagtgccagtgtcttaaaaatagagtgtcctccaggtaatgttggatttggaagttcaggctcagcactggatttgtcctcgtgatatcactcgcctactgtacacatgagtcattgtaaagttacgacatgagctcgcatacgtgctggtattagagctccttggacggtgatgtgctgttttagaggagaaaaagctgagatgaaacaaaaatggtggtggcagttacccagggccacgtctgtggatgccatcctcaggatgccattgcatctcgggccagcctccctctgcttttgcaaaagcacaaccgtctggcctctacgaccaccaacacacacctctcatactctggaatttgatttctggaatgcttttttattcttcctatatctgtaagattttctgatatttaaactggctgcaactaatgaatagttttcagttttgttttaaaagtgttcatgtcatttaagctctaaactctcacaatatacttggtttgttaaatgtaaaattttatcagtaattagatcagctccttgatattaatgtacagggtagctcttgcgtgctgatcagttcagaatttaaattgagttaaaggttaaatgagtttaatttttgaattgaactgaagcattgtcttgtggcaaattcatccagaatttttatttccagttgctgtacaagtgacggaagtgggtctttttgcgataaaaacattgtgaatacatttaggattcagtgagcttctgtcatttactcgctcattctctaaacgtgtgagtgccctgctccgtgtcagaccagatggcaggccctgcatggggtggggaggggccagaatgtgcagccccacctgcagcccaagcccagctcaggggcagacaggggcagacggggaagtgggctgttccacaccttgagattggtgaattcctcaagacagcggctggcaggggcccaagcctaggtgactggccacagagctgaatggggctgaccgagttaggacatcactgggtggtgaaccaggaggccctggctgctgacaggatgtaggggcatggaggggtagcagaaggaggcagttaagaggctgcgagccccctcttgggcatctgacggggtggtgcttcctcccagggctaggggagaggtgagcaaagaataacctcaggaaaagaaataaaagacctggaggaacagtttaacaagtgggtggccatgaagagctaccaatggagactgaaggaaaaccaagaaggaccagagagagaatggagccaggaggctggaaggagagaggcgggttttgtgtcaggattgcccagagctccccggagaggagcatctctcctctccatggcagagcacagagggtggaacactgacgtcagatcttcttcaggccctgaacgtaagaattccttggtacctggtctgctttgagactgacatgctgtgtttgattagtttgacttcgggatgccagctaaatgctgtttgctcagcatatgcctgaactggaaatggttccatcacaaaacaaactgaatcaaatagaacgtgggggtggctcagtggggacacagagccagaggtgagtctccttcaccccaaacaccccaagttctagatttgttcttggagctctgtgtcagggttggggtggacaggagggagagaatatcctccgcagaaacacagtttatcacactgcagaattcttagtgttcttctgacaaggacgtttgttcagtttccctctagactgggccatgctctctaaatagaactgaaatcatagttacaactcaaaggcagttgagagaagagttctagctttgttccataacgtcctgtgtcttgatttcactgtatctgtctgttcatcctgctgggggcgttaacccacctcttctcgtacagggtcatctctagtttcactgaggacctctgagaaccctagtccctctgtccatacacatcggcaggagactcacctcccccctttcctcctgtaccccatctgatccacatgcacaaaacacacacatgcaaatatttaaaagtagaaaggcttatggactgtatgacttcagtacacctgcagattcatggagtggttctggagaacattggtccttctgccggcctggcagctactttaatttctggtgtccattggcagaatacaagctcatagtgtgtgctgggggctgggtggggcaggggattaccgttttcttgcagtgattgttcttgatggaatccacattactgctttcaaagctgcttttcctgtgccttcttccagaaagctatcctcccgtccttggttggctggggcaggtgaagcattaggaaatgctctgtctctgcattctcttcgagtaacactggggagtgttcatggcttctggcagaacagcaatgttagccttcagctgctgaagcaagccttctgctcattctagaggcatcttctaaacagatctgcactggtcaggtggggctggagaaggactgggctgagagcacagctatgggaggcaatacttgttcttgttcccaagaagctgatgtgtcgtccggtgaggtctctcgtcagccgaaggttggcacaaggtcgccaggcaagggctttttgtatgtgaagtatgcacattctagccacagagttttctgccagggtgtttagacaagctaaaagtggaatataaactgtattcaatttgctaggttgcaattataaggacaaacatgtttttaagacttaacccattatagtaggaaaatacaaggcttggggtatgctgactctttcccttgttcgtctctcaaatagaaaaatggtgtgtgtaagtaggtgtttgtatatgtacattataagacattctagaaatttctgtcctatttctttaatattcttgccactaaaaatatatgctcctgaaactagggaaaaagaaactgtttatcattcttctgaattattacagataccccaaaagtagcctcctccaaatagtggtttttcttttctaaaaatcacctggaaaaatactgagctttctgatctttattttatccttttcagtggctctgtttggaagagttattgtacaacccagcactgcttttattaaaaagaaaactgggccactcatttccttcaaagtttttggtgtgtttaaatcttctctaggtaaacaaaacttttattgaaaataatattttgagaccgtgacacccttctcacaagaagcggtgctgaaagcccccttgttggctggtcctgcaggcagcctggcgtctgctttgcctgtgggccgtgcagggtgctgggggcagtggggagaggcgtcagtcccacctgcagctttcgggggggtgctggggaggcagatttgacatgaacgcaaataagtgcaaggaccatcagggcaaagagacccaggagaccaggccaggggaggaggcagagagcctggtcaggccaggctggtcctccaggtccaggccctgcaggatcctggaaggcgtgaagatgggctggaggtgtgagcaccaagaatggggcgcggcctgaccttgggtctctagaagttaccctgtggtggcattttctataattgatgtcataaatagctggcttctttgttagaattcatttacttactaagtttggcaaatatgttgaaggaaagaaatgtgagtgtgtggatggatttcagcacgttgacatcagtgcctgtctccttggtgcctgttggagacaccgtgttggaataaggatgaggttcctccctcagaatggttgatccatttccttcagttcttcttcagttttgcagcttttctcccctaactgtagcagaccatctcctggaatctcatattaaaggcataattaatcatgtgatatcctctcgttttttgcatcagagttttcaagagccctccagatttttattgcctgcagatccgtgtgcttagacatagtaccgtcagcagtaaactggcttctggagaagaaattgacaaacaactttatagttgcatttttagccttaatatctgagggcgagaagaatgttcaggatttatgaagttcctgaatttaaaatataagcaataaaatgttcctaatgtggggtccccatctgcatctattattacaaactcttaaagtcactttagcctaacatgtcaataggagttttcttctctttctcttttctttttgacaaattgtgtccaagcaaattagtttgcttgcatgaagcgtcatctgtgtttgcaagctggaacagttttgctggttaagcagtctagagatgataaaattttttgtccgagtatgactttggtggtgaatttaaaagaatcacggccgctgctggaagctcagaggagaggtccattttaaagggcgtctgctgcactcagcccaaagcgttacggggattgtttgaattgacaaaatgaaaatatgtattatattttctctttttaaaatccatttacagtttatttgtctgatatggaggagcagaggtataaattacagagaaattgtcatcatatcctctggatgataagtagggccagggcttctgtttatttcggtggttggttacccactcaggacagtaaaatcacaaagttttagctaaggaaggagaaatcccttctgcctgtataataaatgttgttttgacccaactacactgtttcttgtgataaaaatatgtcacttaaggtttcctgcatctgccatttgtgaacgtacagttgagcgacattagttggtgccatctgtgagtgcacagtgcagcaactttagggggttcacaatgttccgcagccatcaccgccgcccagcactggcatgtttcacagtgttccgcagccatcaccgccacccagcaccggcatgtttcacagtgttccgcagccaccaccgccgcccagcaccggcatgtttcacagtgttccgcagccaccaccgccacccagcaccggaatgtttcacagtgttccgcagccatcaccaccacccagcactggaatgtttctgtgttttgattcttttttttttttttttgagacttaatctcgctctgtcacctaggctggagtacagtggtgcgatctcggctcactgcaacctccatctcccaggttcaagtgattctcgcgcctcagccccccaagtagctgggattacaggtgcacgccaccacgcccagctaatttttgtatttttagtagagatggggtttcaccgtgttgccaggatggtctcgatctcctgacctcaggtgatccaccttccttagtctcccaaagtcctgggattacaggcgtgagccaccgtgcctggcttcatctccagaacttttctgtcttgcagaactgaaacccgtacccattaaacactaactccccatttctgccagcccatcccctggcacccaccctactcctttccgtcttgatgctaacacaccttgtgtgggttcctccaagtcaagagaaggagtgtccaaagacccctgagaccagaaccctctgccaacgttggtagtgctgtttcggcctggagggcaggtgggcctctgggcacttcttcgtcaggacatggagccatttcgggtagggccctgggtctaccctgtcccagccccgttccctatcagaaacccgaggcccagaggtgcagggcagctgcagcaccagggtggacagatgttgatgatcagtgggaaggaattcaaagaaatagaacattctacacaaatgtggggaggtatctttagtaaaaacaggacccaagtacatgcaaagtgcactgtgagggagagagatgctctgaagaaaggcactgtttttacattaatgagcatttaaatgatgctgggttaaccatttggctttttgtaccttgtcaccatctcctttatggtgtgattggactttcgagagaaggtggaggaaggttaatagataggtaggagagttgcaggcaggaaagacagaaggccccggggatgataggtggggcagagggagggatggagaggtgacttcaggaagagcatcagctgccgcaggccagggcaccctcaggaagcaggccccccatgcttgcagctgcccccgggagccctcatccccagtctgacaactcgaggtagatctgggttgctctttattttttgatgatttttgcatagtttcaaggatcagtgtcttctacactgatattctatctctgtaagtttctccgaggtattttcacctgtactgacattgtagtctttccttactctcttatttatttatttaccagaccccaccactgggtgcagtgatcaaaaccaaaatatcaaaccagcaccagaaactcttcagcagaccggtggaacatgccttagagaaagccagaggggtcaggcatagcctcctgtgcctggcctgcgctcgcctgggaagggcacccctcgctgtccaagagtgaccccaggccacagaaaccacgctgagtaccaaaggcgagtccccagggtgtgggcaggctccttgctggcatgttcagcccaggcttgccggaagtggggctcaggctctgtctgtgggataatgatcagaagcttggcagtcatgggaccaggataagaagaaccaaaggacagctctcctctcatggttatgggccaaaaaataggtgattgttttaactgtggaaactgacccactaagggggacctgctgagaggaaggccagtggggccgcagacaggaggggaggccacagccgcccacccgctcatggccgagcgccccgtttcctgaacatgtgggaggggcaggctccccacatgggaaccactgggccgtgactgtggcgctccagctgctggcagtgcacacccggtggggccctctgtggcttgagctgcgtcaccatgacgctgcatgcccaggtggtcatccaggaggatgactctgtgcagacctgtgtgcccccgggcctgggcctcctgcaccccagaggtcagtgacagtggaaattgccacagacgtgggtttgtggccttcaaagccttcaatgtcacagaattctgagtctttagctaaattaagtacatgttcacgtgagtgtgtgatttctccatgaggactgagcctcatagtttgtccctgtaccggtgtcagttcatcgctttggtcttggtggagaattctgcatcgcaggcacatcgtctggttagcgggagacatgtttggccagcggtgaaagactgccttgcccgagttcctgagacttcggggctactgatggcagggagaggctggccgagggcagggccacgcggtccccttctgctgatgtccgtgaggactgggcacagctgccagagtcaagggcacggaagtgcaagcagtccgtccttttctgaagcctgctctttttgtttttccccacgtgtgtcaccttttaacgtttttttcctggctttttcattaatgtatgtaaaaatattaaaagcccttgtatattacatgaaaaactatgtcagctgccttgcttttttctatttattaaaacttttcaagcagtaaaaacattttacttgttaatgagggaaagtgggaaaattaatgacatagagcttggatccaccacgatgtctcctcttaaccatgcgcagccagcttcccaccgcatggagtttaatttctgcgatagggttcagtaagcaaatgcaaatagatttaatgatttgcatcagtagatcatttctcagtttaatatcctctgatattttgggtcaaggactctttctttgggagactagtataatttctagaggtagaattattaatattagtgatattacattatgttgaagtgaagtgagatagatgtatcattttcacaaagtcagatttctgcgtgacttttattcattgtggtgcaaaggaaaccctggctgctgaagtagacttaggagcaggcagaattcctggacgcaggtgccttggagtgaggtgaccctctctggcccccagcaccttgcgagcagtggtttttgcatctgttcaccagcgcatgtgaacctgtgggcccgggggacacgtggtccatttttgttgagtacgttcaacaaaggaatgaattaaaatgagaactcttttcagcaaacgctgatggagctttctgtgtctcgtgtgtggcaccatgctgacggaatgacgagaaaccacaacctggcctcaaggagctttgtctactgcgggagacagagatggtggcagatcagtcctggaggcacaaggagagagtggtagaaatacacaaaaggcattgaagaccagtggagcatcagggtcactttcacagggaggaggccaggggtcttgttgcctgcctgccccaaacgtggcctccattccttctttctgtctcccgctggaaaggctgagtgcaggtgccagctctctctgcctcactgagcgggtatgtgtgagaagcgtaggcctactggcaggctcctggggaagacgtttctcccctgatacaaagagcagcatgaggaagactctcccggctccccagtctgcggacacagttgtgtgaatgtgattgcaggagggagctgggcagctgttatgtgaccatgagggcgtgggactggggctgaaaggtggcgtgctgccaatgagaaagatggggagagctgggcacctgctggccctgtggccggccaggccgcctctgaacacctattctgtgacctgatgtgcatcctcatcacacactgcagccgtgagcagcacgcaggtgatgacgggtcatacgccatctggggacttgatgctccttttagcaaatacagaaagtacaaaggaaataagaatcagttccattaatcagtgatagtcttttggtgtaattccttctagctttttttttgttttcatcgacatatttaaaatcagttttgaattctacttaattttatatcttaagcatttttcttgttctgacatctttttaagcatgatttttcaaggtctgtgcttggttctttgttaaggcctgttgcgtggttgtacgtggtggtattttaactgtctatgtcctggtgaacctctatgtttttgtttctgtttactgggctgcagtaaacagtctcgatgaacactatgtagccctgggtgagtgcttcctgagcaagcttgctttttggcctttctccctgtagcttttttgtctgtaacacccctttctgtattgcaggttggcttctgaaatcaaatgtgaccctaagtgactcctcactgtttttaagataagaaagcattagctctgtgttttcctagcccctccgttcttgtacttagacccttcactctgaacagcaggtatgccagcctgtacttcctggcattattacccagtggcccatagctcagaagtgacattgtgtggtgtgaacgctgtctccggagcgagattcctaactcctctactttacagctataaagtggacaaatcacttcactccatgcctcagtttccccaggtatcacacatggggactataatagcatctaaccacatagattgttggacaattaaatgagctgaccagcaggaaactcttagaacaacgccaccccatagtaagcactcaataaatggcaactgctgccgttgatgaggatgacgatggtgctatttctaccacttcctaaggtcgcccctgcgtgctcagcagccacctccaccctgccctacccgctgcccacatatttcataggcctccttagatgtccctgtctttgagccgggagccctcgcactcccaggcttgcttcagatcccttgcctgagcctgtccagcactttgagcccgctctgcccgagcgctgttctccttccgtgccgtgctgtctgctgtgagtcctggagaacagggaccatgtctatcttgctggccttagtacccctcacagggcctagcccagggggcactcaagaaattgtaaagatccataggccgggcgtggtggctcacacctgtaatcccagcactttgggaggccaaggcaagagactcacttgaggccaggagtttgagaacagcctgggcaacatagattctgtctctacaaaaaaacttaaaaaaaaaaaattatccaggcctggtggaaggcgtctgcagtgtcagctactcaggaggctgaggcgggaggaccgcttgagcccaggagttcagagctgcagtgagctgtgattatgccactgcactgcagcctgggcaacagagtgagaccctgtctctaaaaaaaaaataaaataaaaaataaagatcctgtaagtgaagggttagaagagtggaatatatgtgctcttaacaaagaatggtgtgattatagagatgggaggtgaaaagtagcacgaattccaagttttattttcggcaactccgtcagagtcctgaatgttctttacccagtttctcactcccactgggactctctagggccagcgggaaccctgcaggcattcggagaactgagcgctggctggacctcctcaaaacggggcaccctccagggagctgtcgaggggctcttctgcctcttcagaaaccatcatcagctgtgaaatgtgggcttccaagtggttttgtgtctcctcagtttacagagtccatgtttttggtgactcttgccttggaccctgatggcgctggggggtttcatcgccatttaaccctccgcgtctcacagagaccaagcagtgctttcgggatcgctctgttggtctctgtgtagcacgtggcccccaaaatttaggtgttgaagtcctcatcctcagaacctctggatgtgacagtatttttgagatagggtctcttagaaaggtgattagggtaactcagggtcattagaggagcccctcacccagtgtgaccggtgtccccatgagatggaggttgtggcacagacacacggagggatggccacgtgaggaccctgggagaaggctgccttctgcaagccaaggagagagcgccttggagaaaaccagctgtgcctacaccttgggttcagacttgcagcacccaggctgcagggcttcgtcagggcagccctggcggaagaacgcagcctcgtcggtgggtttggtgatgctgtgcagttcagctttaccgtcttgctgcagcgggaacgtcctgctgtagaagaggcgccgccatcccagacagtgttcataaacaccgacggcaaagtcaggacgggcaggagcgttctaggcaaatgatgaaaatggtattttacacatatttgaaaagaaaggtttgagaaggcatccattattaaaaccaaattcaacagagaatttaaaaactggctgtggtgagcaatgttagtcccaaatcactttttcacaacttgtttctgttctgtcgtagggctagtgagaccagctttcccttgagttctggggcgggacgtggaatgtttgtgaggctacccttcattgaaggggggcccgtgatgttgagtgttcaccgtctttcagaacgtttgtgcggtggcgtgtcccttctgtaaattgctgtgacctgggctgcatgctccacagtcagactcgcttcgccctcttactggtcttcattaattcgtggtccctggagtggagcgggaaatacagatatccacctcctctcattatccaaatacaataacaaattacgaagcatcttatcctaccaaccattatcctatcagaaagcatgtgctaatttcgaggaagcaagaggaactatgtcagatgtgccatgagatgtaaaatgtactcgccctgtatcttggtcttctcctagcagtatcttgtctgacaatctccttgtttaacttcttgggctttttctttgacatcttcccacctttccctaagggtttaactgtcttagatctccttgtctgcttctgcccgagactctgggtccctgtcaactcgggtagaattttattggtatttttaggctctttaacatactttaatcattgtgttgctgcatatatttcttctaagatagaagtaaattgtaattgtcctcagataataacctaggaccttaaaatacacacaaatgtacacactaatgaattttgtaaatattacataactcggtaattattgtttcaaattagataatgcagaaatctctggatttttatgtcggtgtttataaagcattttaatgataattggggaagttggttgtgggtttttagctagaacaggaacccattataatttttcccaattataataatgggacataagcctctgtaacctgaaattttcctctatgacatgttttcagaagtagaattattagatttgatgagtgtggatgcctaggtttgtagtcaactttttgaactgagctaatcaatgcatatttgggaagagcatataatccaaaatattgggtctacaaatgtaagattgcctttggtgatgagttggtgtcatctgtcttctgtaggaaatgaagggcctcttgcagtgtgctgtgcctcattttaaacctttaactggcaagtggtcctgatcttccctctggacagctgcgggaagaggtttcccggtttaccttggcccccgtaacaccacatcatcccacgtgtgcgtgaagagcccgcacaggccccctgtgcgcccggggtcaggtgtggatggggtcggggtatttccagtacttgcgcttcggagtctttttaaaattgagagctcatctattgttgataaatggccaaatataaatgtataacaccttgattaataggctgctatgaaattgaaggtggtcttttctaggaaatcctcattgaaatactgcccattttgaataagtctaatagtacgatgaaccacacccttagtggaaacgttataggatgcaaataggaagatttgtgggtgtttttccttcatgaatttgttgttatctttgcagaagtgaagaatatcaatattttatggcctttctttgggattcgtgtttattaccagtgatgcagagcgtggccctggtcctcagcgcctctgcctttgtggtggcgggggccagtttgcctggtggggaggtgtgtgtgttttcaccaagttagcaaatttcctgttttctcttttaaaatggaaggctagcttcctctcccattggctttttctggagattggaaatggtattacagtctttgttgtgttattgtggaaatctccggcgtctctcctgatgttgccgccctgcacggccgttggagagtacttgcaggcagccccgctccacaccacttttatcatcttcattttcattcttttgtgaaaatgtagttgctttggagcctttcgaaaagtgtgtcagatcatttttgccatttctctttttccttttactttctgttattttccatttcgatctcagatacccttcttaggaagctgcatccccgacgccgggctggtctgttctgctctgggggcggcgtgtgctctcatttcactcccataatcagctttggcatatgggattcagagacgcagtgcttggtcttctgagatgttttgtgcagcagctaggtgatgtcccagttctcctggaatatttgcatcgaccaggatgctgtttctgcgtcggaacgtggtgtctttgtttacccttaggcattatcttgcttgtttacctaaatctttaactctccttaggtgagtgacttcactgatactaagagtgattaaaataatgtgatgtatggagtcaacttaggcaatacatttacctgtacaccacacgtccaatatttattcagaatgatttttttcaaatatttaataagaatgaataattgaatgtactatagccttcttactttgccctgcgatcccataagacctttaaagctaaaactagtttgggcccttgaggggtttatagaaattaggtatgtctgagtatggaaatggctggcatggtgaaagaattgagtccttaagtaatttgctattcccagtgataattagaagaaacccctgttctagctccattttcccattttttttaatgttttaggggagatttctttaggtattagcggctgatcttttttttcttaccatgtactcccgctgtaaggtgagtggttttggcatattgtgttgccttgatgggttattaaatcgtcacttggaaggatgaatgtgggttatagagtatgttgtgccatatatcatcttagtcatcaggaatgtttcagaaaactgaataagagtaaagttttttaaatttatgattgaaattagcaattttattaggtccttttaaaaaaacctacaaacttttaaagtttttctcaaaatatacatctttgttctcagaagaggtctgcagactgccctaatttgtcttttgaaaggacacagaattttagcagaatacttatgctgcagaaatggacaaatgcaggtgctgttccttggatggtcagcatggaaggttgacgtgctccaagatttactgtgcgtcaccttagccatcagtcccatcgtattcatttaactccactaataagaaacggagcaaaagtggaattatgagttcagtagtattctatgaaaggtcagttgttaaaaaggcagagtctgacattctgtgaaaaaggtgccttcattaatcattctgatgggagagcacggggcgttcttgaccaataccagtgaaccttgcaatgcaaagtttcagggtctgatgtgtaagttcttatataaaaacgaggatcgtttgaatatatgttgagatcattcaaggaattgctttacctttgctgtttaaaagtgtgtatatgatatagaacacgttattaaatgtgcattactgttttgaaaaaggaaaaacacctgttaattttatagataaattatggaaatctgtggtagacacagctccaggcagtaatgcatttccaagcgaatgaatggacatttcctatatggatcatctacagatattggtaaggtttctttaagtctcttttgtactctgcattcgtggctaaacctatgcactttgaccctgttctgcaaaacaaaccatggcctactttcagactctccttcgttcttttgctgttggttacggtggcagagtgcctactgtgtacacagaatctagacatttcacattgaattatctgagtatttatgtgccctgacaattcagcgttaaagttcaatacaaatatataaattattaagcagttaaccagtgacacattcatcagctgaacgtcttttattgtggcctgtagacagattattttcattcagccattaaagcacaatattgtcgggtgaaattctgtttctggattttctttgtctctgttgctgctatggaatttcattgaaagcatcgaaatatgagactaacacagaatactgagtgtttcttttcagaaacgggaactttcagacattttctctccagctgaattcagtaaagagcagtgtgtgtgtgtgtgtgtgtgtgtgtgtgtgtgtgtgtgtgtgttcctttcccagccagcagtgttatatctgaagggaagggtggggatgagctgtggtgccgcccttcacgccattgagacgggctgggaaggtgccctttcaccctctacctgcagttggtgcctagtgattttaaagattcaggaatgtctttcaccgtgattctcactattaaccaatctcacgtatctaactttccttactatattattagttactactttctatacaagagagaggtggagcctgcctgtgtcacgatggggaaggcccttgggattcgctctgtgggtgcgggcagcgacaggggtgggtcagggtgcaggcggtgagacggcgagcgaggaggtcgggaaggagcctccacaccccagcagggcccattccacacgagaccccagacgaggggagcagaagctgctggtgcctctctgttctttgccggatgctaccgttgtctgtggccacacttgcttcttcaggtgtggaaatagaagctcagagaagttaaacaatgcgccaaatgttacaccttcccattctaacgattttgtcaatttcggtgtcaaggtgatatcttgtctgatggtggaggtcatagttgtctgtgaggacatggtatccaccctcaagcatgtaattatgcatggagagggctcagttcagttttaccgagacacagtttattggagtctacaaatagcataaactgctatgtctgcagtgttaccattctctttccttattgtcataatttttgtttaatggctgtttgtgctacattgaccaggtccatgggttgcttaacataaatgattacatttgcttatgattaaaaacttcctccattagaagcactgcacccaggacttgtaaatgatttgttgttaaagttttctacttcattagccacgtcgttgactccagagtcattgtctaagagttaggaacacttgtaatgagctgtataatatggaccctcgaacgaaatttaaaaagagaccaagccttctaggaacagcttagcatgcagataaaaggctaggaaaatgtgtgaacagcgccaggctgtaggctgaggcacgttccattctgactcagaatggcatgggtgaataaagtcttttatgatggagcaagacttgttgtaaaaaattatataccattcatgaccaaaatccttcaaaacactccgtcaccattcccttctgaaccctatagcttaagttctaagcatcttgtgagtctcttgatagagcgttgaaaactccatgcaatggtctttgggacgccattcgaacctggcctgccccttgctggcaccttgttcgtctttggctccatccggggatttgattgtcagtgacccacctgattacagtgggctgccatggccctggcctcgtggtacaaaaacatggacgattttgtgatttattatcggaggacagctagcaaagagaacttcctggaataactgcattaaatgtgatgggcatttttgtgacagatgtaaaattcttaatcttgaaagcagttgcatgtgtcaggcagactgggtgttaattttctgacagcagtaggaggagctttttttccccattacagatggaattaggtctactttgtacacagtactttgtgacagtgactctggccaggggaggggatatgctggttctggagtctgagaagatggggctgagccagctgtgactcggccacacgtggctgtgggacttcgcactgactacgcagcctctgccaggtttctttgtaaaagtgaagttaacaccgatctcacaatatctggggaggaataaataggaacacacatgctgagttaaagtcctcagttatttcgtcttcagcgacagatgatccccgacttaccgtggttcagcgtttgagttttcgagctttatgatggtgcagaagcagcctacgtgcagtagaaactgtaccacaagtgcccgtgccaccattctgcgtctcagtacagtattgaataaaggacatgacacagtcaccactttattataaaataggctcgtgttcactgatgctgcccaactgtagctaattcaagtgttgtgagcacgtttaaggcaggctgggtggaaccatggcgtttggtgtattgaatgtgttttcagggtcgatgtttttaactttcactgaatgtatcaggatgtagccccatcataagtcgaggcacatctctgtttgagtgcctgttacgtgctggccatggtcccaggcctgcgggatgcagaggcgaggacagtgtttgagtttctagcgtgctcactgtgtgtgggtaggatgaccctgccggtctgtgccctggcttagtgaactagatctcgttggtgtcctgaggccgagtcttctgtggtttctctggagagtgtggctctccctggtcagtattgtgacctcagttaccactttctgtcccctacattcatatactcccattcatgtatttaacaattctttactgctgtaagataaatggttttcaattatgagttttgtcatgaaaatttaattttttaaaaaaaatcaaaagacctggatgtggtgtgagcatgcggagctcccctttctgcccaggcctttaccttcctgctaggaggcaaggtcagcccagggacagtgctgggagagagcggagttccgtcgttcatgggttgctaatttttggagtactgcaatacaattaaatatacttaaccttaaaattacccagaatgtgattgaatctgtgattcacaggccccttctggttctcccgtgcctcggtgtgatcattaggaggatggatcaacctggtgctatcgggaacgcactgcgttaatggcctcagtgcccagcaatggagaactttccactgagtatccgcatgcagcgtgcccggcggaaggtgaaagcttcaccctttgtctcccttgccatcctttggccttgtgtgtttggaagtagccagaggtggtggaacagtggtgggctggtttgggtcttgttggcagtgccaaagggacaaaggctggatgtgggcacgacctcagcctcgtgatgggcaagacaggtgggggtgactttctgttctgaaaatgacctcctccccttcttcctcccctcaagcttcctacctttcctccccctccccctcccttcttcttccactcccccacttcttcctcctctccccctccttcccccttccccctcctcttcccccttccccctcctcttccccttcctcctcctcttccccctctccttcctccccctccttcctccccctctccttcctcccccctctttcctccccctctttcctcttctccccttcctcctcctcctcttccttcctctcccctccccctcctcctccttctcttcctcctctaccccttgctccttctcttccccttcttcttcctctctctccccttcctgtctttccccttcctcctcccttcctcctcccctcctcctccccttcttcctccacttcctcattttcctcctccacttcctcatcttcctcttcttcctcctcattattttcctcctcctccccctcattttcctcctcctccccctcctcctcctcccctgcttcccctcctctgcttcctcaccctcctctccttcctccccctcctctccttcctcctcctcctctccttcctcctcttcctcctcctcctgcccttcttttcctctgtcttcctgttttcttccctttcccctgctgtattccttcctcacacgcccccctcagcctcttttctggggactggctcttctaggaggcctgcctcaaggccctcaggccagttcccggggcagccactgagcagaaccgcccctcccagcgcccacctatggccactgccctcagggtcccttcctccagcatggtgctggcggatggcgccataaacaggctgtcactcatctgcaggctgccttgtctttcccccagcagattaaagccttcatgaaaaaagatggagggcgcttgactttgcgacacgcacattctgccgtcttgggaagggggaaagaggggcatctagctgggcgctgcgtgtagcctgcccggcggggccggggtgtggcaggaccgaagcctgctcctcgtgtggggcccggcgcgaaaacagcttgtgcagccgctgagtgactgaggaccgtgtcccagtgtagtgtcatttcctcgtacatgtggagtttaaagaattataggtaccttgagctactggcaggtaaaagacagtaaaaaaaaaaaaaatagtgaaagacacagtctaccctctgaactgatctacaaggctatgaaagcatcactttgaataatatgcagtagatatgttagaaaaatgtaatattggtgtgtggacccctcagcctctttgacgagtgttgtaatatatcttgttgaatgatgaatatgctaccgtatgtttcaactattcctttcttgtggctgaaagaaaaatatattgaaaatgaatgtaaaatattgacatttagtagttgttatgctccactgtaatttcttgttgctttggatgtggtagacacctcactaattacacggtgtgtacatgcgcacctgtaacaggagccgcgtgaaagtctgattggaactctgacttgatcagcccatgttcttctgccatagccacaggagcatctgaacgtggtgatggaagaagaccctggcgccccgtctccccgtggattagcggccctactgtgagatcctggtgatcttgatgatcgagggttatttgaagcagttcattttgtgctgcagttcattgaaatgccaccacccagaagacccctgagtttccagaggtcctggtgctttttttgctggggcttggaccggagcgtctttagagtgaccactgccagggaagacaccgtggtcggggcctgtgattcctgccggggccccaggcaggctggagccacaggtctgagttctgtccagttcaggttcgtaggccactcttgcagctctgttccttcttcagctcctctggtcattcacacgtggcctggccacttgcctattgtaccagctctccagggctggggacttgctagagcagggttcccagtgcccccaggctctactttgctctgcctggtctcagggtgtaggggatggagagctggacttccagcctgcttcttggctgtctaggtgccaggggctcgggacacagagctcctggaggccgagcacaagccttgggcagaggtgaggcagagctctgactgtttcattcgactacgttgccaaggagatgctcgctcggagtggttgctctggctctgggattccaaaccaagctgccttctctgatgtggccttagtgctctgggcggatgtaccttggctctgcctggaccctctctctcttccaggcctctgtcccaccaggatgatgcctatccagagctcattgtcctctcccacttcctccccgagcttcccattccgtgtctctctggagggcccatcatcatcctggtggaggtgttgcactgaggaccacagcagccctcgcattcctacacatacccctttgcccgtgggatttttgctgtttctcttctcccactgttggtcgttggctggatctcgttgaaggcctgcggagattcaggtgccatagggagggtctgggacttttctctcggaggccccatgaagttggtattcctcagctctgccccagggtccctctgattccacggaggagctgcggaaagtccacatttttgaagagctgcaggctggggagcccccgtggcgaacagaggctctaagagaggggtctttgttttggggcagtgagactgagtggccagtgagcaatccgtcatcaatggagatcaatacccaggaggtgccatctctcttggcgggtgacacgtaactgttacaaatgggtgcctgtccctgtcacgtcaccggagtgtgcgtcttgatgccctggctccctgaggcagctcgtgttttcgagtgtttccattttagagacccggaaaagggatccttagagctgctttgttttcctttttcaccagaaacaaatgcctttgtgcttctcccgcctgcggactcccactgcgttcagcccgtgcgggtggtcatcggccagacccatccagcctgtggcccgtcccctccacctctcacagccacctaggaaagtagttctcagctctaaggggcattgtctgttccaagaagaatgactgctccctgccacctcccacccccatcccatgtccccatcatagacccagcaggacagacccccccagagagccagtggccttcttgcccataactcgttggtgctggagagctgtgggtagcgtagcaagtgccactgagcatcctggaaaccctgggaggggtcccggcgagaaagagccatcaccctaagaagattcaggaatgggatgatcatggggttcagggtgccccaacagtaggttgaaaatcctgtccctggccaggaggcagggaagtagcaaccttattcaaggggaaaaaaaacctcctggagtctagatacagtatcttagtagtaataaaagcacgggtacagatttactggtgtcggagttttaactgtaatactgtggaatggtaggttattttgtgttcaagagctacatttatcacaaaaatgatgatatacaaatcacttccatatcacaaaatgttcttggtcaaaattggcttgaggcaagtgatatcttcgagtaaacagtatatgaagaccatatcttaaaatgatagatcacctaattttgttctgacagaggtttttgccgcaacaaacatctgtcattgaaataccaattcagagatatggaagccaaattgtagaggttttcctggatttgtcactcctaacttaagaatgctactgttcccatcgtagcttttataagatattaggcagtgttgcactttaagagacattaaaacaaaataaacaattcagagaaatacgctttaaatgcaaaccaaccattaaaaagtatagaagtcaggaatgggccgagacagcctggctgtttttatgtgcagacatcacattaagctcgctttacttggagattttgaactgtagaggcctccaggcctcctgccttcacttgaggtttttggtgctttttaaaggactgtgataatgatgttattcccaagatgtgaaggaccattctggtgctgtcctgacaggggagcaggtttacagctcaggacactggggtgccacggggacctgggggtctccttgtgcctgggattcctcctcgtcaggagccctcactcaggaagccctgcacgggggcaaatgtcctgggattggagaggcaagcgtgaatcagacatttccaaagacgacaccgaagaacttctgctgtattccaagttaaaaactaattgatcttggtccaaactatcataggatagttaaaaaaaacacacaatagaatttctgaggtgcttgggagacattttagaaatatgtcattggtgaccactttttataggctgaattaagaggaaaaaaaggtaaaatatcttttaaagtctccagtttctgagacccctctggagatgatttcattgagttcctccctctgacagctcctatggacctggagggctctggtttctggagtagcatgggagctggccctggtcctggctctcctgcccacctctgcccccttttccctgccccctcctgactgcagccaccagtgcccgccatttcttcctgcgctgcaacagctctggccagtcctctccttattctgtaggttgaagtacattcctggaatccaggttttcaaagcattctatgcagtttcttgcatgaaatacaggagcagcctttcctgggctgcctcacacattgggcttctgtattcctttatgacagtgtgaggcaggcctggctaatgtcttccagcccattcatctccccacagggtatgagatgatgggctttagcgtcagacagctgggcccacactccggctcggccacttacgggctctggcaggttacctcagctgttgaactcgtgagctgtgacttcctcctctgctaatgcggcactctcatgcctgcctcgcaggttcagatgtgacgatagacataaaacacctggcccggctccggcgcacagatgctgaagtcagttttctgaggtcgtggtgggggcgggggtgagggtggcaatggaaatagtgacaacagtagttggcgttgtcatcctgtttacggctagcctgcgagtggctcaggcgaatccagcacagccttgtcctcgggttagctgccctctcagagcttcacatcataactagttcatttatcatccacgctagagactggtcttccagaggatattcctacctcagagccccttcctcccgacgtgctgggacggcccctgctgttgcctggctttgcctggtattacaagggacctcaacctcctgtgctcttacccgggcctgacttgggtgatgcccagaatcccagtcatgaggggaccatgactgtgggccagttgctgacaaccttggtgggttgtagactcatgaaagaaacactcctttgcctcctgaccttgtgcatcagggaggatgcaggaggaacggaagattgagcccggggagtgctgtctcggcagtgccacttcagacaagtgagtgtccctttgtgggacgtgttctcaacaggcacaggtgaccttataggtattgggatgatgggggtgtgcctgcaggttgtgaattactttttgccttcagagccaccaacacattcacacaaacatttgttttccttttgattttatcaggagaattttgtttctttgcccgcctgaacattgcttgccctccataattgagtgtagactaactctgcagcctaagccaaagtacatcttttgtctgtgcgaagagaaagttccatttccctttaccaagttatctccatggcccttggccacagcaccctccgcagaccctcacgtgcatggccgcagcagactgcccacacatttgcacactgacattggtcttattctcatcaactaataattaaaccagaatccaagtaagtgcaagaatcaaaggctttgagtaggaacaaaaggctatgttactttgtatccttaactaagaattttgttgttcaagaaatcctgggcttttgttggtgtagctctgcaagtcagcagcacccgggttccacccggtgcttacaggtcacgagtccagtgacgctgattgaggtgtgtcaccaaatatgctgcagatccggggccagcccacctgggcctccggccacggtctgtgcccacgtgtcacgaggcacatcccgggtcatccggagagggacctacaaagtctattttcaaaccaagttattttgtgaaatattgtagtgaacttatcaaaactggtgaagttgatgaagtgaaatgaaaatactgccatgaaaattattttagtgcaacataatgagttctgtttttcatatctggcagatattacctactaaatctaatctgcaatgctgagaattatgccattttttatgatttgtttaattttgactgaaaaaaattgactattcatcgattcttgacctgcgagtattgagggaaaaatttagttaataagaattttcatgaggtgtaaatttaaatgtatgaggattctgcctatcctttaatactatagacattaatttaaaaattctataagggcctgagggcctggggtgtctgaagaacagaacatggaggcagttatggttgttaactggtagacaaggtctgtcaagataatataggaatattttggtgttttccctatatccttggttatatgtggctgagcataattagaagttaaatttgttttagataatctcttcggctgtgaaatggcatcaatacacttaagagtaacaagtcgaatagaaatcagggcctgttgttagtgtatgagcacacaccacacaaagtttcttcttggttccctatttccgcagttcaaagggggttttaaagaagtcataaaaaatgaaggatcctaatattgcagttggagactgagagtgaatgacatattctttacacacctcaactgtcaacatttctaatcaaatcacccagccttcttacttcttaaatgatacaggcgatatttcctgtaataaacacccctaagtctaatgagaggccctaaggcaacttgaaatatatgaattcattataattgaacaacataatctgcagggcaaagatgcctgctacccagctctgaacttcacagagcttgggtgttttatgaaaaatgttatacgttttgtttacaacgtatggctgctgtttgaagtattgtatgttcctgtagtacataagacggggccgcataatggaggaaaaatcaaggaggcaatctttcattttgttctggtatgaaaaattcaaaagactgaaaactcacccagagaaattttgcaagcatattattttccaatgtttcgatcaatttgtctgtcaaccatgctgagaggtggaaggggccagcaaaagcaatttagcttgtgaggtccaaaatagaaatgttttagggaaccttgtcacatgttatttctttatattagaaccgccgtgtgttttatttgctggtcataatatgaagagaaattgatatcaatcatctaagtaagctatgaatatctgatataaatatgacttttatatgcatgcatcagaatacaatataaattaacctcttcatgcatgcaagaatcgttagtgcgacagcgggctccctgttttggatttttccatttgacaattcacggtgcattttaattgattgtacccaagtgacactccgtggaagcatcttgcatgtgaacgtaactgaccctgccagggctttaattaagctataatcttcctttagtcagtgcatctgggattgataaacatatgtaaaccatgctgaccatctaagtgttgctttaaagaaaaaaatggtgcagatatgggagttttaaataaacggctttgatgttacctccagttgaatttttagttgggatttgttaagatcaagttatcttaggagtagttaattctaaggtgaatatacaatcttggtgaaacttgtcctggaaaacctgtaattctgtgattagtctgtgtgtaccccaacactttttcttcaaatcttagattaacactgaatacattaaggttatttttcaaacaggttatagttcagagaaattaatttaaatcagttggcttacagaagacccagtttagttttaatttgccttaacagccagggtcttcctgctctacttacttagacgtcctcagagtgtcttctgagtagttggctaccatttgcatggcatgattccgctctcggagcttgatatctttccagattttcagaatttagaattaagtgtggaagtcaagcatactgaaagttttttatactatggatgctgataaatagaaataaactatgacaaattaattcagaaatctttccactcagtgtagatattaagttgtggtcatacggaagaagtcttgaaacacgatttacagtaaattatgataatttgggatagagactgtgccattaagagttgttaaacagcatgattcagacagctctgttttttccagtgactgcctattcctttattgtatatgtgtacccaagtgatgctctcacatttatcttaagtccctattattaatatacatttaaagtctcccgaggttttgtttggtttgctttggtccttttttggagtgatttgaagcaaagttaattgtggaacctatttatagacatctttctatacttgcacaagtctgtgtataatcaattctgagaagtagaatttaaaatttagtgctttgaaaattgtcctcattttaattttttggattttaattaggtaaggttgaacatttttccttattttcattgattgtttggggttccttggtaaaatgcttgcttttgtttcctgttgggttattttgtctttttcttattgatatgtgagaactttttgcatattaaagaaagaccatcatttctattttgattttgcccagggaatttttttcagaataagaaattcaactagatttttaaaaaacttttaattgggcaataatttcagatttacagaaaagtcacaaagattgtacagatccttcacccaggatctcccaatgttaacagcttacataaccatagtacatggtttgtcaaaactaggagattaacattggtccattgtggtcagatttttaagtcccttcctatggcttctaaatttatgaggtgcttacacaaaggcctttttaaccttaagattttttttttgttttgcttttgttaatcatatatgtttatttccttctactttttaaatgttgtttttcatattttcatctctatttatttatttgaaatgtgttttaatttaaagagtcttggttggaacctatctttattttcatctaaatgctaactaaccaactttttcagtatcttttgaattactcgactttgtgtttacacacattttacaaggacaacaaaaaagtgcctgctgattgactttgtagtcaatcataacccttgaccatattttttttggtggtacttcatatatgaaagagtataaaatctaggttatttaatgttgttataaaattattctaagatcaccgaatggagaatacttagattctaaataagtgactttgtgagaattgaatttttatatcattaaccaattctaagacattttaaagaaggcagaatgatctaacccaatacttcatatacttagttttactgtggaatcccaagggcaacatgtcccccgacccaacgacaaaataacatatattcctattaagtttagggattgatggagcttgtaattgttaatttgtcacagatgatactgttatttatgcgcagttactgtctccctttggagagtttcatgtgctaaattttcagcaaatagtttgagcctcacctacagcttcttgaccttttggggaaaaaactatcactttaaaagaccttttacgagtgagcaaatatatgcttttctgttttcacagtaactttcagagaaacccactggtctcagcatggcctatgccttggcagccctttccacccgtagcaggttgttctttacctttcgtttttaaggtggcttccagttcataccaagctcacatactgtggcgaagagctttctgagaaacttcataagattttgctaagatattaatgaataatttagtatattgttgcatatatgactgagtatcacatttcagtaatgtttttactatctttaaatataggtacataaatcctagcttggggtaaaaggcattgacattttctcagtaatagttctttgtagacagacctgggttcaatattagctctgccacccctcgagctgtgtcaccagaagtaggttgtcctgtacgtctaacttcagtttgtctattaaaggggattgcaccactgacggcttgatcagggttaaatactccagcattccttggaaaacacttctgtgagcattgtcgcagacttgatgatgtagcaactattttccctaagtttcccactttagaaattattaaaaatattgctgccttcatagctttttcaaaggttttctcttatttctgtcagatctcttacatctaatattctcattcccagcagataattaatctattaagaggcaggctgtgggcccctctgataccagggaaagtgaaaggcaccagggcaggagttctgattctagcaactgcctggccgctgtgtgatctccacacagcatcaaaccttgcagagttctaacagaagtgaatagaagattagtctcccacacaacaataatgggagactttaacaccccaccgttaacattagacagatcaacaagacagaaagttaacaaggatacccaggaattgaactcagctctgcaccaagcggacctaatagacatctacagaactctccaccccaaatcaacagaatatacttttttttcagcaccacaccacacctattccaaaattgaccacatagttggaagtaaagcactcctcagcaaatgtaaaagaacagaaattgtaacaaactgtctctcagaccacagtgcaatcaaactagaactcaggattaagaatctcactcaaaaccgctcaactacatggaaactgaacaacctgctcctgaatgactactgggtacataacgaaatgaaggcagaaataaagatgttctttgaaaccaacgagaacaaagacacaacataccagaatctctgggacacattcaaagcagtgtgtagagggaaatttatagcactaaatgcccacaagagaaagcaggaaagatctaaaattgacaccctaacatcacaattaaaagaactagagaagcaagagcaaacacattcaaaagctagcagaaagcaagaaataactaagatcagagcagaactgaaggaaatagagacacaaaaaacccttcaaaaaatcaatgaatccaggagctgattttttgaaaagatcaacaaaattgatagactgctagcaagactaataaagaagaaaagagagaagaatcaaatagacgcaataaaaaatgacaaaggggatatcaccaccgatcccacagaaatacaaactaccatcagagaatactataaacacctctatgcaaataaactagaaaatctagaagaaatggataaattcctcgacacatacactctcccaagactaaaccaggaagaagttgaatctctgaatagaccaataataggctctgaaattgaggcaataattaatagcttaccaaccaaaaaaagtccaggaccatatggattcgcagccgaattctaccagaggtataaggaagagctggtaccattccttctgaaactattccaatcaatagacaaagagggaatcctccctaactcattttatgaggccagcatcatcctgataccaaagcctggtagagacacaaccaaaaaagagaattttagaccaatatccttgatgaacattgatgcaaaaatcctcaataaaatactggcaaaccaaatccagcagcacatcaaaaagcttatccaccatgatcaagtgggcttcatccctgggatgcaaggctggttcaatatacgcaaatcaataaatgtaatccagcatgtaaacagaaccaaagacaaaaaccacatgattatctcaatagatgcagaaaagacctttgacaaaattcaacaacccttcatgctaaaaactctcaataagttaggtattgatgggacgtatctcaaaataataagtgctatctatgacaaacccacagccaatatcatactgaatggacaaaaactggaagcattccctttgaaaactggcacaagacagggatgccctctttcaccactcctattcaacatagtgttggaagttctggccagggcaatcaggcaggagaagggaataaagggcattcatttaggaaaagaggaagtcaaattgtccctgtttgcagatgacgtgattgtatatctagaaaaccccatcgtctcatcccaaaatctccttaagctgataagcaacttcagcaaagtctcaggatacaaaatcaatgtgcaaaaatcacaagcattcttatacaccaataacaggcaaacaagagccaaatcatgagtgaactcccattcacagttgcttcaaagagaataaaatacctaggaatccaacttacaagggatgtgaaggacctcttcaaggagaactacaaaccactgctcaatgaaataaaagaggatacaaacaaatggaagaacattccatgctcatgggtaggaagaatcaatattgtgaaaatggccatactgcccaaggtaatttatagattcaatgccatccccatcaagctaccaatgactttcttcacagaattggaaaaagctactttaaagttcgtatggaaccaaaaaagagcccacattgccaagtcaatcctaagccaaaagaacaaagctggaggcatcacgctacctgacttcaaactatactacaaggctacagtaaccaaaacagcatggtactggtaccaaaacagagatatagaccaatggaacagaacagagccctcagaaataatgccacatatctacaactatctgatcattgataaacctgacaaaaagaagaaatggggaaaggattccttatttaataaatggtgctgggaaaactggctagccatatgtagaaagctgaaactggatcccttccttacaccttatacaaaaattaattcaagatggattaaagacttaaatgttagacctaaaaccataaaaagcctagaagaaaacctaggcaataccattcaggacataggcatgggcaaggacttcataaccaaaacaccaaaagcaatggcaacaaaagccaaaattgacaaatgggatctaattaaactaaagagcttctgcacagcaaaagaaaccaccatcagagtgaacaggcaacctacagaataggagaaaattttctcaacctactcctctggcaaagggctaatatccagaatctacaatgaattcaaagaaatttacaagaaaaaaacaaccccatcaaaaagtgggcaaaggatatgaacagacacttctcaaaagaagacatttatgcagccaaaaaacacatgaaaaaatgctcaccatcactggccatcagagaaatgcaactcaaaaccacaatgagatgccatctcacaccagttagaatggcaatcattaaaaagtcaggaaacaacaggtgctggagaggatgtggagaaataggaacactttaatactgttggtgggactgtaaagtagttcaaccattgtggaaatcagtgtggcaattcctcaaggatctagaactagaaataccatttgacccagccatcctattactgagtatatacccaaaggattataaatcatgctgctataaagatacatgtacacgtatgtttattgcagcactattcacaatagcaaaaactcggaaccaacccaaatgtccaacaatgatagactggattaagaaaatgtggcacatatacaccatggaatactatgcagccataaaaaatgatgagttcatgtcatttgtagggacatggatgaagctggaaaccatcattctcagcaaactattgcaaggacaaaaaaccaaacaccgcatgttctcactcataggtgggaattgaacaatgagaacacatggacacaggaaggggaacatcacacactggggactgttgtggggtgggaggagggggaggggtagcattaggagatatacctaatgctaaatgacaagttaatgggtgcagcacaccaacatggcacatgtatatgtatgtaagaaacctgcacgttgtgcacatgtaccctaaaacttaaagtataataataagaaagaaacaagatgagcttgtggactgtctttcacatcctgggaacttatagaaaggtagttaggattattaagcaactaaaacattttcctttatttttccttccttaccgctacctctcccaagttgtaataatttaatagttacaactattagtacaaatagttttaaaagtctctttgagttgccaccctggagtgtgtatctcctaatgggataatacttaaggcattttataaactttaaagtgccatggacatcagtcatttgtgcatttgtgagcactgcctcatttaagcctgccgtcgccttaatgtactgtgtacattagatacgacttcagttcccttatcccaggagggctgaaacttactgggatttctgttatattgacctaacagattaggatgattttaaaattttactcattttctatattgaattaaaacaagaaattagctgagcattttccaagatggaaggaaaaacggccattgttttgatttctagttatgtaacccattccaaaaattcaaacatgagattacacggagtgctgtattaaacagatgagtacctgctcactggcttcctttcacacagtcgcctggcactgcagccacacctgtgctcacctgtacctgcctacctgtggctgggccaggccccaggagtcccgtgggtcaggagcatggcatggagggtgggcagagctttctgctcatccccggatcatggcagcgtcagatggaactcggcctgccccgtttctgtgcagctgtcaggatgtatggggttttcccatgctccgtgcctccatgcctgcggcactttggaaggacgttaaggcaggacatctttaggagaatgtctttattgactttgtctttatttaccttgggcctggcgctgttatctcagctgagtgtccgtgtttaaaggcgacacatggaacgagcatggctcataattttgagtttcttcttctggagccttactattatatgctcagaaaccatctctgtctgcgtggtatctctcctctggcagtgcagtaggtcacacatcgttgaggttatgagctttggagactcttagacatcagctctcatgttaactctgtgattttgggaaagttgacctatatgtttttgttttctttagtgtgaaacaggaatgccttctgcatagcgaggctgtcagaaaagcccttgacactttctggtcccagagagggcaccgcagccacccaggcctgcccgtgagaggtggcagctctgggaggaacactccttaggccggtgtgtggtactgtcaggtgcttatttttgtttcacaaacttggtatttattaggtgttccaggctttgttcgacccgggtgggagggaggatctttgttggaggactctcactttctaattgcgggtttttgttctgaagccatagggtgtgttgccgtctcagcagggaggagtattccccattaacgggcaggtggcatcgtgggagaagcacctgctgtgcccgggggggcgggactgcgcaggatcagggggatgcgcgggagccagtggtgctgacactgcataccatgtgtcaggagccttggaagtcggcttaaatggtttaatctgatttaatcttcacaaaaaccttgagggataggcattacgattaggcaccacagtagaaactgaggcatggagaggtgcaacagtttccctgaggtcacacagctcttcagagggggagacaggacttaaacacgaggaggctggctccagggcccgtgggctttgagcgaggaaggccttctaggtctagacgttcctaggctggggctcagtgataccctaaagcccatgcacacctcctcagacctggctcctgagaggcagtcctccagagtggcctctttgctgagactgtgagcctgggcttctgtctctaaccactagctacaaaaggatgctggacagacatcctgtacctagggacaccccatgatggcttgtcccccgaccacagacaccccatgattggggataccccgtgaccatggatgccccataaccacagacaccccacaactgggcagctcaaggcagcaagtgccttccttgtgtgcttccgttttgttgaggtctttgttgcaaacatcgtttgttgagggctgccttacccttagaagacatagtaccatttctgggaaccatggttgctgttgagaaatgcatccttacacgcccagatccagccgctgtctggtcccactgacatggcacaggaatcaaagcaggtgcttgggggatgtcaacagttgaatttggattcctcataaagcaatgttagcacatgacactctgtgaggaaataatgatgctactttgtaagataagaaaggggaaacagctgcgttggtggataattgttaacggtgcagctgcagtgtgagttgcacactggaaggtgtttgccgtgacctgtcgcgggctgagctttttggtagcctggcattgtggtggatgcctttcattccatccgctgtggctgagttctgctttcctgcccctggttctgcagtggcgtgactgggctgcttacaggccctgtctttccaagccaccatttaattggggagggctactgacatggcaccattgaacttgagacctgccattcctccggtggcagtccttggagaacagggccccaggtctttctgaccccacatcattggcatggtctcgcagccaagtaggttatgttttctgaggaaatcatcatgtcattcccatctactgttaatttttaaaaagctgtgattcctgatgaaacaaactagagatgatgcaggaactctggatctaaatggtcagtcactatcttctgcaacttgctggagtgcagacacgtctcagaataagatattctcagactagtcagaacattgtttcctttctttaaaaaacaaaacagaaaaccactgagcccagagttcaaggcctcctaaagaggaagagggctttggctacctgcagataagaaaggttttggtggtaatgctcaagtgtgagttaggtgtgggcgtgagcatgcccagtggccgtcccgtcctcctggagacaaaaccatttccggggtatcccctggctaagcatttgaaagcagcaatttattttcaacagtttctatccttaatatttaaaaaataggaaagtgtactcaatcagctttctgttgactttctgctgcctggccggcgtcttgtaggaggcgctctgcctgtctgtgcaggaggctgtccagggtgtgcgagccacgtgggccagcctctgtgggcggactgtcccaggtgggtggtggtgagggggtgaattcctccttcacatttgcttacaagtgctccttttttgagtgttgggagcacatctgtgtatgaaggacatcattcggacgctttccagggtggtgggaagcagcctcccttagcccggctacgtctcatgaatgtgcgtggaccccgcctggccttctgcccgacatgtactccaccccgccttctaccaggagccaaggctgtgaccattgtgatctgaacaagccgttgagagtgtgctctgttgtcagtgaattagttcagagagtccctcctcgtgttatagttctcatgaccactgcgcagtgttgctgtgctctgcctctgacgggtggctgccaggcattgaaaaaataacatcgtaagtccttactgctaacactgacttttaaaaacatttaattgtgtgccttttaaacttttgttctccgtacaacgtcttcccgatatttagattttaacttttaaaagacagttacaaattatttctaaagtataaagtctggttgttgtttttttttttgatggagctgtgaggaggaaaaaaatgagatatagaattttagtgtaggtgatcttgtgctttaggataaaaccatttttctgttactgctttttggtatctaaatccccggcagtttcccccttcggataaagcatcatgtaggttttagcacaccagcgggttcctggctctttagtgaaaaggtggctctgaggattgccctgtgcccgccatgaccatcctggtggcttggcgacttcatattgactgcaggccctgtggacagaaagaattatttcttttttagagaaaagatatttatgaccgaaaacagtgctaaaaacatgagaatattgatcatggttttgagagatgcttgcactgaatcacttgatatacctaaatatcggctttattctatcttccctaaaagacagattgccaacacaaaagatgaaccatcttgagggaaaaaaatcttatatctttctgataggctgtcttgcttccttccataacaatggggagaaaagaagtctgtgtggtttcctgaaataagcaacaaatataataaatggtgtatcggaagcttctgtaaaactgccttgggtgtactttatttaacttgtagtaataagttaaattaacatcaaatggaaattcaaatagctaaacatttaaccaatctaacagtaaacaattattctaaaatcaacataaaaataaagacccattatcatcagaagacctaattcattgtttttagaggtaatctcttggggttctgtggaaatttataaaggaatgagtgaggctaattatttactcatcagatttttgaaggcaaatacttttctgttattcttaaattttagacctattttggatcaagatggtgtgttgcttttgtagtttaaggtagaagatagtgaggctgacttccttccttatcccgggtagaaagcctgactttttctggatagattgcagcctaggggttgtggttttggtcctgttctgcccttttcccaaattcttcttcattgcatctgatacatcccccttgcctgcagggcagggccctgtctctgtggcacacatagcaggaccgtttacatttcctctgctcacaggtgccgcccacaccttgcttcctatttcatgtcctcctcgtctctgtagttgagggaagagtattccattcaacagatggaaacaccattgcatctgactgccatgtctttgaaacctgccagaccaagtcttgactttcgttttgttttttttggtggagctgggaggagacagatgggccatacagtctatgtgtgggtgccttggtgtgggacacaagaaagtgaggcaggacgtggagcaccaggtcatcagagctggcagaggctgctccaccgtgcaccgaagacttggcatgtcagtggagccaggaagtctccgatgcagaagcggaagtcagtgtggccacaggagcgaggtggcaaagtgctggccttggaggaagagagaggtcagagagtagacagagggtgaggcctggatcatcatcagatgagcagacatgaaagccgctctcaacaggattagaaaacacagtttctaggggattcttgcagggaaacagacatggaggggcaccatttggtttgtaaaaggaaggtatagccctgaagttggcaagctcttggcctgctggcctgatgcagcaggcagctgagaattgcttggcctgtccatgggggcctgacaggtatctcaaattttaattgccagcacacacgaatcaggagatttcatatttcaaaaagcatgtatggctgctgtttcttttttgtataaggcttaatttgttttttttttcatgttatagctttcctgagatacattttacatactctaaaatttacccatttaaattgtacagcatgctgggttttcatgcatttatacagttgtgtgtccatcatcacagtgtaattttagaagatttaaatctccctcttccccactgcccctgccaaaaaagggaccccagacctaccagcagtcatttcccatccccctccctctggtaccagcccaccactagtctgtctgtgtctgtggttttccctgttctggatgttttgcatcaacggaatcctgcaccatgtggccttttgtgcctggttcctttcccttcgtgtggtgttttcaaggttgctccacgctccagcatgtgtcagaacttaattccctgcggccaaacaatatcccatcatgtggatgaaccacattttgttgatctatacatcagttaagtcagtttcgccttttggtgttgtgaataaggctgcagtgaacatttgtgtatatatgtgttcatttctcttggggtatatatacacacacacacacgtaggcctaggagtaggattcctgggtccgatggcaattgcatgtttagcattttgaaaaacttatggttttctaatacagctgccccattttacattcctgccagcaatgtatgagggctccaatttcttcatatactcaccaacactttccatgttgtctttttgattttagccatcctaaagggcgagaaagatatcttcttgtgtaaaacgggcaaataatcaagctgggaatggtaagcagggtttttattcacaatagggctggttgatgggattcacaattacagaaggccacagagggaggacacacttggtgtactatttctttttgtcaaacaatagcattattgagatgtaaatgacatacagagtatacatacagtagttcccccttagtcatggggaatatgttacaagaacaccagcagatgctggaaaccgtagaaggcaccaaacccttggtatccctgaggggttggctccaggactcctctcggatactaacatccgcaggtgctcaagcctcttatataaaatggcatactattcttatatagcccagagacaccctcccatattttttaaatcatctctagattacttatgatacctaatgcctagatatcacttcattcttgtgaattcaacgtagtccttaacatatagcaaattcaagttttgcctttttgaactttgtagaatttttttccgaatatttttgatctgtggttggttgagtccgtgagtccgtggctgtggagcccatgcatatggagggccggctgtgcagtatcttttcctacacatacatccccataataaagtttactttgtaaactagcccagtgagattaacagcagcagtctatggaaccattataacaacatgccagcatcactattcttgcacttcagggccattattaagtgaaatgtgggtgacttgaacacaagcactgcaatgaccttgatagtctatctgatagataccaagatagatggctactaagcgacagaagggcgggggtgtgtacagtggggatgcaccggacagagggatgattcgtgtctcaggtgggatggggcgagatttcatcccactactcagaatggtgtgcaatttagaacgtatggattatttatgtctggaattttccagttaatatttttggaccacggttgatctcaagtaattgaaaccatggaaagtaaaactgtggataaagggggccactgtatctcacatatacagtttgataaaatttgcctatggatgaccccaatcaaaataacaaatattctcatcacccccaaagtttcctcttgcacctctgtgattcctctcctcacctcaacccgctttcctttctcatccccaggcaatcactgatctgctgtcactgtgcattagtttgattttctagaattttgtgatgcacatatatacatatatattgtattttacacaaaattttctcgttttatgaatggaattataacgtatagtctcttcgtgtctgagttcttccagtgtattgagtttgatattcatgcatgttgttgcatgtgtcagcggttgattactctttttgctgagtggtattccattgtgtggggataccacagtttatcattcgtttgttattgtacattgaatattgttctttctgctttcggctgttgcagacactgctatgaatatttatatgaaagacttggtaaggacgtatgcttctaattctcttaggtaaacacctaggagtggatcctatgggcaatgggtgtttagcattttaaaaagttgccaaactgttttccagagtggctgcatccctctgccgtttttatgaacagtgggtgggaatgcaattcttgcatatagtctctgatttcatatcattttccttttgcctggaagacttagcatttcttctgtggggtctgatggtgatactgtcttttagtgtttttaatgtctgaaaaagtattttcatatttaaaagatatttttgctgtgcaaagaattttgagttttctcttttccttttcttaaagatcttgttccactgtctctgacttgcattgtttcggaccagaaatctgctgtcatccttattttccttcatgtatgtggagcattttcccccctccaggggtttttgagttatgttctttatcgctggctttgaccatctggctcattttttgggttggtgtgcttgtcttcatgtgtctagtgcttgggcttcattgagtttcttggtgccatcaattacatctatatttgtctgttttaagttatcccacagttctctaatattgtgatttttttgttttttttgcagtgttttattttggtagtttctattatgtttttgagttcactaatcttttcttctgcaatgcctaatatgctttgaatgtcatctagtatgtttttcttctcaggcatggtgattttaatccataaaaatttgtgtcatttttatatcttaatttttctttttctttttttttgagatggagtcttgttctgtcaccaggctggagggcagtggtgtgatcttggctcactgcaacctcctcctcctgggttcaagtgattccctgtctcagcctcccaagtagctgagactacaggcacaacccaccatgcccagctaatttttatatttttatcatgatccacccgcctcggcttcccaaagtgctgggattacaggtgtgagccaccgtacccgacctatatttttctactcacctttttgacatgtgaaatacagttataacgactatgttaatatccttgtctgttaattctaacatctttgtcagttttgggttggttttgatttttttctcctcctagcagttgtatttttattcttttatgcttttcttgtaatttttgaatggatgctttatatgcaaatgttacctggctgggtgctaggttatttatttaataaatatcctttagctttgttctgggaggcaggtaagttacgtggaaatagtttgaatcttttggatcatgctttgaagattcactagttgcaactacagtggtatttagtttcaggctaattattcccacaaccaaggcaggattgtaagaggagagatcatggccggggactcatggctagacaaaaaacaggacctcagtcctatcagtgcaaggaaatgaattctgtcaatacatagtgagcttgaaagagactcgcagcctcagccctgggagtctcagttgcagctgacattttggtttcacccggagaaacccttagcagaggactgagtccacccgtgcctggactcctgacccatggggcggatgagacagtagatgtgtggtggttaaaccactgaatctgtggtaatttgtggtgatttgttatgcagcagtaagaggtaataccgtatgcatcttcttgcatcatttaccagctttttattatatgtggaagtcttacgtctttcctcccttttttattgccctctgagtaccttgttgtccctttctgtgtcacattcttcccactcgcacgcatgcatccaggaataagagcactgtggctcggtgtggccaagacccactgtgtaccttccatgaaagatgtttgtgagtagcatgggcccccgaaccctgggtccagtcctgcctgtactgcgagccagcactgtcatcatggatagtgccctcagcccatactctcctctgtgaagtgtgtgtgccagcacactgacatcacagggtgcctgcagcatttggaaaacacgcagcatcatgcaaactgcctaggagtgctcaacaatttggagctggtatctttacacttaccacgttgaatattgcatgcagactacatatttgcagagcttaatgaacagagaggcattttaggacaactaggagaaactcgcgcagattcccctcagggggagggaagctgttttgtaggtgtctctggcagtagcctaatgcagttgctttagaccctggtggtctggatactgcttcactgtaggctttaattgcattgctccaggtctgtggaaggctggaagaggccggtgtttttgtgtcacttttgctaccccctactctctctagttgacaggccatttggagcaccagggagtacaatctggctgaagaagcggtatccaaggaggacgtcatggtgtctgttctcgcagtcatggagcctagtgccaacaggccttaattctgtgttctggtgtctcatgagtggctctgcagtgggacgtcagagcagccaggcctcaagccgcctggctggggtggggacaaagtgtgtgttgtcccttcatcacgggagtgtggggcctggcacacgccctgccagggcctcacttgggccatgcctcagagcatgggtgctactcacctctgacctcttgagttttgcaggcaaactcaggtcgaatttggattctcagtcgcattgtggctcacatgacatgaaataaaatgttgacatttatttgcttcttgtggcctctactaaatatataaaataatcaaaactgaaactttccattattctcagcaggagtgaaacatcttgactttggaaatttttcctagtgatttaactcaagtcggatatcggcagcaccacctgcaatagtgaccccctatggcctgcggcggggctgcttaacgctcacatgggtggtcaccaaggaagggctgctggacaggcagactcccagagcagttgctacttacaaatccagcttccagcagggagaccattaaagggctgcttccacctccagggcgggcagtgaagcctccagctgggagccgcgtgaaaatcagagccaatgggagctggcagcccatccaccaggagggtccagaagacagaggcagaggacgtgggatctggagcccaagggaggggtcccaggtgggttgaggctggagatggcccaggaagccctggtttggggtgagggtgggcgagactgagaggctgctcagacaggatgggtggttgaatggagtgcggatcatgagatcatcacagggccacagcatatcaggccatgggttccctgttaattcctctcccacctcgaggaccggagcttctgttaggcaggcgggggctctgccgcaggcccacattctctgctaattcccttctctcctaaaggtttcagatctgtctgtggtcttttgttttacttggaaacacatgtttaatatatcttataaaatacgtttaatataaaaatatagttcactttatagttcagttgctttgagcacatttagtaaaccaagatgtgcttatatgaacttttccctgaaaagtacctggatcccagagttctacatggattgaatacttatgtttcgattttaattccttagatggctaactcagcattatttaaattttaataaagagactggatacaatgtgagcgaatttctctctatattttgtgaatctctatcagagcaaaataaaactgtttctgttttgcaatgaatagtttctagccatggaattgctggtcgaggcaagaaagtatgaatcttatttttgtggatctagccaagaaaaagaacgtaaactttgaaaagtatgtcatttgccattcacagtctaatgagaaactcagagaggctagaaactctcaataaaaattctgatatcagcatttaagatccagcaagatagggtatacgggcatttaagggattcacaatccacagtttactggcactttaaatgctgtgaatcttgtactggcaatcacaatcttgattttattaccgagggggacccctcgtgaggaatatgtcggtgcagtgtgcaggttaaactgtgagctgctccagcctctctcccgccggctgacggaaaggtggtcaaattaccttcgcaaatctgaagggtgcttggctccagcaaattggccatttagtcaaaaagtgtctgaaaatgacgtagtcgttggaagtgtttgggaataagcgatgagttggccaaacgcagtgtgttttctgtaggcaagcacctgtggcagctggcagggatgggcaggcctgcagagatggcttcctgggggcgcagcgtggtcaggcttgagggtggtgacagtgcccccaggagaaggcgagactggccagaactgggacgggcatgatgagtggccgtgtttcaaatattgtccatttttaacttttgaaaatgccaaaagcaagtatgctgccttgtggaatctgtgcaagcagttctttccaggctgaccttgaatagcctgacagcagagcgaggagtgaaatgagcacgcctcaggctgtggtccactcgtgcgggaagacatggacctgctactgctccctgccctctgtctccccaggaaaggagcattctggctcagagattctcaaactgggtcttccaagaccgcacaggtgctgtgtcaggtcagagatgcctctgtaacaacgccaagacctcgcgtgtccaagagtgatgctgggggaggctgctctagctggacctagatccaggccaggccccagacctctgcagctgtccacctactcctcaccaccacgcgtttgcaggtggtggacggtgttttatttaagaatgtccttgttggccggacgcggtggctcacgcctgtaatcccagcactttgggaggccgaggtgggtggatcacaaggtcaggagttcgagaccagcctggccaacatagtgaaaccctatctcttctaaaaatacaaaaaattagccaggcatggtggtaggcacctgtaatctcagctacttgggaggctgaggcaggagaatggcttgaacccgggaggcagagatcacagtgagccgagatggcgccactgcactccagcctgggtgacagagcgagactccgtctcaaaaaataaataaataaataaaaaagaatgtccttgttgaagcaataaacgctaattgtactacaaactgaccctggagcacctctctttttagtagacacggggatgaagtgaagtgtgcgtaaagcacttctgccatggaccaaagcagggatgttttccggaggaagggtttgcgtgtgactcagggtgacgggagtggccacttttttcctggaataccattttcaccattgaaagtatcactgaccagccaaccatatttacccacacttgggtttttggcagaaattttcaaggaaaatagctgacagtatttgttgctagtactgaatgatgaaatctgagtttcaagtgaaaatcataattttgagaaacttgcacctactgccgtgagcttaacagcatttcaatgtttaaacaacgttttgctgataccagtgtggcattaactagtgtgaatttcggtagtgtgctgtggctgaaatgcctaacgtagatttgcatacctcagtgaaccagtattttctaaatgatggataatgttataaaattatgcctgggtaaaaatccaaaatgcaggctaggtgaatggattttaatggaaccgtgcagacagttgattcggaaggcttcagggtccacatggaaactgtggtttgggagctgccccttgttgagagttctgttcaggtatcaaaggagagtatccacagtggcccaaggtagattttcttcctgcacgtcagccagagccctgtatggaaacagactgaaggcagaagcagctgcgagagtccacctgccttctgttaagccagctgtggaagacagtctcaaaaatgtaaaccagtgcaactttaattaatcctttttttttttggaaaaatggttatttttcatgaaaatgttatatgtgataacatgaaatcagttcataactattttgaaatgaaatatttttaaatgttctcagctttcatttcaaacacagtatcaatagaaataacttgcatgaggaaaaaaatagctctttagagtcctcatgatgcttaagggtgagactgaaaagtcagacacccaccgccccagacaaacaccatggtggcctcggggatgctgcgaggtcagagaacctgcactctgcttccttcttgtgtagggtgagggagaagccccaagccgtttcttctcagggctcaggtgtctctcatcagtgtagggagggtcttcgggcatcctatgccctgctcattccctcgatgttatccggacaggagatttcagctcctgcgcagtgggcgctgttgggattcccaggcctccaagtcatgacggtgggtgaaatggagctggtatttgagaaggctcggaagcctccccttagaaaggtgggtcctgatcagcagtttgggatgcccctgtgtttcctgcatttgggatgggcggtcctccctcctgcctccccagctctcttgagcacagtgtggccggcatctggtcaggacttcagagtggccagccccgtgttgccgacgaatctgagagggagcccctggcttcttatttttctttgaactacgtcaacggaattgcttcggatccttagccattttaaaaaacacagtcatatcacgtccccttctgacattctcttaagctttagcaaataacagaaatttcagtctcactgtgccttgttcagaggtgacaacaacaatgggtggctgaggcgtaagtctcaatcatccaggctccttaaagcagctttcgggcatgtgtggggaaagtacgccacagacacccagggctgtgcttccaaagaggttttcaagaggttgagtattgacacctttccttacaaggtagtggggaggcctggaggccaggcagtgaggcgaacagtgctcagtgaatccacgctccaggtgaggggaggcaaatgtcggcagagaaggtgggagcagaggaggagttccttatgcagaggtctctgggcaggcagaggaaatgagcctcgactttgctctgccctgggaagggaagcttgtgatccacattatatcagtgtggggttttatgagctggactgagatggttgatctaaagtcacagttggcaagtccctgtttatgcgaggccggcaaagaattcacctctgagtgatctgtgggggcagccctgtgttggtgcctgaggcctctgcctttctgtggaggtctggctgatgcatgaggctagaaacagccattcatttggaagagggcgttgcaatgactcagcctctgggcttaagctttccttttgcataagaagtctgaggggtcctcagatgttttatcttcctttacaaagttgtgttgtcaacaccaaggaaacagtcttgattctgaacaaggaggtagcctgggtactgaaggtgaaaagagctcagatcagaagtttcttggaaagagatttaaagatttttaaaaaatcagattactaaggcatattaaaatatgttcagtcttacactgtgttctttgaaaccttgaattactctagcaaaaggctcagagggtactgctatgagaagctggatcttggacatctctttcaaatgcctcggtacctttcaaagggctttggatggaatgaagggacaccattgggtctcacagctttctcctgcctaacataccacagcagtgtatgaaattgttcccatcagctccagcgcgtgaaagacaatacgaacagtaacacccccaaagaaacagtggggctggagacagcagaatccttggagggttctctggctgaagaaatctctctcctaccacagatactgtccccagagaaggtgcacctctaccaccaatgccctccatcctcagttgacaaggattcaaaaagtttgttggtgacgctgacatgtaatattcccctgcgagttacacacatccaggtgaccttcggaccagcattgccggcacacccgtcacgccatcaacctgccaggctggagaagaccgctcagagcttttccttgactggggagaggggagccggagcagcgccccacgtctcacggttcacccctgccgtctctcggggccttccttcaggctttccctgtatcctcagatcttcgccagggtcctgtgatccagtgttagttcattccatgtgtcatatatgaatgatgtcatttgaatcatttcaagtccttttgtaggaaaactaaggcagaaaggccagcaccacaaagaggcatccagaattctcctcggcacaggagggtgcagccatggtgcctttgaggagacggacacgcttagttccccctgccatcagtgggcatctcgatgttaaccagatcttagaaattgctctgctcaggttggactcataagtgtactcttagatgcattcttccatgtttttggaatttcctagagaaaacgtcttctttgttcatgcccgtgacacacgttcctccctgtggtgacctggcgtccatcctgagctttcgtggtgtccacccatgaaaacaaaggtgtctgatcccccgtgccacagacatactcttaaccagaatctcccaacctggggtccgtggtggtcttcgggggggtctgacactacccagggtcagatgaaaagtgttgactggatgcgtttatgtgggcgctgcgatactcttcttggggcggggcccagagggttcctgaaattctcaaaagtgtctgtgtccctccttgtgagtaggagtcactgtttcagatgctcagctttccaggtgatttttcaaatccctggcacaggctttcaaggtgacttaagattgtctaatcctcctgcaggtagaaatgagagtcatctggctgatggtcacgagccgtcggggagttcctcctgtcttgcactcaagcagaggagtaaggagacccctttagaatgtacttctaattgttgaaaagcacctaacaagttttctatgggggagattatacagggactgggtagggacaatcacgtaagacatacctgtttatagaaagagctggatatagaattataggtgggttcagctgcacaaagaagagtcagactacggaggcttgaaggagctgtgaatacactgggcatctgacatcattgcttacttccccctgccccgccctgcccctccctgccccagggtatcggtagcatgtgtcctaattaaattttgacattatgtgagttttagcatggtattttctgcattgggctatctgtataatgtcatggagtggtgacataaataatgctagacttttccaatttatctaccatcccagccccctccccaactcagtcatatgtggaaagtcagtttctttttccatttattatagttgttaactaaagattaaaattttacatttcattgcactgttcataaattgtttataaatacagtgaaatctaagcaaaccaagatgatcttggaaagaagtgttctgtatggaatttatctgttcagacccaacatgcacacccttccttcgggatgtatcaccaagatgaaggcgggcagatctcatgggcatgagcttgtgtgcaccgaggaagttcctgcaagcagtcctgctgcacctgggcgggggacaccctgtggagaaccacggtgcttgagtggaaggagtctgtgtctgtttttcagaatgccttcttgccttcacaactaatatgcaacaaaaataataggattgcacctgcttttgatgcctcaagatatgcagaaatacatttccctcacttgagcatgtctctggatatactaggacagctaggtcgtgcttgcgtttcaggccacggccctgctcaggagtcaggttcagcttcttgcattgagtcttatccgccacagcccaactttaacagtggatgatagccaggaaagagagggaagcatttttggagctggttgtggttttaatgaggcatatacagacactgctttagtggatgtaggagtgaggggggtggggtgtagtggttgaggaaggggcttagtgggctggggtgaaggtctctgctggagatctaggagttttccctaaatcctcatctgatcttcctctcctgtagattgttaggataaatgagcaagaagattctgcgcaacaaactgataccttgctttcttttgtgagcagcagagctggggcgtggagagggtacgtccagtgttggatgtcaggaagttcacgtcccagggtatctagtacatctgagctctaagcctgcaaaggaaccttctttacaaattgcaccattgttatggttggcattctggttaaaagttcatctggatctcaacctcgcgtgaaattgcagagctacgactggaaaactcggcatcagttgagaacctttggggacttctcagacattacagttagaattgagcaaaacatgctgagttccattcactcacattttggtgagtgggttaaaataacagtttagtttcgtcatttttattacctacttttcagacagatccagaaaaataaaaaaacaaaaaaaaagacaagcatcattaccatgtttaggaaatctttgagaagaaatatgtatgaaatttggcatactggctagccattcccttacccccttatttttgattatccaaaagctcaaggtgactttgctcttcccctctgtgactggggttagcaaacaacagccatgggctagatcttgtccaccagctgtttttgcatgatcaggacgctgagtgtggttttttcattttttaaagggttgtaggaaataaagagactattgagtagagacctcacaggccttggaaagtgtgacatacttcctatctccttctctacagaagtggctgctgactcctgctctttggggtcgaaacacaaagactgaataatgatgtggtatttttgtatttaaaaaatggcatagggcatttttagggaggttgtggcattgacgtattctgtgttgcttcagagagatgtcgttcggtgggtagaggctgcgcagtggcccactgtgattggcatggtggtggctctcggcccctgggcctgctctgcagtcaggtccaccatgtggaagtgctctgagactcggtgcacgtattcaatgtttagtgtgtgccagccacgttctaggcaccgtggatgcggccagcaaggaagatgaggaccctgttctcatgcccagcctcagggtgggtgcatggagcatccctggtcgagtgtgtgctcaggattcctttagtatgtcatgaatctgtcgtgtttctcagagcagacttaggagccaggctccctgagattgaaccctgcgtgggccacttctttgctgtggaaccgtgggcaagtctcttgttctttctggcggcttccatctgtataaggggatgatagtgccaatctcttagcgtaggtgacagattccgaagtaaagggcttgtcaagtaggcctggggtgggcctggcacatcctgggggtgctgcctgagggtcagatgtcatcttggtggcccacactcccctgcagtggtgctgctggttcaggaagttaaagtggaaaactgtgctccggaataaacacaattgggagaacccaaaaccacacgcaagaaagcaaaatgtgctgcccgattactaagcatggagttaaactctatttggtgtttttgttctgaattgttagggagtaagaatatttatggttggaatccttggccaatcctaaattttcttctaactagtagataattaagtgtctgcttctagaggatgtagatgtgcttgtcttgtatattacaaagtagagacgacttgcccacaccccctcctgggctcacactccatgcggatggcgtcagtagcttctgagcctcttcaggtgctgaacacatgccctgagctgcttgttttgacagggacatcatttttaaagagtcctttattaccccagtttactcacctcttgttgtctccagcccttcccttttttatgttcttctctcccttttcccttagcaattgctaataccctagttggtactgataaaagaaaaacttaagctgaattgaatttaaaggagtttaattgagcaacgaacaattcgcaaatcgagcagcctcccaaagccagagtaggctcagatggacagaaaaaggaaagtgacagagacgaggcacagaaacagccagattggttacagcgtttgccttatttgaacatggtttgaacagtcagctatattggattggccaaaactcagtgattggcacaagagtaggctacggtctgtttatacctccacttgttatagttcatgaggtacagaaaaaccttgaggccacattcaaaacatggaaggaggcagctttaggctaagcttgattcaacaggttgctctcgtcactaggaagtagtcatgtacaaatgcaaatgtgcttgaagtttcaacctagtttttagaatgtgggatcctgatgggtattcctctcatcttgctgcttcttgtcttgcgcatttatcatcccttcgaggcagtggtttcagatcttaatcctttttcctagtcacctaatattctaagatgtggctatacaaagcatttccaaccattgtccttcccccctcaaaaattatggtaataagcgtccttcccaccccacagataatactgcagtcagtgcagacatatgcttgtacatgctttcacacacgattcactgaggccggcaagtctgtgggagggagttctataactgaatgtttacacagggtgtgcatatctttctctttgaataggttgtttctatactgtttgtcatgaaaactcagaccattcccattttaccatcctttcttcaccagggagatagagtgacagagcaacttaattgttgcccatctgatgcggatcaagtgtcatattaactgtgcatatccctgcaacgtttgcacactaatgtacattggtctttctagatgcctgttgttacctataggtaagtaggtaggtaggtaggtaggtaggtaggtagatgtctgctagcaatttgacgggtcatttctttttgaaggataatgaacaaatttgaaacctgtggcacagcctgggacctaagtctgtgtggtgcagggagtctaacttctgtctaagtcagtagtatctccagggatacagccttacatccactgctggctgcggcttctctgagcgacccatctctgcgtccgcccatccatggctgccatctcgcacaaaattattttcctgggatggtcccttgagttagttcgtggttaggggtagctctcaccttagtccctacaaacccacctgaatttcctttgtctccgagccacatgggaaggagactgtggaaaataaaccaagagattctctagtaggtagagctagaggcaacaggttaaaatcacatctttataggagaatgtttggggaatgcattcagcagtcacccattctcattaatagacccagaaaacaattaaaaaatacacattgtgatttggactgggcagacatgccgactgtggagccatttcttaagagagggaggttggcaggtagctggtgagcctatttctttgctcattgagctagcaagagcaacacccattactttcattggattacttgtttgaaaattaaattaatcaagtgaggtaaacatccgtattgcctcttagcacccccataggctgcccgcaaaatggcctgcgtgggtatcctaagagcaggaattggctatgacctgccgaggtggccaactcagatgtggccagttttccatacaagtatgaagttcctgaattaatgggaaacctggctgcattgtctgatggcttactggcaagcagtaattagaaaacatttttcatagtggaacctcaggtttagctatccagagaaattggatatttcaaaatactcctagttggttagtgaaacattagtattaatgacaaattaatattaatatcaatatcagagttgagtatgtagcctttgggaagagaagggaaagattttaaggaccagatttaagtagcctccatatgcctttccttcttggtggcatttttcatctgaaagcattttttttttttttagctcaaaaacttagatgtgaaaaattcaacgcattgggaagaggcgtcaacatttgaaccgcaaatgattaaacctttatgactaaagtaataggtttggcttcagtcttcccagtggagtagcaagcagaggtccttttcagtttgcaaacagtagtatacaaacttggtccatatcaaatactgtttctcttccagggcttgtgtgtgcactgggaacagcaacaaaagttgaacagcaactgggtggggtttctttatgtcttctgtttaatcagagtttcctgatggtttggccacttcattctcctttggcttaaggggttctaagccatggggcagaccttgggtggctcactgctcttggaaggagggtgtccagccttcctggcagtgtggagatgagtaagggaaacactgcaggggcttctggcttcctggatcctgcccctcacctggggactttgtctaagtcctcatcctagcaccacctcgagatcgattcaggcctccccagcagtggcagaaatccaaccatgggagctagtgggttccattactgtggagtagggaagaagacatatgtcccttctaagtcactttaatttggtccaaaataaataaccaaagtccttggggagaccgtcagggaagtatcttcccacatcacacttggtctttgcaagaagtgctggtgggcgtgcagggcttcttgacacttcgcagcaacgtaaggatgtggtagtagagtgcttggtgttccagtggccactgcaatacaaatagagtgagttttgtcgccgtggtacattacagccatggaaattccccgtagttcattggtccgtgaccaacaaaaatccccctagactaacaattaatcaggctctgctgagcctttgactggcgacagttgcagatgtcacatcatgcgaaaagttaaatctcagctttccccaagaaggaaaaaaagtttatttttacagtttatggaactagttttccttttgatcaaatgacctggtctttaggggagaaatattttcatttttatgttagcaagtgtgatacagaatcatatacatttaaaatcttcatttttattgctttttttttaaagtacaaaattttaatagtaatagtgatttcaagaaaatgttgtgagtgtcactttactagtcaggcatgttgaaaaggaacgcgcttcctgaaatctccaagcgaggttggcatttgagacctctgggtacgtgagcttaaaattaatataagtacctgagcctagagcccaggaggtttagaaagactcagagatgcgcttaaagataattggtgtgctcctcttgtgagagcggattcaccaaaatgaagttaaaatttgtttgggaagttgcttgtactgtgccttgtgaacttacaaatctgtgtcacaatccaaagggttgagagccacacaaagcaaaacagatgggccgtgtgtcgtaggatttcctgctgtcctttcggcttcaggtaactaggacttgtgaagcacaagatacatgggaggcaaatctgaaaaggaatggtgagtgcgccccacgtgcctgggtaatacctgagtgctcccggcattacctgggggctgccaccctccctccccctccttcctttccagctcaacattgaggtgaactttttaccatgatcgatgtagctttctggtgtctacacagatttctggatggcctcagaaatgtcacatactgcttcgggaatgtctgcaagtatatttcatacattttacctggcaattaaaaaaaagtcatctttaagatattagcatgtggataccgaggttccacacaaagcaaacaaagaggtcattcttagcagctaattttaaatcttcaggcaactatacgaacctatgtcacagtctctcccaaaatttattataatgcccttgttataaatttagaatatttttgcaaactcatataaacaagtaattgatgcgactaaaattcttgtcacatatttattgcactatcagctaaaatttttaagtgacaagaaccaaaataatcgttaatttttatagggcaaggatctggctttttgtctgacacaaagctgtataaaaaactgcttctgattttatgcacattgtttttagttaatgattttcagctgtttgttgtttctctgatagcatgaaaatgtaccatatgctcagcccaaagacagatgattagcaagtgagattccgggcagctgtctgactgagcgcgttgggttgatagcattctgctatcataattagcttaagctttgggttaattaactttctacctggatatgcataataatagcaaactgcaaaaagcaagaagctttcagtacatcaacaacattgctgtcttttttatttggtatttcaagagcatattagaatttcaagagtgattaatcctgggaatattgtcatctactgtagattttatttgcaagccagataatactgaaacaattggaatctattatagagcagaaatagcattttaaaattgtaattaaagtttctaaaagcaattgctaatttcaaatgcctttgttggcaagaatattaggcacactgcttcttgtatgggcagcttgtcgggcacaaaaaataccagcacttacactgtgaagaataaaactttcttttatttaagggctgtattgaaaataatcagttatttttatgtaatttgaaagtaagattactctgtagtttgcagaggtgctgttcagactcctagattgaagatattaaccctgtgccctcttgcaggttctcacctttgttacctcctgagcagtggagggctggaggcctgggtaggagtgcctggtgccctcttagaagatttgatgtgtgcgtgtgtctgcgggtgccagaggtcagatttttcaaaagtcagtgctatacatttgtagcttgatatttgttttctaccccaagcagtttctaaatcaatttactgatggtatgaaatggggagagggagggctttgtctccatcctcctccttgtttgcatgatttaccaaagcactctctacgacgctcatcatctgaaggggctgccggggcctttggagagcacaagctagtgaagtggatggtggatttggagtaaaaattgtagtttacatttcccaaagcaccagagagcctagcacttaattctgaaataagtcatgcctgttgttacactcagaaaaatattttatcttctgaaaaaaaaattctttacatatgcagtggatggtgaagatttggtggcggtgaatttgccctggctccagaggactttacttacagaatcagcagtcgtgaaaacgtgctttctcagatgtgtgacttgtggtcagtctgtgggctcaggagcacccatttggtcaatccatgcaagttttatggggctgtcagaagccatttttcaaaattggcttcatctgaggacacgtggaggagccactctcttggtgtgggtagtgaaaggagtggctccctgtggctctgtcttgggagttgggggctgcagtggttcactgggaggagggggtgcccctgcaggccccacctgcaccccacctcgccgccccaccccctccccccggctttcaggctgtgacctcaaggccttttatcattttcacaatgatgtctccaacagacctttaccccagtctcaaaaaagatactgccagagcctgcctttgctttttgtttagtctgcttcgggctgcgtcaataaagatagcagaggggtcaagagaaaagaagtgaacggaatcacagttttggtgttgaacccttaaatgggggccccactgtctctgctgtgtagcaggcacaggattatctgtctgccttctgagatttcttttaatgttttaccaaattaaacatgaacaatttcaggatgcaaaaacttgactgcatcttgttgtttcttaaataagagcactttaagaaggcaatatatggagattcttttgtgggaaagatgtttcaaatgggttattactggccattgaaagaaagaaaaagaggaaatgcatcgaggcctcattttttggcctgcacatttgattattttattttaaatgccatttcaaacatagtgtaaactaatgatattattttttaaaaaacttactctactatttgcggtccttgatctttaatttcttttaatgtcaaaattatttatttggccagttccattccagatgtgactgttgagggcacattaatttctattctgttttcatgggcccctgtccccatctgtacatcatttctgacttccgtgtgctccctagggagttcacttattcatattgtaggtttcatttgctgtgtaaacagaataaacagacaatgcaaaaatccccacaataccagaaaataattcttttcaacaacatagtggatcatatttaaaaaaaaacatggaaaatgcaatacatgtgaagcccattttttccactttattgtcctcccgaggaaaggcttgtgttaccagtgcatttcccttgaatttgataagttcatttttattaaaaatccatcccaaacagcattttacgataattctcaaacacgtgttgtggacatttctttgttttgcgtattagcttggtcttgcgggttaattcggaatgtgttactcaactggtatgtgcttgcgtggccaaaaacacccgttgtgctgtgtgtgtgtgaaaagcaacattcaagaacggtgattttttttttttgacatttacaaataaagagggacatgagttatttatgctccaatgttgctgcaaagtccttatctccatttggcactaaacaaggatttgttgtgggatttgtgagggctgcgcagtgcctctgtgctaagcacccaaaactctaggggactggcactaatttcctctctctcgtaaaacaacgtagtattcataacaactcaagaggcttgacataagtaatgatggcatgtgcaggcgaagattaccacccaacagtgtaatcaaggtgctaggtactaatgcaagttaaattgagacaataatgccgaaacttgcattgtgggattaggagggcacttgaaatgctgacgtgagcacatcctgcctgcctgcctgtctggcgctccgttcctgtttatacttaatgacctcaaaatttgtatgtcgttaacaccgtgtactgaagtgggagagaacacggtttgggagggagaagactccctgtcttcgttgacttttgtctcttttggtaattggtggcttttcctgccgtattagggagcaaagcgtgcagcggggaggcccctgaggtctctgtaaacatgctgtgggcaccgagggcctccgcacccggcgctaggcagtaatttacatactttgaatgaaaagtcatttgtgcctgcaaaattgttattgctggaagaaatttaaatactagtcatatggaaatttgaaataaagtcatattaaattttgatgctcagatcaatattgtggagccccggtaattaaagtgggtttgtttatttggctccttataaataaaaagggcttaatacagactaattacacagaatctttcgtctacggtgggataataatggcagcaatttaaagtgatattaaatgagaattaataaaggaatattgagtcactttgactgtattaagctgtgaaatgattcctcatctcaatttaactttctgtcttgagcataatgtttgataagcaatgcatttttgtaggaataatctataacagtatttgactgcaatatttaataacaactagacttgtgactttatgttgtttttaaatgggctgggaaagcccgttttttctctgcaaatttataggacaacttagagggttcttgccctatggtagcttcacaagagttctgagttggcaccctccggtttgggaggtaggtggagatggctttgacttttgttcaacttacaagggagtaacttcttggaagtgcagtccgggccagcagaaatggtcatagtaggccatggtggaaggagaatcagaaccacgcgtaaatcctcagaaggaagagggcagtcatttttttttttttctcttggaggaatatcccgggaagaattacctggaagaaatcagagtggttttggaagatggattgtcggataacattttaacttaagggctgaagttcctttctacctaagtaccattgaagaagtatgttcctgatcttaaacatttttaatagcagtctaggccaattgactctgtgaccattaagtaattttcaagtggactggctgctgccagggtgtttgtgttttgctttgttttgtttgcagagtaacttgtgtgtaatttctttccactgtgccgcacagcatgtcatgtccacgttagcatttctgcccttttaaagggtcctgctgaaggtcaggacctcacactgaacaccctttttatatatattacaaattgctggaattgttcattaatttctgtctttgaaatgccatgtcaaccctctaaaggaattcgcagtgccagtttcccttggacagctgctcaccatggtccagtgcgaatttctgatgaaattacaggtgcagggaaatgcagaattagaaatatatctgatgttgcaatacttgtgaagctatagctttgttgatgacaggacaattccatttttgacagtttaatttactgttgccagtggacaagagcaagaggaggacgtggggttagccacctgccccctcgtaccgtgtttcacatgcgaggttgccaaatcatgactccctcaacctgtcgggctcaaatgagaaggttttcagctgggaaaatggaatatatcagtgcatgtaatattgcctgacctcataaaacaaaagggaaaattgcagattctgacagccattatgaatcttgtatcagcatccaaaacgacttggagccagggtatagtacatgtttataatagaaaaaaaacggggttgccacgttgacttgcaatatggagcaaaaaatgacttgtcataattcgttctcagatgttaaagaggctgttgaatttactagtatatacacagaagaatgcgtagcccggagcagagtgtggaaatagtccctacacagaggggtctgctgaagttagtcatcgagttagattagaatggaaggcaggaggggaggaactccgggtttgcgccgcagctgcgtcggtggggccagatttctcattacaagatgtactgaacctttccactttcacccactgtaaatctataagtaatcaggcttctaaaataaagcaaacaaccttgttttgagattatgagaatcatttgaattgaatgtattctgttggaaaactggtgtattgaggcatggctttttatcttacgcttaaaaagttttatttatattaaaataaggcataatctctctgcgtataattatacgctcttcgatttagtttttctatttaatagtctattccttcaccttcttgcccatttctttatgttattccttaaaaaataatttctaagtacaataattgtctcagctgcttttggtgatttctttgggaggggagatgtggagtgacagtccaggaactttctgcccaggggcaggaggcccagcgcgtgctccccagctgaggccccgtccgccttggccactccctttcatctcccgggctgaatgcggagtgtggtgacttttattttttcctttgctattggtttagaatgagatgtagcagttgatttaagtgaagtaaagcatgcttacgcagtacactgtgtccctgtcggggcctgctctctcatgtcacctgccggcggtggcatggagacaaagccttctctcctctcttactgctgctgggcctctcctgggcaggtccgggctcagtggcttgaacaggtgatgcagggaggggcagtgcctgtggccacagtgatggcacaggtggacatgatcctgagagtccagtgggggctgtagcacaggaaaggaggttgtctacagcctttctcaccacacctttccctcctcagtggaatctctggccccatctggagtccctggaggctggatggtagaactggaatcgttggcccgatctggagcccctggaggctgggtggtagaagtggagtctctggccccatccggatgatggaggtggaatctctggccccatccggatgatagaggtggaatctctggccccatctggagcccctggaggctggatggtagaagtgaaatctctggccccatctggagtccctggaggctggatggtggaggtttgctggggtaaccctaggcggtaggtgttgccacccaaggtgaagaggaactcacagcagcgctggcttagcagctctgtggggcataacccacttctttgcaaactctggtgctgggagatgatgaaatgagcacctggtacattaggtttgggacttaaagctgatacttccattcgggagcaggatgagtaagacctggtgcttctttgctcagagctctctgaggtgggaggctggaagcgcttccctgaacactgtaggaagtgttgcaggagagcggaagagcaggaggaggaatggtgcagaggaggaggagcagtgcggagatttcacctggggggacaccaccacgggaggcaggcggcaatggtggaggcgttggctgagcagggcctttagaaaaaggcccgggagcttggcagcagaaaggagggtggaagtgcagaagcatcgagatgcccagtgacgtctgtgcagtttggattttgctgttgaaaagcaaaggagatgaatagaaagctttaggcagacactgagagtttttgctttggaggtattttgatatatggtaaactattgtttggattattttggagtatgctttggtctattattaaatatcccagtcaaagatagcagatattcaatatttgagttaggatttttcaaatacttagaatatttgaaaatatttttatcattagaatttattgattttttgagacactatcatattctaacaattgcaccttattctttggcggtatcactgtcattgtattaatggcaaaggcttcaaaatagcctgtcaggcccatgtcatctgcaagtcaaccctcaaccctttctctctaaactcctctcctccagtttgccaaaccactgtgctccagccatgctgccctccttgctgttctggaacttgccaagtatgccccaccccagggccttggcatgtgcctggaacacttgagcccccaccctgcacatggctggccccttgttttcttcagctctccgtccatatgcaatagcgattcctcatgcccctcatagcacttctggactttttccttgctctattttttaccaactaaaacaggggttggccaaccatggctctcaggctggccacctgttttgcaaatacaattttattggaacacacttataaagacttgatttcttatggctgttttccctatgatggcagagttgaatagttgcaataaagtctgacctgcaaatctaaaatgtgtgtaatatctggctcattaggcaaaagtttgcaaagccctcatctaggatatagtgcattcatttgcctctgtccctgactggaatgcaccctcccttaagacagagcctatctctgtttggcccactgctgtatccctagagcctacaacagtgtctagcacaaagtatgttctcgtgagatacttgaatgaataaatgaacaaaagtgaaagttccagccaacaggatgatgggcagtagttaactatgcctctaattctggcttaaactttggtatttcagcctttatgtatgttctattttgcagtttttatggtgcacaggatgaaagaacacatcaactcctagggagtagaggaggcctggaaatagactcagatgcagaattgtgtgcaggtggctgttggggagtgtattcattcattctcacactgctattagcatctgagactgggtaatttatgaaagaaagaggtttaattaactcagagttatctgggctggacagacttctgcttctggagaggcctcaggaaacttacaatcatggccgaaagcaaagggggaagcaaacacatcctcatggatggagcaggaagaagagagagagtgaagggggaggtgccacacactttcaaacaaccagatctcttgagaactcactcactatcatgagaatagcaagggggaaatctgcccctgtgatccagtcacctcctaccaggacccttctccaagactgaagatcacaagtcaacatgcagtttgggtgtggacacagagccaaaccatatcagggagtattcccaggatacactctgtaaggaagtgcatactgcaggatcgggcaagggagaagcaggggcttgcattatgacctagttgcagttgaggtctcatcctgtcctgcagggaactctggagagagaatgacctgtagagtcatcccaaattgaggccgggggcctaagtcttggctcccgggtgcgctctgggggggccataaccttggatgagatgcttctccctcgagagcagcggtgaagtatgcacctgcctctgagctcctagagctggggtgtgatgcactggtcctgaaacaaggcctgggcaagtacccagaatttcagttgtcaatggaaagagtcaaactctgtaaaatacttatagggatttattctgagccaaatatgagtgaccatggccagtgacacagccctcaggagatcctgagaacatgtgcctaaggtggtcggggtgcagcttggttttatacatttagggagacatgagacatcaatcaaatacattaagaaatacattggtttggtccagaaaggcgggacaccttgaagtccaggggacttccagcttataggtagatttaaaaatctcctggttgataattggttgagtttctctaaagacctgagatcaatagaaaggaatgtctgggttaagataaaggattgtggagatgcaagttcttatttgtggaggaagccttcaggtagcaggcttcagagagaataacttgtaaaatgtttcttatcagacttcaagtctgtgtggatgttagtgccggagaggtatagcgaagcatatccaacccccacttcccgtcatgcctgaaacagtctctcaggttacattttgaaagagccctggctgcggaggaagtccatttgatggttggggttagaattttatatttggtttacaaagtcttgaattaaaatattttatcattacctagttttatacccgggaatgttagttgttgcacgtgaggacatgaagtgagttaatgcagggcttgggccgtccagtgtcttctttccccacagccttgctggcagtgaccccatataaataggaacaattaccggaagaaactgtgctcctcctaaagcctagctagtgacttccacctttgaaccataggcgaggcagcacttaaccagggcactgtttgataggatgttacaggtggttccagagaaaaacgaaacatgtcatcttgttaagggaggtcttcgtttcggcatctctgtaaaatatttaaagaggtatttttatttctttaaacaggctctgcctcttccgtccccctcgcccaatgtggactctgcccgtccttcctgagcagtgagactctgtccccatgtgcttctggtcacagctgcggtgacatcctgtaacattgtttggtccttgcttaaatcagttactcaccatgttatagccgagttcagacccactacacagacctcctaaggtgctggcctgtctaaaacattatttccattattcattcctgttcactctgggatagggaagccatgctccaagctgtattggaatatcaggtccagggtaattagccagggcctaaagggtctgttttggaaaattcaagtacaagtagaatcttctttagtatcttggatccaccagggaagagatggtctctgaggcctgctatgcagaataaaaccaagagagtcactgtgaaggaatccaagagatgcaagtgctctttgctgtccagtgattaaaatgaaagcaaagacgggaagcgtccttgatccacattttgcctgtgatttgaatatcacatgcttggtccgggcacttaggtgggcttcagtgatttgggccggaaggaaatggtgcccctttcctcgagtttctagattgttttgtcacagacaggggaagccctcatctgacttgccctgtaggaccctagtctgtcgggaggtctctgtccccacccctccctggagtctggggtgtagttgggctgaccctcaaaatatgctgtgtcatcaaaggttcatcatctatctggtctgttttttaacgcaacttgataaaataccagtgttttaataaaaaggtctaaaacatttaccatttaaatgagcctcccttcctgggatgcacacaggagtcttggcgggaggctggtggcgcaggctgatgggtcctgtccctctgtgccttgggcgcctctgcccagcgtcacgcagtgtcatgagacccctcagtgcaagcgcaggtctgcctgaggtcccccctcccacctgcaacctggatgccttttgtgcctatggaacacaactgaaagggccggtcagtgccatggcttggctaattcatggtggacatgcattttggtttttaaaattatggtaaaatatacataaaatttcccaccttcaccatttttaagagtccagctcagcagctgtcagtgcattcacaccgtcgtgcagccatcaccaccacccatcctcagagcccctcatcttcccacagggaaactccatccccattgagcacagactcccccttccccagccctggcacccacccttctactgtctctatgagtctgactacatcacataagtggtacagccattgtcttttgtgactggcttatttcatggagtatcatgtcctcaaggtccatccgtgttgtagcacgtgtcaaaaggtccttccttcctcaggctggatatgggctctttaaaagcctattttcttagagcaaaacccgtttcccccacacctgatcgtcacaagccgtctaagacacgtggtctagggtttgctagtgatcgtctgtgggctttccgagcctgcgctggttttgctgccacaacctgaggtccgcggacgtccctgtgctcgctatgacttctttgtgtgagactgtcagagtgtgttcctggccctgacacgtgctcggcggctggtttttctccttcagatcagcggccttggacagctttcgcttctttggcagccgtttcaagctgctccgtcttgtcattttagagttcaatatctgctgctctgaaggaagaaacggggatgggctggaccattgcacttggtctcttgacctcgatgttgcccatgagcagtgaaggatgacttttgacgagccatgtcagatgtgacaggcaatctagttggcttgagtggaaatgtgctgtacaagtttgaagccttggttgggggcatttttctggtgttcaatgcatttaaattgacaccagacttcagtatgttgttcatttcaggcccagcactgtaggctcccatctttaaaatgtgtgggtgccgagcgctccctcgtcagcttttgcaaagcattttgcatattcccagtactgtatttacattcctggctcacattggtttttgttttttgtttttcctatcttaaagcttatttttgaagtgaatttttaatgctttcagttgagtagggatttgtggaattttgaggggtggggaggtgcagtggagaaaagggggaaaatggttgtttcttggctctcagcataagctacattttccatcatatggagtgagatgcctatattgggcagctgtgattttaagtgaaagtcatttccagttgtttctaatgtctagaaattaggtttgttttgattttaattgtcaaaggaagggactgtgggtgaggaagagcccttgccgccgcctcccctgacgtgcccctgcttgggcagacgcctccctggtgaggtgtgggctgcgctggacagcacccaggaccacggcctcgttcttttccttctcactgtgttttcctcttgggtaggggtgagggtggttattttactcagatctctgagccttaaagtggatcttctgcagatcatctccagagtcatctgacggcgccgggcagaagtctgtatgttgggagctgtccccagctcctctccttaggacttctgaatctgcttcaaccaagcatattcctgcctcatccggaacattcctcaccctctgccccagtgcaggcggtgtccacatctcagggatgcagcgtggtggaatttttaaggttttggttggcgtggatgagagcatctctgctgaggctgccgtgcgggtgtgggctgggtgcatctgtgtctctgggcaccatataccaagtggcactcatccctgtgagaacatggcctgggcattagaggataggatccttagtgtgagggaggcctcaaccataaagggactgaggggagagacaggaagggtccaggtataagaagagctgcccacggcagggggtgtggcagtgggaccaggatgaatgggtctcagtaatgtggctccttccccaagctggggagcaagggaggcttctgctgttgggtgttgaagaggaatctttggtttgcagatgggggtggggtgggtctttgcccatcctctgatcgtatgtgtagaagtttgcaacatgaagggcagactgtggtggagttctttggcagttaggaaagcaagccagggcacagacgtgttctctgaaaggcagggtgtgggcaccacagggtcagccctgcaaacaagagcactgagcagagggagcggcgattggattggagaacggaggctcccacctggctcacatactcctacatacatgccacacgcatgccacggtgcttaggaatcttgaaagctgcaggctcaggggagctgcgatgctcatcgtgaagatgcagagccggagaggccgcccaggcaggaaggccagtgctggtcgcctccaggtggtctcaggatcccagagcaggaggcagccatgtggtgctgaaggggaagcgagggcatagaagctgtgccctggagctggaatggtagacagggctttcttagtgccagggcctgcaaattcccaacaagggctcactggaatcctcctcccgccatcctcccaggccccccattggccggccaggcccctggattacctctctggtgccctgtcctcctccatgctctcctctaagggccctcactggcacctttgccctccttaaccaggtaacactaaaccaggagacatctagaatcctgtttgagacatcttcgagagtcaccttgttaactagacagaagtggatctctacaggttagagcctggggaacctctgttttctttgtgatattctctagtgagtgttccaggaaagaacatgccccactgtctcctttctacttgcagatagcggtgaggtgggagaggggcctgggagtgtgctcttcattctccacctcctcccccgaggaggtggtcatggtcactcgcttgacgagcccagactctgagcttctgcccctttattgagcaaattcataaagtcaaccatgctcttttattatgtaacttgttttttagattcaggggtacatgtgcatgtttgttgtataggtaacttgcctatcacaggggttttgtgtgtggattatttcttcatccacatgataagcacatgataagcatagtacccaataggtaggtcttcaatcctcaccctcctcccaccctcaagtaggcaccgttgtctgctgttcccttctttgtggccatgtgtactcagtggttagcacccacctctaagtgagaacacatccatgttgctgcaaaggacaacatggatgcaaatgatctcattcttttattatggctgcatagtattctgtggtgtatatttaccacatgttctttatccagtctcctattgatgggcctttaggtttagtccatgtctttactattatgaatagtgctgcagtgaatatacgcgtgcatgtatctttatggtagaaccgtttatattcctttgggtgtgtgcccaataataggattgtggattgaacagtaattgtgttttaagttctttgagaagtcaccaaactgctttccacagtggctgaactaatttacattcccaccaagagcgtataagcattccgttttctctacagcctcaccggcatctgttattttttgactttttaataaaaaccattctgactagtgtgagatggtgtctcactgtggttttgatttgcatttctctaatgattagtgatgttgagcatttttttcatatgcttgttggccatatgtatgtcttcttttgaaaagtgtttgttcatgtcctttgcccactttttttttacagagttgattgttttttgcttgttaatttgtttaagttctttatggtttctgggtattagacctttgggggatgcatagtctgcaaagtgtgcttcttatgcaagcacccagccttccggcactgggacgggccacatgggaggagccaaaggatgggagagtttaccccctccagcccatgaacttgctgtgaggacccctcctgccatataccctcctgggtgtgaagaggcctcctgtgtgggctgcaccactgtctccgggattcttggcctggaggcatctctgaaatttctcagaatgcccaatttgcaccagagatagagccaggccccttgggatggaaaaggaaaagaaactagatttactttttaaagtttctagaacttctttggtatccctagaaaactttttttaaaaaggattttctttttaagttggatttctatccattatttacctgagacataatttcagctgatcaaagtttagagtgctggcaagtgccaagccttacgatagatgttgtaccttttgacaaatgaccatgtatgcacagctctgtttctggactctgttctatccatttttctgcttgtcctcatgccaacatggccccgacttcattgctgtggctctgtagtaagtcttggtgtcttgtagaagttctccaaatttcgttgttttttccacaattgttttggctcttcttagtcctttgcatttccatgtagaataagtggattaattagtatagaaaaacctgtgattttcattcaactgcattcaatctatagatctatttgcagagatatttcacagttttgagtcttgatctttgattgtggcgtatagctccatatttgttttctttgatacatctcaacatggttttgtaattttttggtatacaaatcttttaaatatattccacataaatttatccataagtttttcatgtgtttttgttttgtcctttaaaaatgctatatttttagtttcaattcccagtatttctttgctaatgatgagaattacaggagctttctgtaaatttgtctagtatgctgtgagtttgctgaacaaatttattctagttctagttgcccaaggattctttagtatcttccatgtacgtgaatatcttgtttgagaatgaagacagttttgtttcttcctttatactatgtatgctgttagtttctttttcttactttattgtactggctagggtctccatactgcattcaacaggagttggggaagtaaacatcctctgttcctaatcttaggggtgaagcactcagtattttactgttaaatataaatacacattcttgtaaattcccattgaagttctattcttgtaggctgagagttttattacggaagggtgtgtcattttgtcaggtgcctttttgcatctgttgtaatgtttatgtggtttctgtcttttattctgatcatatggagaaatgcagtaattgattttctaatgctcaacaaaccttgcttgtctttgataagtgccacttgctttgagaaatgcatgcatacatctctctgtatatatatgtgtataattccagcattatttctatatacatagaaataataaatatacaaataatgctggttatatttgctaatattttacgaattacgggatactggtctgcagttttcacattttgtcttttttaggctttattatcggggtaatgctggcttcataaaatgaactgatgtattctctcttgtactgctttttaaaattgtttaggattggtattttttttatttaagtgtttaaaaacatctgggcctggaattttctttgtgggaaggttattacttaatttaaaaaatatatgcaatactattaagattttgaatttcttcatgactcagttttggttatctgtctttcaaagagtttgttttatctaagtggttgagtttattggcattaattgttcgtaatcttctcttatccagttatccctctcaggtctctagggcacgccatgatgatgctattccactgcccttttttccattcctggaatggtacttcccaccttctaaatcagtcttgttacaggtttattcattttctcagttctgtattttattgatttttatttttttgttattttgtgtattttactctctttctactttctaagatagaagcagtgggtcccactgaagaaaagcagatagcaggcactaaatttccctgtagggttaactatgtcagcctgacagaccccaggctgtgtgtctttggaggacagagacattggaggccgttcatgatcctttctaagattggtcattgataggaaactttgtttgttaagtaatataagtattcaaaactagacattaacttctaagcagtgcttaagcagcattctacatgttttgatagggattgttttttaatatcactctgttaaatatttatgtactgtaattattgtaaatggtgattacactgttccatgtgcatttgcgagaatataccctgccattgtgtgcagtcttctataaatgtacgttgggtcaggttgttttggcgtgttgtgcaggtcttccctatcttctgactttgtctccctgttcaatcagtcgagaaaggagtgtcgaagtctgcaactcgaattatggatttgtctcttttcccctttggttctgtcaactcttgccttgtgccttctgtacatttgctagtaggtgcctaatcacatgagatcatgacgtcctcctgatgtgctggctccttaacagtatgaaatgtactctttatctccagccatttttcttactctgaagttactttgatattaatattgctagctttcttgtgatttgcctatgcatgtgttatactcttttccatccttttgcttttgatctatttctttatatttatagtgtgtttcttggaaccaggatatagtgatccagtatgcaagtctgtactttttatttgaaatgttttagttaatgtactcatcaataggtatgggtttagtctgccgttttgctgattttttcatttgtactttttattcttcattcctgttttcctaattccctgccttcttttggattgaatccttttttgatttcattttataattactattgcgttattagtgctacctttttttaagtagtttgtttagtacagtactttttgttagaaattccagaaatgatggaatgcgctgtatccacactgtccagtatggcaggcactggccacctgtagctgttgagcacttgacatgtgactcgggcaactgaaggaactgggtatgcaattacgtttaattttaaataatttaaatataaatagccacttggggatacctgctaccacactgggcagggtgactgtagggtttctaatattattgttaacttctcatgatctacattgaaaatggtgttctgtgacgtcacatgcaatgcaagaccttcaccacagtgaacttccatttgccccttgaagtcccatgtacacggccattgatcttacttctacatgttatagactctcaaatacatggttgtgactttttcctttaaacagtcatttgtcgagaaataatcatttagaattgaaattgaaagtgagaaagtactcttttcacgtacgcattttgatgttctaaatatgttgaaagggcgcaggggggtttaatgcccttcatcagatctgtgctaccttgtggacagtaattggaaaggatggggaacagggacgcacgagtgggtagatgaatgcgaggctgttgaaatggttccatggtgagcagtgcatggttgcttggaacaggaaggagcggaggtgttaagaagtggttgaatttgggatctctttggaagtatgatgctccagctgttatcagcagagctgtaagtgaaatgtactttgattgtttgttgaacatccttgccacctttcctatcgaatttgcttttcaaaaatagtgtggacattaaaaagccatccccatgtgcctaatttcaattagaaaatgttgaatcactgtgaatttggtgagtcatcctgcatgtaagtagagctatccatctaactcttagaatttgttaactattaagagaggaagacagaaggtaatatagagatgactatttatgagtcattttatttattcattatccatctaaagagtagcaattgattgtatcacagaacggtgtttgttttacatcttttgattaggagcagtggtttatggcatagacttgcttaatttcctcctgtttcttcctctggagtggataactgtttcacaacagaaggcgataaaagatttctggtttattcattaattttgctttgagacggaatacctgatctcaaggataagatgctgattggtatgacctgaatcgaatgattagcagtatgttgcccttactctgatctccccacagtgtgagagattttctcatcttcgcatcagtttttagccatgttttggtgtttaagcagagatacgattccactttgaaagctctggaagtaattctcagatcacatatattcatctcaaatttgaaatctggagtgtttgtcttgaaattaaattgtggtattgtaagctgtcagtggcatgatctgtgctggaacctgatgcggtctagtttacacggtattgaatcatgtaagtatctcatctttcctctttgaattcagtatgacttcacataggtgaggttagcttttaagtgtacacagaggtatggttaactatcagcagacttcagttatcaattgctgatctcagaaagctaatttatctttagtgtccaataacattacatggctttctttctttgttttatgttttgtgtatatgtgcttaactgtttaaataagttctggattgcatccaaataaggtttgatatgctctcattaagaatatgatattgtgaataaatgtaatcctgactttcaataaatggcctgtaaaaaaaaaaagaaagtatttagagttagtgagttgaggggcttcgtcacatggctaaaggagatttgagtagcccctggaatgttgagtgactctgacttgtggaatgcatggagccccgtttcgttggctggcaggatctacgtgggccgagcatacagccctagatgaatgacttatgtctctgaattctgttcctaatctctgctgctcaatctgtggccacctgcagaggagccagccggatggcatcgtccttaccgagctctctggttgtcagatccttcactactccttagtggctgattactctgcgtagtgtagggtgctgtagggtgcataactgattagtgccttgcagatataagcaaagtttacaatgaagcccttgcgcttaggagcatacagtctagttatgaagagaagacacaaaacacccagtcacatcactgtgaacagacaagtttgccaggagtctgttcagacctggtgctccctgagccgcgctgagcagcagttcagcggggataccaagttggggaagatgccaagtggtaggaaggaggctggggctctggtctgcacatgccagctgatggagtttggagttggggggatatggccagttcccaatgcactggaccagccaccatccagaattaggaagtagatcagcccgtgcctggcatgcattgctttcttttcagtttctaacatatatataacctttttaagtatatatatatgtatgtatatatataactttagttatagagtctcgctgttttgcccaggatggagtacagtggtgcaatcatagcttgctgtagcctcaagtgatccctcccacctcagcctcccaagtagctgggactacatacgtgcaccaccacgcctggctaatttttttgaaaggacaagtcttgctatgttgcccagactagtcaccaactcctggtctcaagcagtcttcctgccttggcctccaaaggagttaggattacaggcataagccactgtgcccagcctaatctatataacctttcaaacaggtatctccatttgtatactaggggagaatgtagaccccacaccctcttcctcaagaaacaacttgaacgcatgccattctgccatctcagccaaggcgattgcctgtgcccttcccaagggcttggagacaccctctccctgctagccccgtgcaggggtcttcccatgtgtaccctgcagcaccgtccacctgtctgagttcgatggggcctccaggccccctgccttggtgaggcaacacgctcagcgcctgcgcgaatcttcttgcccatcagttccttttccttttatccaggatttcacacactgggacattttgtgccaacaattattaatcagttttaagattgactgggtttgtggactgtgcccagggtttgtgcacctcactcacggcagatttcctggcagccctggggatggtcctgctcccccggggacagtttccatctcatggtgtagctttgggagtggggcccactgaagaaaagcagatagcaggcactgaagttcctgcagcctgttggaccccgggccgtgtgtctttggaggacagagacattggcctacagtaaaataaagtcagatgagaaagggtggggaggctttcctgctgtaaagggattatgtattcatactcgaaatagggatacattaggggaatagattgtaatctctacatccccaatccatgaaaacaaaacagaaatggagggccaagaaacctacacagggaagacacgaaatagcaaacatacctgatttatccaagggaaggcagaggagggaaacgaaaggatgaataacaggtgaggcaagcaggacataactcgtaggatggtcagcatgcccagtgcggcggcgaggacttcggaagtcagtggacccagtggagactcagatgaaaatcagagatggtctcactgtgggaacatggtgtgcaaccatagactaaggcggcacaccttaaacatagcctaagagatgcaccgtgcagggcaggcacccacatgaagcggctatgtaaacgtgacaaagtagatattaagaaaagtaggaaggaacagtaaaaataagatcagatatcagcaaagcagaaaatggtattacagagatgttaacaaaggcagaaattatgtccttggaaagagtcgtaaaaattttcaaaattcccagccaaacctgatgaagaaaaatgaaatgacaaataatataaatgaaaaggaaagatcactacagaatctacaaatattcaaagataatgaggatgttatttaaaactttatgttgacaaatttgacagtttagatacaatgagctaagtttttgtcagagcttaacaatttaatctaaagaaatcaaaaattgaaaattaaaaatcttccctcaaagaaaaatctaggcccatacagcttcactgttcagttttatcaaatagttaaggaagaagtaattccaatcttatattagccctttcaaggaatagcagaagagagaataattcctagcttgtttcataagaccaacacaaccatgacaccaagatgccaagatgtgtcaaggatgtttgagaaatggtaaccacagaccaatgtctctcatgaacccaaattttaaaatcctaataaaatattagaatgtcaattttacaatatagaaaaatatgtatatttccagtggggtttattccattcaaaaatcaatcggtgtaattctccacattcacagaggaaaagaaaagaactttatgatgataatgatcatagtaaccaaaaaaagcatttgacaaatttcaacatccattcacgatgaaaatgcactgcaaagtaagaatataaaggaaattctcttacatgacagcgtgtatacgagtgtgcacacgtgtgtgtgcgtgtgtgtgcatgcatgtatgtgtgtgtacacgtgtgcacctgtggttttctctccatgtttcttccagtactgatcagggttgcttgttttcaggagttttcaagtgctctaccttcaagttttccccagctaaatctttcccatttctttctctaaatccctttttgatatttgcagttcttttcaacttaccaccaatattttagtcttgattagaatcttcccagaaaagacaagttttccttctgattcccacatgtcccttcagctcgtgatggcgcagaatatgtttgcttgccagttaggggaacctgaggctgccttcctgggcagagtggcgatttgtactgggccaacggggcagccactgttacttatggacaggtggactaggctctttttcatcctgaggaactgctccgcgcttgggaagagccactggagtttatcagcctgcgtgtaagcatgtgggaagggggatcaggaacatttagtagaatagtccgtgctccaggtgatcagtccccacccacccgcatgcctctccttctccatcccacccgcattttgggtcattgggggattaatttattcgtgtctcgtaagcactggcagaacaccacccgtgtgaacagcattggtgaagcctggggagttctttttgagacttccttgagcttccggcagcacgtgtgagtttcgggggtgattggaatgtttctccctggagggaggcctgatgccctggagctggctccagcccgagccccgcggcatgttctgcctgctgccgcctacctgcagggagacgcctgagctgggaaggttctgagggttggcagggtgctctgctgtgctctttgggaggatccccttggctgttctgcatgcccagggccgtgctctccgtggaaatctatgttggagacgacaggctccggttccagctacaccagcctgacttccactggacagtgccattttctgcctctgataacaccgtggtgaagcgccttacgtaaagcaacagattttttgttttaagatgcactataattactcttttcagaaccaataatattaacccagtgaagtcaaaactgaattgttttataaactgactatggagctggtgtaaggagatgcagggaaggcttctcatctgagtcggtagcagagtacatagtgcaagaagcgtgggcaggctcccagcgcacccagagatcaaggagagtgatgggtgctgcccgcctctgaggggacggaggcagctgccacccgccgtgtccctcacgctggctttcagaaggcttcacgcaagtgggctcacaggcaagaagaaaagctgtgggccgtgtgtctcccttggctatggctcagttttaatgtaattagaagctcaacttgaaagtgagatatcaaaggaagccttcagttgctgaagatgggtgtgctgggggatgagggcgtgggttgaaaagtatccagttactgtttttctcacgtggatcagtctaacatatgtgactctggtaattgaagatggtgacaggctaaactaagctgggattccccagggagagactaggatttctggaaccagtctaacaaaaacagaaacttgaaggagaaaacagaatatgcctccctctcttccctgcttccctcctctactcaaaaaaaagaaagaaagaaaaaagcagcttttgcaatgaagaattcagtttttcgcccccgagtgtatgatggtagtgactttggtgttcctggtgcagacctgtatttttttgtgatgtcttcatctggcccctcgccctccactcttcatgatgaatatgagacctgtgcactgagggtcctcaccaacacttccttcctcacagccgtatgatttcatccggaagcggcctctaaaaataaacaccctcatgttagcctttttccaccatgcttcatatttggctcttgtataaatatctgccacgtttccactgggaattattgctgttatatattttatagacactcgactgtcatctaagtggcttattttattcccatagctagaagaaaaatacaaaaataattttgtaatgtgagtgtgattgtgggccaggagttatgttctgagaaggagctgagagtaaattatattcctgctttattgtgttgatattgtcttccctgttgtgtcctgagttagcctttgttgttccaagttattaaccagaggtggcttgataatgacgccactttggaagcgtctggctggtgtttaaaactctagctggtgataaatatattttagtcctattaatgaagaattgtaacattttagtcctattaatgaagaattttaacatccatgcagatgagcggcatcctaaaagcagcttcagatgctttggggtgttttctaccgaagatgcttttgtagaaataccgccttccttttcattttttacactggtctgttcatcaaaaaccataacttcatggaacttgcttctgtggaatgaactaaatgtaaattatttttccaaaagctttatgagtttatcatacatgttttggaaaaagtggaaaaacactaggaagaagttccagtgagcaaatgtttcccgacatgtttcacgttttgctctggtttgaagcagggcgttttgtggaaggtagggctggtggatcgctcggtcgctgggcagtgctggtcactgcctttctttggttgagctggtcttgagtcctggtacctgtgtctgccctggcattgaccccgtggtgctttctgtgcatctccgtgctcacctttctggaacacagcccctgaacagaatcatttggcaaaacatcccagtacaaaaaccagtgggttttacatggggaaagaactcaatgagtccacagttcgtgtcgatgaaggaggcactgcgtgttgggctcaaacgcatctgtaactgtgggtgccaagagacaagtagagctcagactgctgggagcgttggctggaataaagctggccctcacggggctgttaaaatacttgaacttgaattcaaagtcagatttaagctgacttcacccctcttcccttgcttctgaagattctggtttttcacgagacagaaaaaagggtggaaccaggagcttatccccttccttccttccttgcaagcagcagcaacagccattgaaactcaaagacagcaagagctctcttcccgcccactcccagcgccactcccgggggaacccatgtgggaagggctcttcctgacacctctcctgcagcacacagcacacgtcagccttgccctgcatgcagccttcccagctggagcaggtcccaccagcgccctgccaggcggcaatggtctacaccgccattttaccttccccaggtctgtggcattaggtcttcccttgtgagtggctcgtattcttttcaagatactgtaaataatttggcatcatatggaccacttgatgcttctatatgaaacatgccttataaacccttagtactgcatgatttcagattacggaaatatctgcatgagtattggctgcgatatctctgtactagaaatttcagtgctacctctacacaaacagacacactggggatgtgctgtgtgtattgtatgagtgtatcatagaatatttcattgtccgtggtagtacatttcacatcataggctgtctgtggctacttttaaaccttagacatttgaattttccctcaagctttattctggtgaagcgtgggatggggtcttagctcactttggaaggatggaacagttaagcagcgtacctggtgactggcactgtgtgtgagtgatgccacctcggcaccttcgcgttgatcatctttaggatctttaggatcactgagaattaatcattctttgcatgcataaacctgtgtaagggttgctccacgtttctgccattgctcacagataaaacacattcatgatctcagcttaatcccaagaggatgtttccccatccatcaaaaccacagtgcaggttttcactgatgggacatagggaaggtatggcaagctgggtggaggtgtgtttcctggacttttccggaataacccaacccatccctcctagtgagcacagaattacccagaaagttgaaaaggaaaacacagtttattggaacaaatatgcaaagtgatttgttcttttcacagagaaggtaaatagcatgtcagccgccaaggccctcacacacacggatctgcccgtggagtgatgaacttgtaaaagaacgtcaggtggaagcggtgagagggcctggacagttgttctgcagctgtgttctttgtctggttaatcgcgtgcgtctccagtctgtggctggccagccgcgtccacctgcgtgctccgggcacccaaggtgcttggttaatatgcagctctctcaacatctcccccttaggagcaacaggtacccggtgctggtgttgtccgtccagatgaaagggcctggccactctgattgcacttctctttgatctccctgtagaaggtcggcttgtctgcctagagattcctctgaagggcaatttaaaagttggatttgagcaacatcaagtgaaatgtcttcccatctcacgccgtgaggagctctttggtgtggctcatggctggatgtgaggaaagatattaacccttcctttgaaacaaactgtctcacaggctgaacttgccagctacctttctcctctgcttttagaaaagaaaatattttctttctcataatgctcttggcccttgaagataaactcattgcagtgtttaaaatttgtcctgagaccctattgcctttactttgttagtgtgtgtgagactgaaggcctgtggatgggtgagatgcttcgaactgatagaaaaagaaaacagaaggaagatttttgtgggcagagccgagacgccgtctctcaaggtgttgtgatcagtaaaagaatccatttttaatggtgaactggcaaaggctgctaaataccaattactgagtaaagtgccatgagaaggtaaagccactttttgtgaattatttcattgcactaacgtgctcctactgaaaaacatggccaggctgcttccgatacagttcacttaaagaaaaatggctcacgttaaaaatagttgctttattttgtaaatgttttagaaaagtgcattgctgtccagaaatctagatgtacacttgttttgtgtttaatgaaaaagggaaggaaaaatatctcgaaatcccaaatctcatcggtatcaataggatcataaaagtaaaggcaggaaaaggaatttgctgctcgtgtttcccatccatgtttccaggttatgtattttgtttctcaacttttatttatgttaatgaaaccagtctgctttttttttttgttatttttgatgactaagatcccatttattaggaatttgtaactcagctgtgacaacgtagcctgagatttacacagtccccgttaagggtagaaaatagagggagggcttagctctctgttttcatagctgtgttaaagagccaaatagtaatttgttgaccgaatgtattatctgtcctgccatatgttgttcaaatgatgagacagaagaatgaaggactcttacaatgtaaacttctggaaatcatactgtttcagggttgtttacattaataacaatgatggcttacatgtatgtatggttttataattttttgagattataaaaggtatacatggtcagtgttgaaaataaagtataaagaaattaaaaatttggacggtgtggtggctcacgccggtaatcccaacactttggtaggccaaggtgggcagatcgcttgagtgcaggagttcaggaccagcctgggcaacaaggcaaaaccccgtctccaccaaaaatacaaaaaattagctgggtgagatggtgtgcacctgtggtcccagctgctcaggaggctgaggtaggaaaatctcttgagcctgggagttggaggctgcaatgagctgagatcacagcactgtaccccagcctggatgacagagtgagaccctgtctcaatttaataaataaataaaataaaaaatgtatatttctattgcataattaactattatttatgttttatcagtccttctaatttctttttttcttaggagacaggggctccctatgttgcccaggttggtcttgaactcctgggctgtagcagtcctcccaccttggcctcctgaagtgctgggattgcaggcgtaagccaccgcgcccagctttctagtttgtttttatgcctacagcgtacaaatgttactaaagtttggattgcgtcacactgcatgtgttgtagtgggatatgcctttttatgcaccagcgtatgcattgtgccacatccttagacatgacttttattggatatgcagtagcctggcttacggatgtttcataatttatttaacaccctgtgattggttatttagcttactttcatttttaactgtaccaaattgtgctgtcatgccatcctggaagtggattgcatgtgggcgccttgtacttgatagagcactttcttaaactgtatctcagtcattagcacaagtgctccatgaggcagtgaggccactgagtagtgatccgggtcacaagggaagaactggggcccagcgagactgaagcgggtattttcacgtgagacttcgccagtacggggcaaaagcacacggtagaggattttgaaatcaccctgattgaagaccaagctggtttttgtcccaacaatagtgattccttcatttatcccacaaatatttaaatgctgcgtacgtgtcaggcactgtccttggttctggtgaatagagcagaccctgcctgctgctccgggggatgtcggcccgattctttggtaactctggaaggcttgtgcacctgctggagtttgggggagagagggagggttgtggacccagtcacataccacagtgggttcaaagtctcatctttattctgggagtgactgggtgtctttaaaagtcaagttcggaagattctcatttaatgatatttgattccatgtctcatgcagaggaatacttagatacgacggaatgagttaagtaaagggtaaagtattacttaaatatatcatctgaaaataactgcttcatatctcttgtatcttaaaatattttctggacaaaaattttatgtaaattaaaacaaaatgctgtttttcatcattgtattaggaaaaaatgtaaatacaaaatatttggtgttttgaaggatgggccggaaatggggatgtttttgtatgatgctgctgataacagtaagttgctatcagtcttgtgaccatatacatacagacataaaaatgttaaaacccttctcagtactcccactttgaaaaagtatactctagaaaaatatctaaattatagaaaaaacgttataccttgcagcttctcttatcatggtggaaaggaaaccaacctagacgtccaacactagtgagatcgtttagataatactgacacatgctctcaccaaaccgagtcagcatctaatgcctatgagactgcgtagtcagggataaatgcttccgttaagtgaaaaagcagagtgctaaagagcaggcacattagagttacaactgtgccatgtgagaaaaagcttgaagtgaatactctcaaatgatgataatggctgttttagggatgaagatcaaggaatttcctgttttttcttgtctgtatttcaaattttttatagtatagttatattactttttaaaactagcgacttcattttataaaatgacttttacttatttttaaaatttaagcaatacaggaaagcaaaagaaataacaattacctcccatctcacagcccccagataagtagtgctgatacttggtgagcctccttgtaaaagtcactctttgcttgcataaacatgtggttatatgcataaaagacagtaacataaacacagataaaacgacaaatattttcaaatgacaatagttttgtttaatacaaggttcttaaatattgtctgtaaagaaccagatagtaaatatattagtctctgtctcagttattctgccgttttgtgacagcaatcatagacaaaatgtaaatgaattaatgcagccgtgttccaataaagttttattgctcttcattctgtttagatccatttccacctggcatcattttcttcttcctgacagtttccttcaccctttctcattgcactggtctactgcaggtgacttcttacagttttttagtgcccaaaatgtctttattgcttcttgattgttgaaaggtattttcactgggtgtagaattctagattgacagggtttttttcctcccaatactttacagattttgctacactgccctcttgcatgcattgtttccattaagaattctgctgtcatcctcatctttttgtgcctctgtgtgacatgattttttcctctggtaggttgtaaggccccttatcaattttttgaacaattttattgtgatgcatcttggtgcagttcttcatgtgtcttttacttggtttcactgtccatcttgtatctgtgcatttgcagtttgcatcaaattggaaaatattttggctatttcttcaaatatatttttttccttttcctttcagaaactccaactacagatatgtacgatttcctgaagtttttcaaaacctcactgataatccttccttcctttcttccttccttttgatttcctttctctgtcctcattttgtgtagtttctataggaatatattcaagttcactaattttttcttttgcagtgtctaatctattattttcatttgatgtatttttccattgtaggtttttttagtttttaattctgaaagttctctttggatcttttttttactatattctataattctaattaactttttgaatgtctggaatacagttacattaactttttgcatcctcgtctgctaatcttaacatctgagttagttttaggtccatttcaattgactggtgtatttcttcgtaatggatcatattttcctgcttctttgtgtgcctggtaatctttgattgcatgtccagtattgtgaattttaccttgttgagttctggttatttctgcattctgatagatttccttgagctttgttctgggatacagtcacagttaaattacttgggaatagtttgactcttttgggtcttgcttttaagattcgttaggtagaaccagagcagtgtactgaggccagcccccttttcagctcgccccggatggtctgtgaataggaggcattccagtgtggctgtcaggaaaagtcatgctcccagccctgcaagagcagcggttaccaccctgtcatcctcacagatagctcttttcctgcctgggggagcttcctgacatggcggtgcccatcagtactctgatgaatatgtgagggtgacctgttgcagatctcaggattcctctttctgagatgtgtctctgtccctccagttctgtcctgcaaactctgcctgtcctggtttccgggctcacagctccatcccctcagtttgggagctggccaggcccttcctgtgtgcccctccgggtgcccggaactctcagggcagtcgcagccttttcttccttggttttctgtcactcatctgtctctgtactttgctctccagtttcttgaaaagtgtgttctatttaatttattttttctttttggttctttttggtgagagggtcaatcttgtctcttacttattttatcttgcctggaaacagaagtgctggggtgttttttaaaaaataattgtaagatacataatttaaagctgtgctattatagtatttacatgaagttttaaaaagaaatttgcttcccctaaactttctgatcatcgatagcactttttgaggcagggagccactagtggtcacctatgtctgttagcaatagacagacatgtctgttacttccaaaggactctcacagtgtaaactgaggaccctcttacaagctggtacgggaagaccaggcctgcatctgtcagagatgagaataagacagattctcctaatcaagctgcaaggagctcctgctgtaatcactccagaatatatatcaagagtggatgtgtgttctctatggcaaaaaacaggcactggaaaatttacatatttttagtttaaaatatgcatgctcttggccaatatgtttgaactgaaaaaagatagaatgtggttttctgagttatcttctttttcttttttctcaagttagttaagatttataaggtgcttactcagaaattcatggatgaagtacaacgttcaccttcacaacactttgctctggttacaaatttttgtggtgtagaaacccccaaagtgcctcgtattttctcacccgagtccagccggagatactgaccttggtctagatcgtcacctctgaaccattcctgaagaagtgggtagacaccccctcaggactgctgtaagagtggaacacattcacgtataaccagcacagaggttagtattcagtaagcactcaataaatgttggctctgaagagattcttctcatttgcatcattgaaaaggggtctttgcaatgatgcttatagcccagtttggggtgaatcatacctctaagcaactgtcattgaaagaaggccttaatgctgatagtcattgtttcagttttactttttatttctttgtcttggctctctggctaggcctttaatacagttttgaatagaagtcgtgataatgggcattcttgtcttgttactaaatttagaggaaaagctttcagcattccactgttgatttcctgtgaactctatagattgttttgtggatacccattttcccccagaatgaaagatctttttgaaattatattattctttctttaatgaggccattttcatatttgcatttatgagaaaatgtttaaaaaagtatgtgaacataaattatataatcttttgagtcaatcagaattatacaattgaaaaatagtctacaattaatgatattcaagtatctttagattttaaactcattaaatgaacattgaaagttctgttttctaattatagagccgagtttaaattgacaagagcagccacactcgagttgtctaagtcagaggctttataaacctgttggattttccaagggttgcttctcttgaataaaggtgtttttgtttctcacatattttacattttcaatgacctgtttaggcagaagcaccttttgtcactaattagtgtggtgtgacaagtaacataatgcgtatctgaaaagctccactgggtgtaagtggagttcacacctcttaatgagtgccttcaagagtgtttttgtcattcccagggagaactagtgccccttgaatagaaaactgctgtaaatggaaaaaggatgtgtcttaggagcctggtgtaagtgcagatgggcccaccctgtcctctgactttagggccttcctcaaagccaaggccctcttgtgcgatggggctcttctccttcttagaattcctacatccagagtaatggagacgacttgggatcatgcttcaggatatatgtaggtgctcaacacaggctggtttctgtttttaatttctggcagaatgaaccacttgaaaatgaattttcattacgattttaggagggctgagagtagatgaggtaagagatctgcctagggggcaggatcgaaggaggctgtcactctcagatttgtgcaagtgacttgtgttccccaaattcacatgttggagccctagccctcagtacgtcggagcgtgactgtatttggagatggggcctttaagcaggtacttaaagttaaattggggttgttagaataggccctaattcagcctgactagtgtccttataagaagaggagattagggcacagatataccataggcttctgtgcacagagatgaccatgtgaagtggcagcaaggggtggccgtccgcaagccaagaagagaggcgtcagagaaaatcaactctgccaacaccttgaacctagacttgcagcatccagagctgtgagaaaataaatgtctgttctttaaaccacccggtctatggtattttgttatggcagcctgagcaaattcattcagcaagtgccagccttgcactcgcgggagagtgagtgcctcctgcagtgctcagtctggtctcaggctgaaattctaggtagatgcacattttcccagttggcaggtgctggctcatgctgaaggggaacatatgctcaggattcctgctttatgtacttcaaaaggagacatgtgacatgtttcacttaacttcatctaaatttcctagacacaccaatctgtaacggtttagaactcaacccggtggttatacagctttcctgaagtggagaggtgggctacttatcttgtatgagtcccatgagaactaaagaacaatggttcaaaaaacagatggatgtctcccatcttacattccctccaggaagaagtagttgaagaaataatggatataaatttccttgaattaagaacacatgaaagacttaagaataagaagtccaagagaggaccaaagaggcaaaaaaaaaaaaaaaagaaaaaaaaaagaaaaataactgacgtctatctagaagagcacagtgaaatttaagaatagagagaaaaatctaaaacattagcaagaacaaacaacacatataaagaaccagtggtcatattggcttcagatttgtcaacagcaatattgaatgtaagaagagaatggaggcatgttttcagcgtattaaaggaaaataacttagaacagagttttatatgcagctaaaactttaaaatatgagggcttggcaaaactattctcacaaggcctcaaaagttacaccttaacaattataataaatgtaaatgaactaaactcaccagtaagaaaaagactgaaaaatggaataaaatataaaatccaaatatacgccactcaaaggttatccaaagtataaggactttcaaactttgagggtaaatggatggaaagaagcatgtcaggaaaatacccaaagaaaactggcatagctataatgatatgtaaaatagattctaagactaacagccttgttagagatagaaaaggtgaatacacaataacaaaacaagtaaaatagattaacagagtaaaacataaatgacaaaaataatttgtattcttgaaaatatatagccatggaagtatacattttaagttagaaaatgaacagaataaaccttttaaaaagcagaagaaaagatcattggaaattagtggaaaaaatacaaagatcttaaaaaaccatgaattgtttgtttaagagaaaaaaatagattaaaggtaagatatctgaaatggctatattagcattagatgatgtatattctacaaaaaaagttactagggttaaagagagatgttacatagcgataaagtattcagttcaccaaaaagacctaacagtcttaaatggctatgtacctgacaacagaattccaaaatacatgaagcaaaaacggaaaggagaaatagataagtccacaattataaatggagatttcaccatttcttactgatcaacagatcctaaaatcagtaaggatatagacaatttgaacagcattatctactaacttgatgtaattaacatttctggaatacacttaacaaaggccaagatgtggaaaatccagaatatttgaaagttcttagtaacccatcattcaaagaagtcacagggaaacttagaaaatgttttgaattaaatgaacatgaaagcacaacctatcaaaagctgtgggttgcggctaaaagtgtgctttgagggaaatttataacattaagtttttataatagcaaaaggtctcaaaacaatgatctaagctgctgctttaagaaaacagaaaagtaagagcaagtcaaacccaagacaaacagaaggaaggagataataaagataaaaacaaagatgaataaacatggaaaacagaaaaacagtggaaaatatcaatgagtcaaagaactggttctttggaaaaatattaattaaactgataaatcggtggctagactgaccaaaaaaaaaaaaaaagagagtgaagtcatatattaacaatgttatgatgagaggggccattgctacaaaacatactgacactgaaaaaaaaagtgcatagcaggacagtttcgctacccatatgtttgactgcttagataaatgaataactttttttttttttttttggagacagagtctagctctttctcccagcctggagttcagaggcacgatcttggctcactgcatccttctcctcccgggttcaagtgattcttctgcctcagcctcctgagtagctgggactacaggtgagcaccaccatgcccacctaatttttgtatttttagtagagacaggattttaccatattggccaggctggtctcaaactcctggcctcatcatccacccacctcggcctcccaaaatgctgagattataggcgtgagccactgtgcccagcctgaataacttttttgaaaggcacagactaccaagctcattcaagaagaaatagtcttaaatctatcataataattgaatttataatttaagcctttccataatgaaaatttcagacgtagttgtcttcattggggaattctacaaaacatttatggaagaaataatgtctgttctagaaaattcttccagaaaatacacgaggaaatactttccaactctttttatgatggcagcattaccttgataccacaaccaaataaagggattagaagaaaaatacagaccaatattcctaatgtacataaaatgcaaaagtcctcaggaatattaccaacttgaaaccaggaaatatataaaggatgatggaacatgaccaacttgagtttatcttatgaatgtaagactgttcagtatttcacaattaatcagtttaccatatcaataggaaaaatgaagataaacctgtgttaatctcgaagaaatttcctgatttgataaaaaggaatctatcaaatacttattgctgacataattcctaatgataaaagattgaatgttttcctcctaaaatcagaaataagacaaagatgtctgtccactcttcctacagctattcagtggaaggtcctagccagtccagtacatcaagggaaaaaatgattttggaaaagtaagaaataaaactttatttatagaaggcatgattgtctatacagaaaattcccaaaaacctacaaaactacgcaacatacaaaaaccaattgcctttctatatactagcaatgaatattggatactaaaattttaaatatagttccatttataatagatgaaaatgtgcagtagttcatgtccaatgatatttgcaggatatatatactgaaaactacaaaaccttaaataaaataacatttaaagaaatggagagatatactgtgttcttagattggaagactcaatattctccccaaactgatggatttaacatgattccagtcaaaatcacagcaggtcttttcctagaaactgataagccattctgaaatctatgtggaaatttacagttgtacaagttttccaaaattatttttgacaacccatcactagagaatgttaaagtaactgatcatataattccttcaagaatggtcattaaattctggatttcacagtttcttttagttcgtatttcacaagatagaagctttacatttttcagattaaggtagttttcacctttgtgcatgctacatcttggggaaaatactgagacaaaatgactcattggaattatttttgattttttgatactcggctgacaattatagtctgtgttatgacagttatagcctgtgtcatacgtactcagaattaactaacatagtcttcctcctaacttccctgcatattggaacattagaattcttttggttggttgaagaaacatcctagaattttaaaatattttgtatctaatgtaatgctgaaaacatgaaatccacataatgtatgcggcatagctaatattagaagcatgttcaaggagcagcctctggggttaatagagtttaatttgcaagacaaatgaaagcttattttctcctaggctctctgctcataattctagtagggccacttttgaagaatagtaccttcaacagacacagagaacccttgttggacagcaacagaacttgctcacagtgagacccgacatcccctccgctcagtgggcatttcctacagtgcagagttgtgcgttgaaaagtgcctcttcactccctacatgaggttcctcacacaaccccgcacctgggcgggcgggcgggcgtagggggcataaatggcttatccctatgaacttcatcattatgaaatgtaaaaatggacagtcccattgccccagaaacagtgggggagcttctaagtaaatccaggtttatctgcatttgggaatattctgcattttttgaaaatgatgttcccaggaatctttataaccaaggagaatccttactgtaaacattccacctgaatttttccaaaaaaaaaatagatcattaagaacaatagacaaaggaatatgcttttaaaaatagtgattatctctgaaggtgggattgtggctaatttttaactaccctggtgtgaccttatgtgaccctgtgtgagtcaacatgtctggcctcaggggtgtgtgtggagggggcaccctttgccattgcattacacaagtctttgaactgactgtccttcttactaaatgctattagcatctcttagtcactgtggcagccaaaaatgcttccacgttttctaagcattccacaggtgtatgttcctggcctgattcaggatagaccagtaactcctgaaagtaatcaaaggggccgggtattgtggctcacgtctgtagtcacagctacttgggaggctgaggcgggaagaccacctgagccccgaagttcaagactgcagtgagccgcgatcccaccaaggcattccagcctgggctgcagaataagaacctgtctcttaagaaaaaaaaaagaaaaaaaggtaataaaagagcaccaggaagcataggtgatgcacctcccatgtagagaaggctgggcgagcgaatgtgtagtggtttctgcggctccattgttagtgatgacttacggatggaaaagggagttttgtagctgagtgaaaactgttagaaaaccaaatgccgctgtcatgtttttgtctcgtgcgcttccccttcaccttcatccttgggcccatgctgtggccaactgaggagtaccctgaggttaagcgtcccccatggcaggtgaggctgtggggtgggaggagggctgggagatagcagattagagatctacaagagaatagaaagtttgattcaaggagaaaaactggagtaagcagtttggagaagtcagatgtttaaaacatgaaaagaaatgtaactttgagttgcagtggttttgagtttcctgatcttgatgtgccagtaactccctgggggctgacaaatccagggggaaggttcaaaggcagagagcctgtttgagctgggccagggcacagaggcttgctcagaagacgtggacggcagcagagcctgggcttgagagtcgagctccaccttcttcaggctctttccagcggggcgggacaaggacccacacatgctaagcgagcagggaccctcaagcctgtgactgttcgtgccagtgaaaagggcaccagtgcactgatttcttccgttcacccagaaacaacgatttcttcaatgttcacagtagtctgttaaccacctcttcgtggtgcatctttgagcctgtgtttacagcagtcctctctttggtcttaacaacccaacgtgaattttgtggcatgctacaaattgaggcatcaaagctatgctttttacattgacttttgagaaattcgacagagttctgaaacccaaatcttgacctttcatggatatgatggtaacctggcttgaggttttttttcatctctttcccaaactacctgttctttccatcggcattttaagtagcttgagcacttggtttcactcttcaatactttgatgatgcgaatatctgcagatgcctactgtatgcccagcccagcctctctacagagagaccttcccagccagccccggtctaacccatcatgctgttgagtgttcttcctagcagacatcattatattactcatgcattcattttagggggttatggtctattccattgctcccctctcccagagcagtgctttaggggagccaggtctgtcttactcccggtacacccagcacctgtaactctctagcaaatcctagatgcttggtgagtgagtgagtacattgaagtacattgagtacagtgaggccacacaatttaaaaagtgacaatggcagtacactgcggcatgtgctggaaaatgaagtccagggtgctgggtggcctcatggcagggaggctcccctaggctggcgtcggggccaggcagcctgaggatgtgaaattcaagaggacacagcaagaggctggaaggaaactagttggggacaggggtgagaggactcgattgaaggggtcccactgcaaagggccccatgagcccatccagagtgcttgggttccccccctgaggcctggtgagagcccgtggaagggccgagcctggggagctcacaccgaggcctcaattcctgcttccctttcagacacgcattcatccttaactctttatcagaagggaaataaaacctcccagatagcttggttgtgaggattaaattaggaaaaaaaataaagctatagctgttattggccttgcccggtgctcctggaccgtggttagtggatggagcctttcctcatcctccagcttcttgcctgtgtttgtagggctcacgacagcttgtaattatttcatttgtgtgggtcttactttttgcacatctcttcactgcgtggcaggtcctgtggaggcagagcttgggtctgttttgtccactttgttcccagtccaggcagaaggatgggcagggagtggacgtccagataatgaacctgaagtgagtgaatgaatgcactaagctcaagtcagggttttctttacatagaaattctcccacgctcctttttgcttttagtcttgaggatcaacagtgttcatgtactaaatcaagcctgaaagccctttttttttttttttttttgagatggagtcttgctctgtcacccatgctggagtgcagtagcatgatcttggctcactgcaacctccgcctcctgggttcaagcgattctgctgcctcagcctcctgagcagctgggtttataggcgcccaccaccatgcctagctgatttttgtatttttttggtagagatgaggttttaccatgttaatcaggctggtctcgaactcctgacctcaggtgatccacccacctcagcctcccaaagtgctgggattacaggcatgaaccactgtacctggccaaaagcccacgtttggcagggtggctggcagccttggggcctcatccacggtgaggttgtgtttggcctctctttgcaggttgatggctggaagggggaagggttctgtggtcaggcctgtgcttcatggagatgtctgaccgttgggactgtacctttcatcctttggatgagatgctctgccttgaggcagaagcatggaaagccggtggatttgtgcgtgtcggtggttttccactgggtctccaatccggactcagcattgtgggaccaccagtggctccccctgccacttcttgtggacacgttctttctccttagagcatctgttccaggccagcggcggtgttactttccagcctggggatgactttatggcgtgatgtctaatctccagtgggcaagtggtgaaggtactctagcatccatccagtggccagtcggccgagggcctgtctgctcatggggaagtgtcctctgatggcagcccagtgtcttgctaaccagcagaccactgcagaaggcaacgctggcctcctagaggtgtggcttgtttgcatctctatgtttgtgaccaagtcgtttccttccttggtctcagaatctgcttggcacttactaatagcatttgttcaacatgcatgatcccggtatgtgaagtacagatatgacatttataagccagacactgcgtttgactaatgttggcaaagtcacactaagagcctcccagtgttcagatggcggaagggaaggcagataggagtccagtccccaggactctgaggccccaccttgtgccttggtagaagtgaagacagatcgcctggggaagttggaagaagtagccgagacatttctcctggctcagagcagagggggatttacgttggcctatgaaggaagagtaagtatgtagaaccttcacttgtagagagctgagactttactgtcacccttgttttagggagcctacatggcacctaagactcaaatttacatttttaactaactgaagccaaataaaagaccttttatcccaactgggtacactctaaagtctcgacatgattatgcctgtgatcctgcacaaatcgtctcaaagatcttggaaaattggttagtgtcggggcacggtggcagttagtactggggcattggaagcaccagagcttaccttagctagacgtttccatcccgtggcagcttaacacgtggcatcctcactggtcttacagcattatggggaatgcaaaataaggacttgtctccttccagaagcctgctgcccatcagaaatatatatatatatatatatatatatatatatatattttcagggaatggtagagaacagtggagaagtagatgcttgtcaggcgtcttgtctgctgggccaaggtgaatcaggaggtgagagcggcggctttcctcttgtttgggcagcgggtgaaggacaggcgtggcaggctgtatggtgagtgtgggcatggccgcccctccgtcctctttcccctctggcccgtctcgcatctgaacacctgggagtctgtgattagacctgagaagaggaaatgaggggcagttcccttccattttcctcccagccgctcagtccaggtgtgtgtcagtttgcacgcctccctctggaagtccgtgtctctgcgaggctcctcagccccggtagcccccacgccaagtcccatttactcagggtttctgctggtgacggctctaataggcacttcacctgctctgcggaggcgcctgcggaatggtggtcgctctcattagctctgctcacccgcccagcgttacaggcagctggggagggattcaggggctgctgtgttcagcagtaatcagagcccttctgtgcacattcgacgctcaagtgtgtagtttaccacgggagatcaagaaatacgttaaatgcataaaattaaaggcagcggcctgcaggatccccaggtggcgtgtgctgggaattggatgcacttggctgtgtgtgtcacttaggaaatgcgctagggggtcagcagctttcccatcgaagcgttggttagtttgtgaaaagtaaaattccaaatatttgaaataataaggggccagatacgtttggagcttgagaagaactatttcaccagccaagagatcctaaacattttttggcttaatagaaaataatagcctattttgaacaataatctttgtaaatccaagaagaaaaaacagttcatctccctttatagggtctgatttgtgtctgttcaatttaaatagcggcaacagaaatacaagtgtctttgggtgattttgttctgctcttaccaacagatgacaatcacgtcttatggtttttgatttgacagaacggttcatttcatcagctttctagcagcccatttgattcaatttccctctgcagtgttttactgaaaatgacaaaaatgttcttttacataaagcctgcgagtctgtgaaggaacataaatgtgctgtgctgtttacatactaacttaattgtaatttaaatgcccttttcattccataaatatagccataggcttttcatttccttcaagccttcagctcacagagcagtttatatgtaaactggagtcagttgcttcataaagtgaatttctggaggaaataatatagtatatatcaaaatctagataggtaatgggaaattgattgtgacaatacaatattagaaacacatctccataatattttatttattacactttccaccttttgctgtcaagggaaaatatttcatcttgcaccgcgaactccagtctgtagagattttgacctcaatattctcacacaaatgaatatagtgtgtaaggtagcacaattttccctgtgtaaaatcatgcataaaaaacaattcatttaaagcatctaaatgtttccaaattactgcaggtaatttttacagcttaattcctccgagacaccattttaaatgaacccataattcaattttcagactttgcatttcaaatttttatgttgaaagtaatttcctttcttgcttaagttgtgctcagaaccagattcataaaatgtgtatgatgtatgtctgtagaatcagtgactgttagaagcttaataacaaatatgcaaggaagaaattaaatgatttttctcttcagtagttcagtttaacattgatttctaaaagaaatgattctgactttgccgctaagtttctttctttcactttttttcttttcttttttcttcttgcagtgttccaggggataaaactgtccttgtatctgtattttgaatgatttggaatcttttatctttgcatattcctttagaccagaaaagaagttgaataatgttcagactggctcccatgttaaggtagcacttagagattctctgaatatcatccctgaagctatggcttcctaaagacttttgacctcttaaattagtgaagagtggacaccaccgcttaagccctgctaagaccagttaaaagcatctgtggtctgggcggagggagctttgagtacaatggaaaatggcaccaccgtgttcatgcttgcgagctttccatcctgatggctctcctctgccttttcctgtggctgtgggatttttcaaaacccttttccatgtctgcccttcaatagaacactccaagtatccagttttattaatgtccagaagcgtaaatcacagccccctgttttgtcattccagtcattttagtcactaaaggattacttcaagtgactgaactcggctgttatctgtttgagtttttgcagccaggtcatctcaggggactgggaacaagctttctgcccccttaactatgtcgagtggatggctttagctggaccactttttgtgattgatgtacattctgtgtcgctgtatcttcccgcgacgtggtaatgcaaacttagaaaaaaaaataagatggaaatggtgctgcaagtttttaaaatcaagggttgggcagtgcagggggagctattgtttaaaaaataaaagttgggaggaagatataatggattttgtcagtggtattagggcgatgaggcattcttgagttcagcaaatattggcagataattctgctttatggaaactattaaatgtaattggtcacatcagagacacaattggcatctgtactttgaagctgaatctcctcaggttgagagagagaaagagagattaagacggactcttcagagaccatggactacagggcccaaagttataaatctggaagatgtaaataaaggaatattttaggctaacgttgctccaagaagcagtatttgcctgtaagaaatgtaataatagaggtgccaatacaagatagcaaaagttacccaggaaagatgttaagtgacatgctgtcttcatttttaaacaggacaaattatttaattgggaattttgccgacactgttgaagcaattatcatatttaaactgtttatcttctccacattctgcctgtattttttttcttctttgcattaatctttttcctctttagcatctagagagggtccctttctcgtggagatcggcattgtagaccttaaaaggtctcacttgagaaatatttttgatattattgaataattattaattcatgcaagaaacaaaaggaagggcactcaccggctcgtggccagagcagactctcattctttacttctgagtgtttgggggcttctagcgaataatccctggatgacgggtcctagtggttttgagaccaccagtgggtagcctcgccctgggaggggcttgagcagccttgaggtgcttttgtgctttgcacgttcgtaattgtgaacctcaacgcaaagcaggtgttgttgtaaatctggtgtctctgtggaagcaatgccagtcctctaattcatcttcgccaagctagaggacgcgagcacatgtgcaggtctgtgacctaaagcccttgctggccagggtgctattcttacctttgggcttccagaaagagccagctcctggtggagtgaaggtcctacctccagatgcctccgaaggtgccggtacgtgattggaataggaatgcgcatgaacggagaaaaccctcaccattgcgtccttttgttctttttgcgaggaagagatccatgggttggctcttactgaacatgaaatgttggaagtggaacactgcagtgttaccagtgagctgtgtaatcgccacctctgacagggatcctgctcgaggagcacgtctttccttggtgtggccgtctccaagtactttgggtggtggtaaatttacccttctcggtcacacactgtgaagatgtgagtttcccaatttcagcatttggagccatgtccttggtgagggcaggaggaatttgtcaccctttctcgatgtgcctgggactagggcagagacggttagtctcaggagagccaggtgtgccagctgcccctgcctgccatggctcccgcattgtggccaggactttttctggcagtggtactgcccgagggccgcagtcctggtcacattccacttggggacagagtgtgcaaggggctgatctgaagatccggctggaacctgggagccacaggatcctggggaccctctttggctgtaccccgtacctctgtatttgctcccacatgctgtctgatttctctggatggcctggatgcctctgttcccagcatctcctcggcatgctccctgcagcccttggcctgtgtccagtgggccccgacccggaggctcctgccccgtagctcaggtcccgtcttggcctcagccttcccttaggtgctcgtttctccagtacctgcagcaccggcgcttttagattgcattctttatgcattaattagtaatgtggtggtcccaggtgactaataagctaaagaaagaactagtgtgagtgaatttctttaaaggtcatttggctctaggaaaaccttttttttaagaaaaaaaaaagcattttatagaaatgttcaatggcaaagtgaaatgtaaagtattacatgttttttactatagcgaacaaattgcccctttttattccgtttatgtcttcatctgctacatttagccagatatatttgtctacctaattttctgcaaactggaagacataatcccccaatgtgaaaacaccaagagttacatgatgataattataactcatgaggggaaaagtgtcgcctatagaatccataccggtcgtttgcctgagagaacgtgctcatcctggccctgttggattgtctccacagatgtttttcatttcgtatttggtttgattaaagacaaaattcacccatcaaaaggaagaacggccctgcagagtgtgagttcttcattcgagagcatgtgctagttaaaaagaaagaaaaaagatatcttaatccaatttctgagctgcactgatcccaaattgaactgaatttccattaataactcaacctaaaaatcctttaggtgttctctgggggctggaaacagaggccggtggcgtggtgtgatgttcagcgttggccaggatcacttgcttcacccaggtgttgggcctgcacactgagtgcccgagaggaaaggttccgggaaagctgctgtcggaagccggggtttgtgggatcgtgtgtaggagtagatgtggaggggcttgtgtgaatgggggagttatgaaaccaggactgaagacaacagaaaggccccctgggagacaggtccctggcttgccctgtgcttccccgccactcggggggccggccatgcggagaacactctcctctcccagccaggcttcagaactggggggctcggcctccttcctctggccccagcagcccccgagcggagacgctggagttccagtagagtggagggaaaagtgtctttgacagcgaggtgagctgcctgcctgcacggtgggtcccctgggtgactcaggcccccttcctggaaggcaaagggaggggcacgtttctgaccctcctgagggaacggaggagactggagagggaacattctagtatgtgcgtgcgcccatgcgaaggctttcaaaggcctgagagcagacttcagagctgatcacaaagttgaaggtgggaggaggggagcaagaaagcatcggcactcagagtccccaggcatgggcacctgacacggtgctgtcccccgcagtggctgctgctgttggtgtgcctactgtgtgggggcttctgtgggagaggaccctgtcctccgcacgtcagctgccggagagtcagctggtgccagatggccggccggcctgcctgcctctgggaggcctcagtgcctgttggattccctgccatgcagggcgcacccacggggtgacgtgtgggaccctcccaagcgtgcccgtgcacccatgcagctgtggccgcagtctccactgttttgaatatttgttgtgttcctcctggtaggatgcatgatgttttgggactgtgctggcagctctgtcttccagttccttcccaagcagtgtgggctgagggtgccagcagaatgcccgccccaggacacgatccagtggctctcgggatccctccagggttggctgagaatatatcagtggcactgatcttgtcccagaatgcttggtcgtccggtcggctgtgacaaaagagaaacatggtccgggttatacacagcctttccttgtctttatttctagacaccctttatttcaagactctactccactggacttcatgtccggttattaataagcagttctcgttctgtcatcgagcctgctctggagttaactgtcaaataatctgaactaaaaagttaaatcatataggctttgaaaattagcatccctaagtctctgtccttttgtatttgaaaacattgatcattttccaccccctcaggatggccagtatcctctggatttattgctaacagtaactgctcagtttcacacccatcctgaaaccatttgaggtgatcctgtaattgccatgtgtgtgtattactaatcaaggctgctccctctacaaaacactgagtggcccccaggccgaggtgctgcagagatggcccgtgtgggaggggtaacgcctgcaaacccgaccctgatcaccaatggagtggcctcacgtggcctccctgatggtggcccttgactgtggtcagcactggactggcccaccctatgagatgtctcaggcagcttgcaagattacatcatgtgatggccaatgcttctgctaaacaagaggcagggagccgaatggacaggcctcaggaagcacagcgtggtggccgtcacagccttctgggaaggctatttctgcatcactgaggccccacagcccagggtgtttaggatgaagggcacagatttccagatgtgaagagtgtcaggtgggctaggggcaggagaagcatgaggaggaccctgtgctggggatgagaggagagcggccctgcagtcaaggggccaggtggagccacctttggggatgcggggagaacttggtggccctcagagacccctgcttggagaccccacctcccccttgacaagactgcggcctgtgctgggcacagctggcccagagcgagggccacaccctactactgcaccctccacgcctgtctgtccttgcccacctcggtggctgcctcgccgacccccgccttgcagctggagtagctgtgctgataaagatgcaggtgggaagctggatggtgaggtagcccatctgtggtttgggatccgagaagacggcaagacctcagcttcatgagaagagagacctgaagatccatgctggggaagggcgaggatggaaaggggtgcagggcgtggagcaggtgcccaggtcgggtacagagacaggcctgggacctggaggacctgcacgcggggtcgggcacctgccacactctcccatgtctttgaagcctcttgtggtagaagagaaggtgctcatattttaccttctgtgccttagtatgtagtttggtattgtgttaagtggacagaaatcacatacccctgctcactctgagcctgcatcctttgaccgtcactgtgaacctcagatcgagacaccagcctcagcgggggctgagatagggcattccccattcccactggctgcttggagggctgtgagggacctgctgcctggagcacagggcctgtatgggtgggtaagtccctggagagacaggaggaggcaggggtgtgcaagcctcttgaggtatgaggaaggtggccggggtctcgggaagcttgtctggccctggcaggcaggacaagggccccctcctgcccatacctctaccttaggccccttgtcatgacacgtgatacctgagggtggggggctgtatgggcatttggaatgtgacggcacaagccacagtgggtcacttgtttctacaaatgcctgagaagaaaactattcttctaactcagagaagtgggatttcccactgaaaatcagtggaaatcacttataatggtctttgcaaattccttgcatctaaggaagtgcctgtggagcagcagtgggaggaaaccattcaggctcgatggagagggtgaccgctgcaccctcatccctggtgtcagcacactaccgaggtgctcctggtttaaggacgtttgtgcacccacccggaggtatgcatggaaagaaagcactgcagccattccccagccagtgtaggggtgggacacagtcccgtgggggccccgcggagggcctgggcagatgcagggctgcgcactgccgtggtttcctgtgtgtctgccaggagtgaagacctgagcagcctcactggcctggtgtggaggggccgcctccgagcatgcggagaagtggtttgcatggctggaagtcaatgtttatctgtctttagactcagttgaagacacatttctttcacacattaccatttttaaaacccattaaggtctgattttccaaggcgctgaccctgacgcttctagagggcctcatcccggaagctggtggggagagcaggaaaatcttccccgttgagttttaaacgtccagacctttgttgtctccttgtgacccttgcaggagagctctcgtggcttctgtgcatgttcgtgtgtgactcgcccggctgagggactggcataaacaaacagggatgagtttgtaaaacactttgtaatcccttgaaaaggagaaaaatataaatgaaaatcactgtttaacagtgaaggcaggaagggagctgttcctcagtatagctgtgggttgtcgttacgtgagcaggagggaatttcactttggatggatttggattttctcttcatgctcatgctctctaaatcttgcaaaagcacatggtaaacacacagcgcatgtgtttctggaggaaacgcacagtgtccatatagagcaggcactgattttgcactgaaagaacgtggatgagaagttccacgtgtttaaataaactggcaacagcggtcccagatagcttagccgggcagcagtcagaggtgccctggcctggggactgagctaaggtctcagaagggtcagctagccaagctcttcaccggacaacccctgaattaaccagacacatcacagatgcagactgttgattccagggaacccaggtgaaaggccaaggagaggtgaggtagttggtgcggtgcccctcctggagtcccttcaggactatggcactacagttctatgtaagctgtcacccaggactcatcttcagtggagtctggactgcagtcgggaggtgacaaacatccatggcatgagggcagcaagagcccctctcttgggaaccagttgtggccactatctgcccagtgaacatgggcttcagccccgagcatgggagggctcctggttgggcatctccctgggagttccttggtactgcctcctgcagggtgaggaggggtggggcctacttccaggcctctggaagcagcatcggcatgtcctttctggtgtgaactccaaatatctgagatggtctcagttaatttagaaagtttattttgccaagattaaggacatgcgcctgtgacccagcctcaggaggtcctgatgacacgtgccccaggtggtcggggcaccgcttggttttatagattttagagagacatgatacatcaattaatatatgtaagaagtacattggttctgtccagaaaggcagggacaactcgaagcagggaaggggcttccaggtcacaggtaggtgagagtcaagtggttgcaccgagtttctgataagcctctccaaaggaggcaatcagagatgtctttctctctgtgagcagagggatgactgaatacaacgggaggcaggttggccctgagcagtttccagcttgactttcccctttagattagtaatttgggggccccaaggttctcctttcatgctgggaggagggtttttccacacgtctcagacccaactctcgggcttcttaacccaaaagaacttccacgcagaaggcagcgaaaatagtgcacttcattttctaagacatctaaagctgccacaatgactgtgagttaggtgagctctatgaattaggctagggatttgcaaccacttagcaagttctaagtaactgtaaaagatcccatagactgcaaattgtgtttcatttggggacagataccctgtcttggggatttaagtgtgtttacctgcccagagttgacacagacgactgtcccttagcttcctttcctcatgctggttttaagtgcttcgaatcgggattttcctacccatctgatgcattccattgaaaattcaggaatacacatgtatgtgactgtttattggcaagtaattgtgaaataggccagaaatctaccagcttcctttaattaatgtaacaaatacttagcaaggacctcctgcattctagggattgtgggggtgggggggggagcaacaaacaaaacagataaaccctgccctgaggcgccccttgtcttgtctgggggtggaggtggggcaggcgtgagacagaagaaacaggtaaaatacagttcaaagtcaggtgctggtcagtgtcttggagaattctaaagcagggaggagggatggggtgagttttaaatgtggtgactgctgaagaaatggcctctgacagcctggaggaggagctggagctgggggggggacaggctggccagctcctccaacacacacacacacacacacacacacacacacgcacacacacacacacacacaccccctctcccccaaggacccacaaggactgcggcctcttagcgtgtgtggagtcatcacactgacccttagcagtgtggcctgacttcatgaggcccccgttgtcatggagatgctgggaatgggaggatttgccaccctccagtgaggagcccccatcccatgagtgcaaagcctgaaccggcccttccctaattggcacctctatcctattttctttggctgaggaaattctcgtaaatgtatatttaatgtggtgttgagattggtagttctcccccatcccccaaagatcatcaaatctctgggggtctttcaaaacctaaaggtgatctccctggtcctattatgctgttttgtttttgcttcttttctttttcttgaaagacctaattgtggagttttttcccccttctatgaatcccaagtaaggaactaaaatggaagacgggcttctggctcccgctgcagcagatgggataattctacaggtgattgccctggaggtctgcaagggagggagagcggcaccattagactaacacagctctattattgactaatgacgaacagcgtcgccttgccttgccaccttaaaacagacacagggatttgctactctatttgttttataaaatatgcattgagagcaacaccaaaatgctgaatgacaggtgaccctcagagcacgcctggtatgcactgcgttagcttgccagtatttcttagagacttatttgattctaattcagtaggatttttaaccccaacattttgaaatcttgctttgaaagtccatgttattcccattaacgtcagtgagtttttcacatatctaaatatctaatatcatgctttgagaattgaagcccagcctgctctttaaaagcaagggagctcaccacatcctggagttctgcagtgatttgacatgtcctggaagaaattatcttcgcaagaaagtaagtttagttgattgaaatgaaattaacaccacatttctgtgtcataatgtattaacctgattggctagctggattccagcctgtttacaaacatcctgaagcctagatggccccttcctcagtgtccttaactgctgttctcgcccttagctcgcgtgcccaaccctaaggctgaaaacgccccctgtaggctactgtaagctgtagcattcaaggcctcccaggtgtcgctgtaatttcttgtatacattttagctccatctgtggcataggtaccattcaatgttatcttaatacactagctttggattttgtggctgcaacaataacaaaaaaaaatccttggttctgatgacttcatgttgtttcagaagatactcaaggccgggtgcagtggctcacacctgtaatcccaacactttgggaggccgaggcaggtggattacctaaggtcaggagttcgagaccagcctggccaacacagtgaaaccccatctctactaaaaatacaaaacttacctgggcatggtggtgcacacccgtagtctcagctactcgggaggctgaggcaggagaattgcttgaacctgggaggcggaggttgcagtgagccaagatcgcaccactgcgctccagcctgggtggcagagcgagactccctgtgtggaaaaaaaaaaaaaagatactcagatgtagctgtctctgcctgggttgttttctaaatgcgtttggctggagatagaacagatcctgcctctatccacggcgtaagggagttagcttcatggcaagctctctggagaacacaggccattgtacctgctcatgagaacagaagtgaaagtcacacagcatgcatattagttccgaggctactggcattattatttaatgatgagttagtgcaaattgaggggtgaggaagtagcatgtacaaaggccctgaagatgaatgactgtgtgaaattttgaagagcagtttagcccgaaaatattccatgagtagctgccaggagagcttttctggaacagtattaaactttagaaaaagtgttctgacatttatagactgacacgaaaacagaagtaaaagtctaaattgaaccaaagtcctccttaaagattgcctttgaaattgagtaatggcggatgcccagcacctgatgtttgggcacgggcgacaggacgtagggtggtcatccgaatatccctgccccactccccagctctctatggcattagtagatgctggaagatgaggccgtgttttctctttcatcacccgtgcagtgaaggatttgcgtggtctttggtgcttttcttctaaataatgaacaattatttcttgcgacattttggttttttactgccaattccaacagccatttgtcttttcagagctaagtttataacttcctcctttctctcctgtcacttttaccccattctgatttttcatctccctgccaattgtggtttcgtttctgagcactcatttattaatccttctttttcatttcccagaacacgtgctggtgtaaatctttttgcagttaaagtattacattaacctttttgatagcatggggtggtatctcggcggatgggcgagtgctgttcgcctgtggtctgtctcaggggttctagttggaaggcgtcctgcagccatttcttcagaggctaaggtgtgggggagcaccttggggaagaagaaaacatagtttctgcccttacaaagctgataccccatcaaacttgagattaaaacagacaaaaaacccaagaacctacagagcactgcagagaggccttgggaccctctgacagagtcagtggggagtcggctgggaagggcagcttttctgtcccagcagccttgcttcctcttcagcatgctgagggacatggagccctccaccattatctgaattgattccatctttctctcctgcctctgctgtgggtttccataatgtgaaattaatgcatgtgcttaggttgcggggggccaacccctcagaaatatgcaaagacttcaagggagaccttttcttttcacaaagaggaagatcccccacccccaacacacacacacacacacacacacgcacacacatgcacagtttgcatagccggagtagggagtatctctttctggggaatgttcgtatgtcactgttgattttacattgtttttcctttctttgacttgaaaatttttaaagtaacacaaatttattattttaaaaacttcaactctggaagtacagccgtaaaatcctctttccagaagcaatcagtcttagtcctttggaatgcaaccttataaatctgtttctgttgtaaatatacttccctgttcttacctgcctttacctggagagtacatagtatattcttttgtgagtaggactttaacttcctaatatatcataggctttccgcagctggttctgtattatggattactgtaatttattaacttttcccactttgagtggaaatttagtttatttccaactttttttttttgcttttatggtgttatgaacatttgtgtatgtctgtatttctgtgctgtgtgcaagtatttctgtgggatagacgtctaggagaggaattgtttggccgaagggcatacacatttaaatgttcacggatgcagcccagacccccctcataaggctgtaccaactcatactctcagcagtaataaagacgcgtccatttctcacacctctgcagaggatttctaaaatggctttttatttttcaaaaagcttacatttgacaactattgatgttgtgcaactttctgtgtttattagccaattatatttttttctcctttgatttacttatacatattctttgcttttttcgattgtttcttttagtaactctgcagtatggctactagtcctttgtctaacaagttatacatattttattctagtctcttttcttagcagtttagtggtgtcttttagtcacgctggagttttaaagttttccgcaatttaatctgacgatcaatttactggagtttccagttttgagtcctgctttgaagcgccactgtaagatttcgaaaaaggactatcttgacttacggttttgttttaatatttttaatttactggtaatttgctttcgtgtgacctgagaatgatctgacataaggtttttctacatagatggttttgctacaccctttccataggcttcactgtcatctaccctcatcactgaaatgtccccttcatcttattctgacctttcctgtgtgtgggtctagatacaggctctgttctgtccattgctattcctgggccagctcttccctgatagtaatgtggctctgcagacagttccacgtgtagaggatgtgtcctttttcattcttgtttgtaaataagaatgggggtggggacacgggaggcagaatcataaacaaatagcctgacagaacagggataataaaaatttaaagaaaaagggggttaggggaagtagagtaagatcatgccctactgtataggtcataggtaggaatcaaaggaaactatttcaagctcacagaccaggaagtggaagattaggcaaggaaaaaaaggaattaaaatagggtgaccagtcatcccagctcgcctgtgactgaggggcctcccaggacacggaactttccgttttaacactgggaaaatcctgggtaaactgctgggacaagttggtcaccctagattacagacgctataaaagatatacacacaaaggtaccactagaataaaaacactttacaaaatattaacctaaaagaaaaagcaaagaagactaaagagacacagtaaccctcactgcaattccagcatcagccaacaggacaaagcggaagctgtgtcaggaactgtcagggggcttagctgcttctggaaatgaaatttcacgttggcttggtaaggcagcccgtagctcagcacatgtgagcagcacatgtgaaacacagtgattcacaagggaagggcaaagggatgggcggtgattaatcaggcaaatgaaaccatagggaagcaggggttgccatcttgggattagaccaagcagaaatcaggctaaaaaggcattataagagacagatgagaacaccttaaaatgctaaaagtcacactcataatgaagataaaacccatgtaacacagaaaccacctgtataaagcagaacctacagcatacgcaaagagaaataaatagcaacacggaaattgtcagagatgttaacacactattctcagtacaagacaggtcaagtggccacaagtaaggaatgatacaggagacccaaacaacctatcccgtcacagatacgtattgaaatgcattcgctgagtagaaaatacgtctgtttctcaacatacatggaatatttacaaaagcttatcaaaaattaggttatgaagaaaagtttcataaaagaattgttacaatcaacattctctgatcacagtgcaataaaactataaattgttaacaaaaacaaggcccatccacctagagacttaaaacctattcttgaatgaaagtgtaaatataaaccaacgtaatagaatgtctgtaaaataataactctgtgtatcaaaggcatagttaatgcagtgattagagaattcatgactgtagacacctatatcagtaaaaatgagggaagaaaaataaatggaattaataccaaactcagaaaactatgaaaaattaaaagggaagccaaaaaagtataggaaaggaaataatagaagcagaaaataacgaagtagagaaggaaaaagcatttatttaatcagtaaatcaaattctaggtcctttgaaaaaaatttaaacagacaaatcattagttattttattcaaggaaaaaaatggggaaacacaaatatataaaatgagaatgacaacagggaaataagtattgatacagaagtttttaaaaagcacaagagactaatttgcaaataaatatgaaaacatttttgaagtgcataattaggaaaaatccagttttagcaaaattaaccccagtagagatagaaagcttaaataaaccaatttacatggaagaaacagagaacattttcaaagaactacctcacaaaatgggtctgagcccagttgctttcacaggggaattctagtaaatcttttgtgtagatgattctaatgatacataaattgtttaaaagcataagaaatgaagggaaacgtcccatattttttatgcagcaagtacaaattgaaacctaaacctggtaaagatagtatattgtaaggaaaataaaaactaatataatatggaaatattgatgcagaaatcccaatgaatattagtgaatagattccgacacctcattagtagtataatatacctcaacaaatataacctttctatgcccaggaatgcaagggtagtttggtattaggaaatctgttcattgcattgcagatgaataatataatcatgcaaaaaggaaggaaaaaagtaccaatgcaagtaacttaaacactgtactctgatgacatgtactcaattgtagggggaaaactacaaatattcttcttaataactttgtttttcatagtgatgtggaattatttcatgtgtatgtggattgagaaaatgactaagtgtgttgatgtttgggagaaccccctgtgaagaagagggacacttacatggagtaggcatcaaggaagaagttggtgcagttgacttggaatcagcatcatctatatggactcattatttctcaaacatgcacatatgtacacacttcttccagctctagctagaactaaaaaggcctagaggcagtaataccccagtcacaaagaacacacctagttcccagtcttattttcaaaataccatgcaccactgaaaaggatcttgtgcagcttggagaaatggctgattccaggatgggggcagcaaagacacaaaaggagcctagaacaagaagaatgataagcaggatgagaaggaagaatacaaaatgagcccagaattagcagggggaagagaagccaatttttaaaatgggcaaaacattggaacaggcacttcaccaaagaatgcatataaatggaagataagcatatgaaaatatgctcaacatcttcacccttagcaaatgaaaactaaaaccacaaggagattccactacatgcttattagaatggctaaagtgaactgacagtgccaagtgctgatgaagatgcagagcagccagagtccattgcgggggaaaatgctgaattacagccaccagggtgacagtcaggcaggtttaaaaaatagagttgaacatacacttaccatatggcacagaaatctgacttaaatgtttactcaagtgaacaaaaacagatacctactcacccacccatccactccttcagtcacccacccactccatcactctctctctcttcacccactcacccacccccccacctacccactcacccacctactcactcccccacccaccccccaactcacttacccccacacccgctcacccacccatcctctcccctctcccaactctctctctcccaactctctctctctctctaactcagaaaagtggctttactcagagtctccccaagccttaaacagccattccctcacttggagaactgagtaagtagataagctgtagttcatccctaccatgcagttcagatcagccctgagaaaggagcagacaattgatacatacaacatcatgaatgactctcaaggcattatgcatttgatagtggaagaagccagacactgagatgacattactccacttacaggactgactgtgggaggcaaaaccactgggacagcaaatcagtggtagcgagggatgggattgagggggaaagaggtttcctataaaggaccacaggaagtgcttaggatgatggaactctggcttgatcttagtgatggtcatgtgactgtaggtgtttgtcaaaacttacagaactaaacaccaacaagggtgagttttacttcatgtaaaaaatgttaatgtcatgaaagacaaaggctgtaaaactgttccagcttgagggagactgaagagacatggcgactgaatacaacgtgtgcctgtactccagggaaagtgtattgtgggagagacttaattgggacaattgatgaaattggctatggattatatgttagataaaagcactgtgttgatgtagaatttcctcagtttgacaactgtactgtattatggttacctaagagaatattcttaggaaataagatgtgtgatatacccaaagtaactctcaaatggttcacacaaacaaataataatgtttgtgtggggagggagggggagagaaagaaaaaacagtggcaagatggtaaaaacaggtgaatctaggtaaagaatatactggtgttctctgtattcttgtaacttttctgcaagtttaacgttatttgaaacaaattttaactatttcagtgttctagatcatatatctttttccatgcttttagaatgcatttgtcaactttcacgttttaaaaatccagttacagttttgattcagggtgcattcactatgtagattaatttgggatcacaatgaatttctgttaattttgagaaaatttatatttctgatattttcctatctaggaatatgctgttttttcacttattcagcacttcttttatgtctttccataaaattttatactatgagtcatagaactcatattttttgctaagtttagccatatatattttttaatgtttgttttataaatgagctcttttcacctcattgaaattactaatttattatttctgacatacagaaaagctgttgacttttgtacttggccattctgctaaattctcttattagttctaacatcaatttattctctttaactttctctaataatacctggaaataatgataattttgtttattccttcctaatatttttatctgttatttctttgtcttgtcatgcattgaccagaacctagacaacaatgctgagagtagtgatactgttgatggggtgtgcctacccaacagttgtagaagtttttgtttctaatgtttgctgcttatgaaacataagatggtaattaacaggtgattgctggaagttcttggcttggttcccacacctgaaaagcatttgtgatttactgaaaaccagtgcatgttgaaggcttcccagccttacataattgagattcactttgactgtcatattgccaaaaatggactcaaaccctgaagttgtatccataccatcttgagaatcagttgtttgaagcgtcacccattgtttctaaccatttttgttataaagataatacacacagagagaagcgcctgcagtgaatctttgtgtaaccatcatgcagatcaggagacaaaccatggcggcccctcagaactctgccacgtgtttcttcccatcttttcctgctgctgctcccagaagtaaccctattccgacttttctgggttttcttggtaatcaatttctggtttttctttatagagttgttgcctaagtatgcacccttcaacacgatactgttgttttgcttgtactttttgttaactgtacatataataaattatgttatatatttctttattgcaggctcctttaatccagtgttatgtttgggagacgcacccatacaactgcatgtcaccgtagcttgttcatttccagtgtcgtgtagtgtcccttcatgtgaatttatcacagtttattagtatcttccactctgatggacatttggtagttggaattttcattactaatgatgcccctgcctgtggtcattcctgcctgcctcttgatgcacacaggcacgcatttctgctgggtatgtcctagttccagactcactggttatacggtatggatgtaattattgttagttttccagtgtgattaaacatcagattagcgcccattagcaatgtctgaggctgcctgttgctccactcgggtgcccgtttggtattaggagcttcttcagccattcttgtgtttgtgttcatgtatctcattgtggttttaattttcatttctataatgactaatgtggttgaatatgtttttgtatgattatttgccatttgtatttgctctttttaaagtatttgtacaggactttcacccattctcttattgtgttgccttatataggaattatttctatgttctagatatggatcctttgctggccatatatgttgaaagtatctccactctttggcttgcctttcattattttaattgtgtcttgctgaacagaaggttttaatgtcaaggtagtttttagtcaatcccctcatttatgattggtgcattttgtcaggtttaagaagtcttttctctcccataagaacgtgaagaaaacatattctcctatgttttatagaccataggttggcaaacttttttctgtaaaggactaaatagtaaacattttaagctttgtggaccacagatagtctctgctacatattcatcttaaaaaaaaaaaaagaataacctttagaagtataaaaaccattcttagatgctgggccagagtgggccaggctgtactttgcctgttcctgttctagaagtcacagttatttgctctcacctttacagttatgatttcagttgcagttggttttgttttttgttgtttgggtttacagcatgagacatgggacatctctaaatggatatttattcatgttgagaagtccatttattccccatgtctatgcagtgacccctttgtcacaagtgaaatgagtctgtttctcagttgtctattccattttattgtcctatttgcttattctcccaccataccgcactactttaattattgtagctttataacaaattttcaaatctaatagagaaagtacttcatttgttctttttacaactgtcttggttattcttggttaagacatttccattagtatataaatgaatcagtttgtcacatttcagtttcagagtaatttttaaaagaactttttctttttgaaatgtagagaaggtttttagaaaatctttttcttcttgaaattgtagagaaacatctctacaattttgagtcatcaaatctgtaaacatattatagtcctccatttgttgaggttgtcttaatctttcccaatcatgacttaaagcctttccctacagaagtcttgcatacattttgttggatttattattaggtagatgaatatttaaatatatataatctattgtaagtgttatgcatttattaattggcagtgcttccttaagtgtttgttggagcatgctgctgaaagcatcttggcttatacatttccatagaagatttaaaattataggacactaggtttcctgatatttttgtttttttaaaaatcaacttattttgttttactgcaatttttttttgttaagagacagagtctcactatgttgcccagactggcttcaaattcctggactcaaacaattctcccacctcagcctcctaaaaagctggaactatggatgcacaccactgtgcccacctctaatttcctttttttcctgatctttctggctggttgcttaccaattttactcacctttttaatgaccccacttctggttttactgctttttcttatttttttgtttgttttctgtttcatcagtttcctatatgagatcaacccacagacatacaattttatttgagcatttgtattgcttagaaagcatttataaaattttattaaattcttctcgacatttttctttcagcatggcattacactgcagattaataatttccaattaaaggttgggtggaagctcttcaattgcacagttaaaaagactttgaaatatggagatttctttttgtacttgccttgggatccacaaaaaacaaaacactaccagaacagtaatttgtgctcagaaattatatccactgtaaatttctgtgggaatagaaatctggagaagtaaatgaacagctgatgtttcttatgattcagttgttacttttcatcacaataactttactgaattttaagcatataattactgttttgccttgtaactttaggttgaatttatttttaaaaaatataaagtccgatttacaaagctatttaatgtttgataacaatagttgaaggaaattcttttgattcagaaaaattttaatatcaaacctgaaccataaaaattgcagtaaaacgttactacctctgctaagtcattgaagtgctttgtgatacagtatgtcaggatatccagcttcagtttctgactaaatttcatagaaatgattgtcattaggtccgtgagcatcaatgaagtacaccattgattacactctttaaataatgtgcaatagattcagattcacatattttatgcagagtacctgctagtaggtaatatagtaaccataggccttaacattttcataagtttttcagtttagccaactaatccttttttgcttcacacaatttcacaaccaccacttataacacatcttagcagattccacttcaggttgtaccgaagtagtactttctcatttttctgaaaatcttttctttggatttaaaaattttttctttgaaaatattcttgccatggccatagtttgccagctgttaatctagctttcaaaataagaaaccacaaagaagagaaaattgaaacatagacctagtagaagaaaggcaataatgaaaagcataaattaatgtaatggaaataaaaaaaatttttgagaaaatcaaagaaaccaatagcttatttcagttttgaagacatcaataaaaatgataaaactcaaactgagaaagagattacaaattacccaaattgatgtggtaagaggaaataagtacagatcctacagacattaaaagattatgaaggacatattataaacagttatgccagtaaatgtgacaacagacaaaatggacagaatcattgaaagacacaaactatcaaagctctctcaggaattcgtaacttagttgctgtggtgcctgtatgactgtacatgtcagtactcattgaactgtatgtatgaaaagatttaatttttctgtatgtgaaaattatctcaatttacttgactttaaaatattgtttaatgctgtcagtcatttgagctacacgtagatttaccatttttattcttttcatcctttctgtgtctgtagccttctttatgtgataatcctccttctgcctgaagaataccttttcagcagcagcaagctgaagccagccagctccgagagccagttctttaatttacgagaattttatgagctggctgtcaaacacacccattagtaaaaatcgaattacataaatttacagttaaatacattatgtttggaaagagaacacacattcaaaactgattccttccaattattgtactaattgtgctgttatccataccttggaggccatttttatgatgctgtgatactccacatttagtgctgtcaccttggtagcttgaagtcagtcctggtaggaatatttacacagcagaaattagcaaatgctactaattagaagtttatttgattatctagaccagaggttggtaaactatggcctggggctggggctggacatctttttttttttggtaaataagtatttgtcaacacagccacactcatttgtttatgtcttgtctgtggctgctttcatagctcagtagcagtcaagtgggagcaactgagacttccggcccacaaaacacaatatatttactatctggccctttgagaaaatgtttgccaaccaaaatctagatttcaaaatgtgatggagaagatgttagtaaggtgcattcattttcagatgtcttgtgtgtaactgttacattttgaatagctccagaaatttagcccctcttccagtggttaaaagtatcatctcattcaacaaagaaatcgctcacgtcattgccgaacacgtgaagttctgacataacatcttcatcacctctgtctcgtcactttgcagcattcatgtagaactgtgtgttcaccagttgcaacctcagattggctatggacatgagtttggcaaatatcaacaaagtcatgctataagaatcagctggctatacagaatttacaacaaagagtattgtgtattgaattatttgtaaattgtatacttcacatcctttatatcagtagagtttattctttaagaaatgcacatctacatgaatacttgttttggaatgccagctaaacatttatcagtacaccattgcctttatttcatttcacagggaattgctggcaagttctggtttcagtttcttttttagaaaatgtcttaattgtatctgtatttttatatcatttgttataggggtctaggtttccagttattttattcagaatccagagatactgtgactttttcttcaggcttccatcattcttcttgagaagtcagctcttctttcaagtaatgtcttttctctaaattgagatctgactaggtgtggacaccttttatttatcttgctttgagatcacagggattcctgaatctatagctcaatgtctttcaacagtttcagaatgttctcatctcttacttcttcagaggttatttttgctccattcccttgaatttccttctttgaacccatttacgcatcggtacacttccctgtatcttctaaatctcttgttctccgttatttcccattattttatatccgtggggtccattgtgttgatttcttctgatcgctctaacagttcattagttttctttgctactgtgcctaatttggttttaaacccattcatagaatacattatttcaatgatttctcaattctagtattttcatttttttaaatagttggtgattctttcctgaatttgagatcttagcttttttcctgcttgaaggtagtaaagcatagttattttacattccaacacctggaatccctgtgatctattttttgtctttatttctgccatttttgttcatattgtcttatctcctcatgggtctagttgttttttattttgtgccatattagtacattggagaaacagtgtgtagaaatgacgtattgcccgggaggatgttttcttcctctagcagtgcttggggcaccggcagtgtgggatcagctcattctaaccctagggattaatacgatcagagcagggctgtggctcttttgaggtttgctctagtgacagctcacttttactcctacaaggtggccattcagattcttcccccaagttgagggtgctcaaaggaccctgcaagacactgtctgttgccccagggcagtcacctcgcaggaatggtgcttcatcccagggtaggggcagctcctgtgctgctgtttcctcctgtacgctggcccaaaattgtcgctgtctgctcttagaatatgacccactcctttcataaagctgagttcaaatcccacatcccaatttaaaaaaaaaaatcatgttataagcaacactaacaacaaatccacttttctgtcagccctgcccacctccccatcttcctttctgagacatgcagcatttctctgcaacaagcaaaattttgtatgtgcaaacacaccctcccaccccaaactttattttagtctctgtgtcttggttaaggtgtcttcctcgcagtgcctgccaccttgcggtcgagcccagctggcaaatgaagctgagctccagttctgcctgatgcaccaccccatgccttggtcttctgctggaggctgggggaggtgagcactggccaaggaccagccctctggttctgtccacatcggcttgatgcccattcaggggttgcaagttctcctggtctggatctattagttgaagaaattgccacctcgtaatttcaaattagtgggaattaaaaatttaatgggatgtatgtattttttggatcatatgaaactatgttttatgtggtatttaatgtgagtttaaatatgcttactaaatatgacttttgttaatatctcagttgatgctcgtgcgaaaaaagtctgcctttctacctttctttcctacctttctgccaaacccagtccttttactaatattttaaagtattgatttgaagcagcagtgtggttgcttctgtctgggtttgaacaagtaactgaattttaattcctgagacctcttacatatagcaattgtcttggctgttgtaggaaggcagcaccctcattcctctgatttagctctctttgattctacaggaagttgttgccactgtctctttttattaaactaaatgccagaattctttcatgtcatcataagatgttaatgcatattgctttggggaccaaagtcatacaattagaaaccactcaaatgcttttttattctaattctgaggttaccaattccttaaaattagtaaattttcactgattttgcaagccagttgtaaaaaaaaaaaatagtataaactcctcactgacggtagtttggaagctgcattgtttggatgtgatgtttcagtgccacacacgttagcggtgggaactggaagccagtcacgaatcggctatctgcttcagggatctggctttgcactcctgcccctgcccctgaagtggctctagggacagctgtggtttgagtggactcttgctccttcctgacctcttaatggccacatggacccccttgcttatctttgagagcagggccttgatggaaatgcaaatgtgtttctctttggtaacccagataccaaaaccaagtgcagtcctggaaggtgaaaagagtttccaaaggaaaaataaaagacacatttctaggaagcatgggaaaaccttggtggctttgtcctctggtgacagcagcctgggggaggtggagtagctgggatgcccccagctttcgcctcccctgggctctatcctgcatgttcttggtccatagccctctgtgggccatatctttccagcatcagtacctgttggggtccgtgctaggaacacagcagtgagagatgaagatgtggcctccctgaccgcctggagtccacagtgcaggggaggagggtgactttcaacaactaatgaacaaagcgtggctcagtcgtagctgagagaggcactgcccaggagaagtatgaggcatcgtgggagcatttatcagagtcagaggaggcttctttgagaggtagcttttaaatgagatctgaaccacgtggaacaagtaagagctcacgagtgcctgtgaagaaggaccccaccttgcacttgggggacccgaggaggacctgtgtgcttgccgtgcaaagcagcaggacagaggacccagctgagggccaggcgggagcaagggcccagcacactgggaggtttgagagggtgtcaggaggccatttggatggagaagccacgggcaaccagaggagtttcgtctcgagtcctcaccctggctgtagtgtggtgagcacattggatttggagaggttaggcagatgcaggcaggccagttactggaccatcatggtggtctaggcagggaatgactgggtttagactagtagaaggatgacagcagtgacgtctgtaagtggacagattgccggaagagttaggagtgaaaacgaggactttgtgattaaatagggccaaagaggaggataaggcaggcgtgggcccgtgttgctggcatgtgtgactagcaggaggggagtccccatcagaaggggaaacagagcaggaagccaggagtggcgggaacaacgcttcaaccttgggcctgctcttgttgaggtccagggaaccagtgggtcggatccgtgagcatgcaggcatggagctcagagaagcagcatgtgtcagagatatggcctgagagccacacacccactgctgctgctgtgatctccttgggtgagagcatcagggagaagagagaaagacccagtaggtggtgtcgccaagggagcaggccgtggtgacagaggctggtggaaccatcgggaaaaagggtgccagagcccatttccctgtggcagccaccaccccctcctcacaacacccaccaggtcccttttccttaaatcaaaacctggtggatttcaggggcaggcgctgctcagttgtggcctctgcaaggtcccggccatgtgtcaccattgagtagctgctacctggcactgcgccgggctctcatgagcacatgtgagtgagggagggaaggggctccattggctgagcagggtgcaccctacctctcctgtaactcccaggagtggccgtcccacacccagatggggagtcggggtgaagccaccatcctgtgcgtgaatcaatggaaggcaaggctggactcacccccgcctttccccagggcattgggccggatgttactgagcctccttcacttcctcttccctgtggccgccccccgaccttcatttccttggtaatgggacactttggccgctgtcatggttggccaggctcggtgtgggcggcacccaccagttccttctgtgaacatacaggttgatggcaacagcgctggggccatggggatgactgcggggagaagggctcatggcagagcaagcgcagtggaccctctccctctggccagtgttcttctgtgaagaggtgcatctctgcgtctctgcggcgtactctgcgagggtccctgtggaagtggctgagatcagcaagacgacgtgtttgcaggggttgggccacaccaggctctgcacgtgacatggagcctgcagctggaagaacagtctgtttaataaaaaataaccatttgataattataatcacttttaaattgataaatggattcttttaaataaaagaaaccattaagaatgattgttctgcagaaaaagcacatgaggaaatgaaattttctatctcattgggaatttcttggtaaatatgcaagcagatacatacattacatttagattttagaagtaaaatgacctcatatactttacttttttagcacagagaattctgtatagcataaagcagtaaatcacagatactgggcattatgagtgtatttttcttttggaaaaaaaaacattgaaaaagcagagttattaattggagtcctcaaggtccttatttcagtaaatctgaaatggtgaccatcttacccatagctaagttgggatgccaaagccatttccaccatcagcgtgctagtagtaaccatccaggggcaaagcggctgattctgcagcctgggcatgtggtatgtgggtgtctctgatgggccaagggaaatgacaggcccttgtgctgaagactgataggagttgatttacatgaaacacatgtgttttttttttaaagacaattttaatgcacatattttcattttcagctttatagtgttttatgtcttttgcctttgtgatttaaattgtcttatattatttataagcattttctattatttataattatttttaatgattttatgtaataccattttatttctagcttgacctgagttggcctatgctaacacatttaagctttcctaattcccaaggttaccataaatcagcaggtccctaacttctgtattcatctctgccctgtagagaatagccaacctcaggttttcgcagccatgcctcatctctctgtttctctaaagggaagccatagcaggtgcctgggtaatgtccagatctgaaaaatcccatgtaacctggagttgagggcctgtctttcacccagtctgtttgtaagcagtgcctctgcccccaccatgtccccacctgacaggccagctcaacacctgcctgcctcctcgtccctgctctaacactagtcagggcgcacagcccagcgaagtgctctgtctgctgggaggaggtactggctgtgatcggactgccccccacaaagccctgagcaggtgaagggtgtgggccagccgggggcgaaggaacaggtcaccgaggccactgccagcaccaccaagaatcaggccaggttccgggggcatctctgtccccaccagcagcactgcccttcagctttttgatgaggccggttgttggccataagaggagcggtgataagtttagattgttttggtgtctgtaggtcattactggaattacaccagccagccatgaggtcataaagttaccttgacagattgtgaatgccgagtccacagtaactctggagggctgcctggcatcgtccttcatcattgtccagaaacgctcctctcgggaaggctgggcgtaaaactgaaaagaggaggctcaaggaaagaacgcctcggtggctccatgcaggaaacattatttctgatttcaagctggagagagaaaggactttggggcccctgttttggaggcctggagtgatgagtactgtgtctccaagctcagaatgaagccaccagtggtggctgcctttgtttctgcactttcagttcctgcaggtgcaggagcttgccagggctgctgtcagggacacttttccaggccccgctgccctggctgggtttccttctctgagcaggaacaagtgcccgatgctgttgctggtgcagattggagggctgccagggctgggtgactccctgccgcattttgccaagcttgtgtagctgcttctgcctcttggaggggctgtgttagaaagcatgcatcacctccagttacctcaggcagcaggaaagacttttaacctactaaacaagcgtcttccctgggaaaatacatcctttggttgagactgtaggagacacactgtaagttatttatcttgaaccctaaactgcatgtaaaaaatgtaaccaaaccctcagtgcctggggcgaaatccactccctaatgttttaatgacacaggatccactatgctacgtgtgcaccgggtgtagacttggtccagtgcatgtggtgctaagccataagggactgttaggaagagccgggcatggtggctcatgcctgtggtcccagcactttgggaggccgaggtgggtagatcacttgaagtcgggagttcgagaccagtcccggccaacatggcaaaaccctgtctctactaaaaatacaaaaactcgccgagcgtggtggtgcacacctgtaatcccagctactcgggaggctgaggtgggaggatcgcttgaacccaggaggcagaggttgcagtgagccaagatcatgccattgctctccagcctggatgacagactgagactccatctcaaaaaaaaaaaaaagaatcgtgatattcttgataggaagtaaatgttagtcataggattacaagattttattctaagctcttacaagcaagcagttcagattaatgtgttttcttagaaaacttgatttgattaaatttcatactttttatctattccccaaaatttatgcggtccttgtgtgcttgagggttctaggaacaaagtgattggggaaacaccggtcccctctgctgtgggaccctgcgggcttccagaactggcgtgaggtccgagtcgctgtgggaccctgcgggcttccacaactggcatgaggtctgagtcccggtgtttcacaatattacttgaccaaagagcgtttttttcacaaacacatgaggcagcccatgtgactccagggacccgcaaagcacagcttgagaaatgttggtatgtttcaatggaaatgtatgtaattaagaatattagtacaatatttattaaaagtttctgtcttgaatgaagtaataggatatcctttaggaagcctgatgtcgggacgtgctgtggggtatttttatgttaggtgttaacattcagcaaacaaatccaggctctacttttatcctttaatgaaagattttattttttattcagcattggtgcattgaggacttacagccatcttatcttacctcgatgccattgaaacaaaaaaattagtcatagaaaacaaacctaatgccttcctttgcaagttccagtcagaagtgtcgcatataccagacaacacatcatttttatagttatagagagaactcctatgtacttcatgggaatacaaaaatgtcacaaaattaaaaggaatttttccaaaattactgtgactgaacagatcattccacgctccgttataccattctgatcctaatcccatagtttaagtgtagaggctggaaaatgtcttcgatttagaaaggaaagacaggcgagtgctgtacaatggtgcaattcagtggccaacgagcccagcagtcgcagaccccatacattcctctcgttcatatcctatcgatttgtgacagcgatcacatgctattgtagtacaaggaagaggtttttttaaccgactgtatgacttgtagacttttctgtgaattttcattaaggttggtgaattgtacaagctgaggaaagccaagacaagctagttaaaatctcctggcacacaggtcagcctgagttcagattttatttcgcgggcatgattttggggatcccgtgctagattgtagttgtgttgtaataaagccccctttccagcgctgcagtgggttgtggaaattgttgagaggagaaaccaccttctcctaggcatctgtatttggttacccgccagcactgagacatgcaggcatggaaaggcagactcaggaaggttcaggaattctaccgactttggagcatgctctcccccggatctgaaacactggcccccgtcttatccacccaccactccttaagacatccaggcgtggaagggaagattcaggaaggttcaggaattctaccgactttggagcatgctctcccctggatctgaaacactggcccccgccttctccgcctcccgctcctttaaccagtcgtcaggtatttcctcaggtacccgctctgggaagccttccctgaccctcctttgcccccgtggggacgtggctgctgcttcccccgtgtgcctgtggccccttgtgcccagcgccatcgccactccgtgagggtagatgtgggtgccggccgtgtctgatgcctccccacaggggccttgggcacgctgtgtggacgctgcctgtgcgtgcttcctgagcgaccccatcagtaaagcgtcgccaccatgcaatgctgctggcagtccttgtactgagacaatgtggtagctgccatcctgaatttccctctgaaactgctcccaccaccagtgctgcctgtgctgtggccctgctttgtgtcctgtggcctaacactggagcgccggctgctacctgtctgtctcctgtgctggacaggaagcaccatgcaggcggcgttgtcgtccgatggtctccacctgtggccgtagcaccgggtgcgctgtggactgggacacttccatgtcactccacacgtgtgccccgctgtggcactgtaaatattcatttgagctggtaaggaaaatgacattttaaatgccatgatgatatatagtgtatttctcatgtgaatcacgttttccttagtatggctcagcagcacgccatgtttccgtcccatagagaccatgcttcctgtggggacgcccatggtcctggctacctctgctgaaagacggccaaggtgactcttcagctataagagagatcactcatcctggaaacttgtcagagcaggagaattccagaaggatcaatatttttaaaaaattctgttcctaaacttttgctctgcaaaaggtcttgtaaaaagagaacagagacaagtcagcccaggagaaaataccattgacctttgaacaacacagacttgaactctgtgggtccacttacatgtggatttttttcaaccaaatgtggatggaaatatagtgttcacaggatatgaaaaccgtgtatatggagggccagcttttcatatacacagaatctacagggctgattgtaggacttgtgtaggtgcagatttttgtatccatgaaatcctggaggcactcaccagcatataccgaggaacaactgtatttgcaaatcccatatctgacagaggagttgtattcagaacatgaaaccaactctctaaactcaaaaataagaaaataaacattccagctagaaattggacaaacaatctgaacagagacttcatccaagaggagatacgtaggaccataagcacaggaaacaatgtttattgttagccaacagagaaatgcaaatcagagcctcagtgaggttccacgcagagaccacacactcctacagccactcggagaccacgtggccacttcccagaaagttaagcatctgtttccacaggaaccggaagttgtacttctgctcttgtatcctaaagaaaggaaaacttatgtccacacaaaaactgtacacaagtgtccatgtcaactttatttgtagtgacccccaaattggaagcaattcagatgtccttccaaagatgaaagaaaaagcaaactgtggtctatccatacaatggaatacttatgaaaacagaataaaaagcagccaactattgatacacggtacaatttggatggatctaaagggcattaggtggagtaaaggaagctaatcctaaaagataggattttttttgtatgtaacactcttgaaatgacaagcagtgatggggaagagataagggttaacagagactggggacagatgacttcgtaggtgtagcctgacaggtgtctttgtgatgagacagttcagtatcctgtctggggttttgtgcatgtaaatctaaacacattataaaatttcattttaaaacataatttttaaaagtccattaaaaataaaaatacataagaatttaaaatgtttgtaaaaactggtgacatcaaataagataggtagtttagttagatgtattgtatcaatgccagcttcctggttttggtaacgcatgattatgtagaaagttaagctgaatgaaggtgcctgggaactgtcactaatatttttcttgtgaatcttcaatttcaaactataaagtttaaaaaaatttgtgccttttacataccagttttttgttgtttttgagacggagtttcactctgtcactcaggctggagtgcagtggcgcagtcttggctcattgcaaacttcatctcccgggttcaagcgattctcctgcctcagcctcccaagtagctgggattataggcgcacgccaccatgtccggctaattttcatatttttggtacagatggggtttcaccatgttggccaggctggcctcaaactcctgacctcaagtgatccaccagcctcggcctccctaagtgccgggattacaggcgtgagccaccacgcccagcccatacccatttttaaaaagagaaaatggacaagagagcagggaatggcgttggctttgctgctgtgagtcttggaaaacccatttccagtgcaagtgcctgcgtaggagtacgggggcagcattcttgtaatgaaagtgagccctaaagccaaaaggtgatattccccctgaaatttaggaaagaaaggaaactcttaggctggaaaaatgtggctgaacttgatactgttcatttgatggttctttgattagcctcattacctagtatttgaacaacataaaaaattggttaagaatagccaaagagaaaatgcccgggtgagtgctaggcgtccatacacatggcagcttttaacaacgtgcagccatgaaatatggaaaacttcctgacgttgatcacagttgaaacttcatactttcttaattcagcctcttattgacagtaatatattttaactcaagaatgtgttcattcagtgtatattgacttggcttgttgaaatgttcacagtacatgtgaacactgggtttcctgtcatgatgacttaagacaggaggacagcagtgagtgattcctgccagtcaaggaactttccctggaaccccacttgaatggtaataatctgctcctataattgctgtggaaaaggaaagccctctggagattttacatctaatcatttatttataaatctgtagatggcagtctgcagaagatgtgtcaggggtcaactttgtgctcaaaacagttgcctgatgtttacatttcacagtgtatttttttaacagtacctccagcccccatcatcacaaaaggaccctggcttgctggtagctgctccccactcatcccacagcccagacacttcattacagatgcctcggcagaggctggtcccctctgtatttgctgaaatatgcatgtttttccatctcattaattcagtctacatacaattaatttttgcctattaataaaccccttggtgttagcgacagctatctaaaccacttcacctagtgtggaatgagcaagtgtacttgcaaatttccatccctggtctgcattttttagtgttgtatttgtgggttggagagtttgggtgcataaatcaagcattgtgaagaaatataactgccgaagactctgggttcagactggctgatgggaagtttgaaatacgaattagttccacattaattggggatagagggagatgcaggggggccatcccagcacgtggtagtcagggagggtctctggctatgggaaaatttgtcagccttgtatgtgcgtgagaccaactttctttttccacaaatacaaatcctctccaaattggacacttctcaaaagatatcttttctgtgtgttttcaaatctcataatttcttaaacatctaataaagtctgtgaatacacgtaagtgattgtgtatgtggtaactacaccagccaacagcattgaaaggaaaaaggaagaaaacacaaaaatcagaatggagccttgaagttgagatgagcaccacctagctcatttagagacatccacaggaaaggaggttccccaagacttttgttatgctccaaagccctgagacagatccatgtcacaaggacacctttctcatggttcaacatcaccagccaggaggaaatgcagaattctgtataaatgttaggaattcttagatttctcacctggatttgtaaaaattgcagttcatggcgagagacatccgggagatccaaatgccatcctcctagaacttgctggaggaaccagattctttctaagcgatttgcatcttgatgtgatgctacagttctatgacaggcccgagtagctgatgaaattctacgtgggaaaagcttttgagtgcctgtcctggtaaacctgtgacagtggcatcacataaaggtttccagaatgttctgtgaggagattgagccaatgtcgttggtcagcttaattggaagcaggtgattgaaagtcagataaacatgcaagatttgctgatttttaaatatgccatatgtgtcaaatgtatgaattgtgatgatggacaagaacactttcgcagctttaatgggagcatgtaatgacttgaacaagactgcttagttttggttactgatgatcaagtacagaatcttgctggtgtctccaaaacttcctgcctggcctgggcagctgtcctggctccctctggccagttctctgccaggcagccagtgtgaatctggaaggggctagtcctgtcttcccctccctgtctagtgcctttaacgtctccgctgagcctgccacctcctggcctcctcgaccctccacctccccgagccgtggaggtgagtcctagaccttcttctgtgggctcctctccccggggccctttcggctcagccccacttctcttattcacccacttgtgttctctgtagctaaatgatacataacaggaactcgttaagtagcttgtgcagtgaatgagttaatcctaggtgttttcagaacagtgaatttcaggttcctgactccgctttgagctcattcaaagaaagtcatgtaaataagacctaatcattgcaagaagtctaatgaagaaaccattcattatctctggagatgggcaggtacacctcacagaaagtgaagtctgttgctgatgaatagtctgcatgcccacatcttcctctgggtttctaagtaattgaataagaaacgtttctatttatattcttatttatgtgcaactgtatttaattattccctagttttgaggattggccaataaaccttttcttcccttttgccattgattattcttaagtttaagacaatgcccagtggcagatgtgcttaaccgccatccttcatctagttcatgtgactttttaatgtcaattataaagaaaattactcctttggcttcagaagtttatttaaatctcttctgagaaaattggcagctcttcggagttaatgtccagagcagcagaaacagaaactggagggcacagactggtggatatgtgaacagaagcactttttttaaacaaagttaaaaaaaaaatgttatgctattgctaataaattgagtcaggggaaagaaaaaaaaaagagatccctaaatcagcttccaagctgccattaagatgggcaagtaagataattccacataaataagaccagaggccttgtctctgtttttatttatgtatttattttattatttttttgagacagagtctcgctttgttgcccaggctggagtacagtggtgtgatctcctctcactgcaacctctgcctcccgggttcaagggattcccctaccttagcctcccaagtagctaggattacaggcgcccaccaccacatccgactaatttttgtatttttggtagaaatggggttttctgctgctctcaaactcctgacctcaagtgatccacccacctgggcctcccaaagtgctgggattatagacatgtgccaccgtgcccggcctgccagggctgtttttaaatgaggatttctccatttaaggaggtcacctgtcctggacggtatttcctaaatgcctggcataggtgacatcatgcgaacaagtgatggttcagaatacagaagtcatgagtttgaaggctgtgatagaggaaggccgggagagaagtgagaacagaacgtgcttgccctgggcctgcagctgttgccagcatcttctgtcagctgatctgggcagggcgtgggggttcttctcaggcctacctcctaagaacaaaaacatgactgaccacgagcctgtcctcaggatgcagcctccatccttggtgggcacagctgagagaggaagttctgagctgctttggggtagggctctgttgcactcaccctcccatctccttagtcgctgcaaccctgtgtcacaaatagtaggttctcagcaagtgtgctgaaccaaggggtaagaacaacgtttttatttttttatttaatttatttttattttttgtttttacatttattttttaatccatttggaatttttctttttgagatatatataatagggatgaacttttatttcatttttctagacaggtgtacagttaccttaggtacatatattgaattgttatgtctcaccaatgcaccacaacgtagcagtctctcatagcccgacgtatcacccaaagttctttgtctcacgaccaagaaagttaaggagcgccgacgccaagggtatcactggactgaaaatttaataagcaaaagaagaaagctctctggtgcacaggggggacccagaagagggttgctgtttttacagttgaatgcaaaggcttttataggaaactgatgagagctgggcatcttatttgcatacggtgcaaatctgtggtagctccaccccgtcctcctagtgcacacgtaggcccttagcttgagttactccatattgctttgtttcccttactgtgcatgtgtcaggggacaaaatttttcattgtgggcatgtctgggaaactcacatgtgtagccctttttttttttttttatactttaagttctagggtacatgtgcacaacgtgcaggtttgttacgtatgtatacatgtgccatgttggtgtgctgcacccattaactcatcacttacattaggtatatctcctaatgctatccctcccccagccccccaccccacaacaggccctggtgtgtgatgttccccttcctgtgtccaagtgttctcattgttcagttcccacctatgagtgagaacacatggtgtttggttttctgtccttgcaatagtttgctgagaatgatggtttccagcttcatccatgtccctataaaagacatgaactcatcattttttatggctgcatagtattccatggtgtatatgtgccacattttcttaatccagtctatcatggatggacatttggcttggtctttgctattgtgaatagtgccacagtaaacatacgtgtgcatgtgcctttatagcagcatgatttataatccttggggtatatgtccagtaatgggttggctgggccaaatggtatttctagttctagatccttgaggaatcgccacactgacttccacaatggttgaactagtttacagtcccaccaacagtattaaagtgttcctatttctccacatcctctccagcacctgttgtttcctggctttttaatgatcgccattctaactggtgtgagatggtatctcattgtggttttgatttgcatttctctgatggccagtgatggtgagcattttttcatgtgtctgttggctgcgtaaatgtcttcttttgagaagtctctgttcatatccttcacccactttttgatggtgttgtttgatttttttcttgtaaatgtgtttaaattctttgtagatcctggatattagccctttgtcagatgggtagattgcaaaaattttctcccattctgtaggtcgcctgttccctctgatggtagtttattttgatgtgcagaagctctttagtttaaagacttcatgtctaaaacaccaaaagcaatggcaacaaaagccaaaattgacaaatggtatctaattaaactaaagaacaacgtttttattctgtatcatcaaggagggaacccagcacgcctctatccttttaagagacacggcaagcatcagacctgagggacatcatcatttccttgcagctcagaatgcacttaagtgtcatgtagtgggttttctgtttatgggtttgttttttttttagaaaatgtgttcttttctatcttttgtttgtttttgagacagggtctcgctgtgtcacccaggctggatggagtacagtggcaagatctcagctcactgcaacctcagcctcctgggtagctgagactacaggtgtgcaccaccacgcccagctaatttttgtattttttgtagagatggggtttagccactttgcccaggtttgtctcaaattcctggactcaagttgtccacctgccccagcctccaaagtgctgggattacaggtgtgtgccactgcgcccagcccaaccctgtcctttgtttcttacaatattcaacagtcagtcacttctagctttcactttgtcccataaaaatatttcattgaaaattgcaagccatggcagtttgcagtgtttctaagctgaggagttcagctccacacccaacagagctccagcttctggtttgattcttagagataggagtgacttttttcaatcatgtacatcataattaggaggaaggcattcagtcttgaacatggggacaaaaaagtgctggagatagtagcttgagagttgcaaatatttattttgattctgactttaattcttaaaaatgtttgtcaagaagacagtggtgtgatggagcaggtccttcggttaccacaagcacacaccctttctctgtagtcttatagcttgttttcttggtcgattgtgccagctcttataaaaatattatgctcccaggcaaagggccatttctgttggaattgttgagaagattcttggcttaactcttgatccaactctgatcagcttggccaagactagacttgacaagtttgctctgaattgcctcatgctgctgtgtggggtttcaaatcattggcttcccagtgctttctgggctagaccaacaaaacaatgcctgggaaaagagagatgataggccgtgataaaactaaaactgcgtaatactggaattaactgagttggccatgtagatggcaagatattaaaattgagtccttgtgtgccaaagtcgtaaactcattcagataggccctaggtctgtgaatgtttgttgttgaatcctaggctctgggtggaaccgaaagctgaaaaacatgaaattccccctctgtcctttggatcttattcagacagtcatttcctagctatttcaagttttgatcaaaacagacacgcagtagaagcccagtctaaaacatcggtagtttatatcacatatttacttccatgtgtcttaagtggttaagttgtagaattatgtcttttagagaatggatgaagaagtctaggagtacaataggcaagagaatatagcaaagtagttatattttgtcaattttaaagtaaattctgaatcattttaagtatattcagtaacacccgtttgcccccaccttccttcctttgaggttttcacttattcactcattaataattcatcagtctttgctgtttgtggcatgagtatgtacaaaaggcactgcggcgtccattgctgtgagtaatatagagatgtccaaaggtgtggctttacctgtggaaaccacaggaccatacccagagcatttggaggtgccatatgctgcttaagggtggcacatggaggggaggctgggctgcacgcatgctggtcctgaggtgaccctctggccgcaggagagctggaaaggtgccagccgtgggtgccatgcacttgtctgaggccaggatggggagaccacattccaggtacagggataagaggaggaaagtcccaggagtgggaaggcctgggggaaaaggggagaaggtcagggggaggcaagttggccagatcggctggagcttgggattcagccaggacagagcctgagccccaggccagactgcagggctgtgcccagcactggatgcagagtttggatctgattctgagtatgtggtgatgactcggggaggcttgtgagcaggatggtgacaaccaggcaggattttaggaaggtttgtctggttttggcaggttctctggatgtgactggagtgtgaagaggccagtttagaggctctggaggttgttcagaagtggcaacaaaagggaatggaaataagagatgttgcaaagcagaaaccaactgacatggagtgcgggagaacttgaaggcagcagtgggaactgggagctgttcccggcgtggggagaaggctgacgttgatgttgcctaaggagttagaggtgatgaccaggttccaggtggctgatctggataggcagctgcatggggcaggagccccagtgtggcacagctgtgtctgtcccctgccggtcctcagaaagtgacacctaacactgtcccagtccacacagagccttgtccagtagtcagggtgaggtgagtggaagcaagaagaggagctggcaacaggacttgggagaggcggagagcacagcaggcagctgggcccagacgtcagccccaggcagtgtcctgaagcagcgtgtgcacctgggcagtgcaggcatcgcgagtaagaagagggtgttagctcggataactggggctcctgagcagccttcaagaggacaggttccttggggctgtgggtttcaaataacatcatggaggagggagcagagaggcttgaaaataaacggcggtggccggggggagcacaaagaagccaggcctggcagtggcacaggtgtcaggggtttcatgaaggaggggcccgggagtgtgcctgccacatggacactggagcgaaggtgcaccctgaggcagcccacagtgaggaattcaaacgcagcttcctgggctggatcctgcagggcctgagttctctgttccaggggcatcttcatctgaggatttggggtgtccgtgccctctcctggttgaaagtgttagaagccacgttggagaggccaccactcaggtgctaaagttaaagctctagagtttggtgcctgccacttagctgcatggccttgggagttattcactcctctgcactttggttttctcgttaatcaaactggaatccagatactcacctcctaccttgttatgggaactagacgtgggcggtgcacgtgggggcaccgagcacagtgcccagcacccagtgggtgctcaggggatggcagctgccatgatttttgggactgaatgctttgataccacccaaatatatggtctgaggtggttgtaaatagaattagcagaggagatgatacagactcagagttgaattagggtttgaagaagggcttaggtctggagcgttacaggtgggaggaccagcagagagtggtcaggaatcaggaatgacaggacacacctggggagcctgagcggcggcttccaggcagggaagaaaagctcggggcagtatgagtccagaccaggggcctatcaggcgccttctatgcagggtcaggtggtaaagaattatctcagccttagtgggctagaagatctctgtcatagctattcagctccgttgctttctgagtaaacaaatgggcgtggctgtgttccaatgaaactttatttacaaaaacagatggtgggccagtttggtatgtggaggcatgttgactatggacaccttgaaaatcccatgtggcaacagatatgagccaagtggtgacgtggaatgccccatcgttgagggatggggacgcaagggcagcgaggaggtcctgtgggtccgggtgtggcgtgggcccagcgtggccatggcatctggggcctcagctgcagggttgcagtggaaggaaggggaaagaagctcagagtgcattctgagggtcaaactggcctgtaagtgacaaactgaggtcacttcacatgtacatggagggagacaggctgtctttggagcagtgtccatgcaagcctgcctggagggagctgccaccctcagctgcagccccagacctcgcggttgctctcatccgtcgttcccagtgtgggcagtgacgcagcaccacggtaagttctgtagagtggacgccactcgctggcaaagcccagcagggcaaggaataagtgtcactcagtctttatccagaaaaatccaccaatgtacttttagtgcagtattaacacatggtagaaaatggaattgcctagaggattttaatctctgatggattattcttgtacctgtacctgtctgatggtcgtgtaagtccatgttaacaaacctgggaccacaggaaaggagaactgatgcgaatacaaacaggtggaggatttccaggcgtcagtggggtctgggagacttttccaagaagtgttttcattgcagttaacatttttaaagatgaatatctcactattataaaggtcaatgccacttctgtaatattaatttgcaattgaaaggtattttcttttaagaagtcccctttttcaagtttctcaaactggaattttcttgagcatctaagaatcctttcctttcaaaagatccccaagttaccccggtctaagctaagaagggttcagcgttggccggaagcataactctagctctccaaggccttgggctgcggcagggtttgcatgtccaggcagtaggtggaggcttctcttggtcagtgtgtctgctcagggggaggcctggctggggaagcgggtagcagtttgggaccagagcttaaaagagaaggagagaccggtgcggtggctcaggcctataatcccagcactttgggaggatggggcaggtagatcacaaggtcgggagttcgagaccagactgaccaacatggtgaaaccccatctttactaaagatacaaaaattagcagggtgtggtggcgcacgcctataataccagctactcaggaggctgaggcaggagaatcacttgaacccgagaggtggaggttgcagtgagccgacatcatgccgctgcactgcagcgtgggcgacagagtgagattccatctaaaaagaaaaaaaaaaaaagtgagactttgaaagtgatgacagtttccacagttcccatgggcaggtggctcagaatgaggtggcctgaggcccacagtctgtccttggggactgggtggcccccacgtccaggcagcagggagaggacgtgctggctgccaagatggggtgggagaagcccagggcatcaagtgccacggaaataaagctggttgccttagttgaatggcgcctttgagttcccagaagctcttctcagcgggaggctccctgtctttcacctctgctcttctgaggtaccagttgaagggtttggggggtgaaatcaaggcatagggctcctggcaacactacccctggctccggggtttgcatgccggggcttcttccttgtcctggctgtcagagaacacctggaaataaatgctgcattgttttgctggaaaatcctgacaccacctcctgccttcccctgggagggctgagacctggcctaggcatggagcttacggtccacagacctgcctgcctgcagcatgacagcctcccagagggctgtattgatttttgaagaggaggaaaaaggcatacaaaattggacttgccagccttctttgagtagaaattggtgcttcctaaagggaatcttaattggctagcttcgaagctaaaatgttttctcccccttcccttctcagaactctccagcccccctgtttgttcttgtgagacttttccaagccccagttacttttctttcctgctttggaacataattggattcttcgctgggtagagttttgcttggaagacctgagggtgtagctgaaccaagtttgagcaccctggaaggaagacagaagatgccgggagaccagccagctcaaaggagaaagggagggggacagcatctgaactctggcctccagcatgatttcatcctttaaactgaaaaccctgagtttcagtgccagcgacgacacttgttgaaaaagtacaaatgttttctgcttcttgtaatctacttcttgcaaatattagtactctggaaaaaagatttattttaataatgtgagtttcagatttttttctgtagttaacgttgttttattactctatatccttgccagaaagcgtgttttaagagtttcaattcaaaattaaatatgacctcagtgttttaaaatacaattatattaactgtccatttaatagttgctgaggatttttttggccactgatggatagtcaagatacttgtctgagattaaatgcagtattctcaactctgctaaccagctaacttgttccagctgcagcaatcaacaggaaaaacaagggctttctatgaagtgagctggagaaagttgttcccggataaaattgcagtactattctataagctgtgcttttcttttaaaaactccactgtgtttcataatagggaactatctattatttatttagaactgtacaaaccaatttacaagacaggtaatttagtgacagaattatttattaatgagcccaagtatacaagttaatgggaccgagccccgtggaggtcaatcctcatataatccatgccttttggaaagaaaagtattgtcttcagaacatttagttatgattgttaaatttaaattacgatatattctcttgctaagacaaaaaataattttttctgaattgcatgatgacagagttagtctgtaagctgtgtggagatgaattgtgtcaattaggggtaggtacatcttagccctgttggtaccaaaagtattatttctcattgcatgggctcacaggagaaagcaagcctgttctttaatagagacgacaaatcagaaaccgctgcctgcctgggagatggaacagtcgtgcaggcgaggagctcagagggcgggcgtggcttcccaagctctggcacagcctgcaggccttatcaggtgctctgcttctggggtactcggcactttgctcttccggtggatgggggaggggcgggctgttccatgtgacagcatgtgggcttgtcatgattcggggtgaccactggcttccatttcccaggagtggctttgtcctcgcggtcttacggtatgtttccagtagatgagaaggcatgcctacagacagggcctgctggtgtctgctgtgtgtcatggggggaggcaaggttttcctcactgggacctcttcactccccctttattaatgaccccctggctcctccccagaggcccagaagcctagaggagaaatgagggtacagcatagatgccttagtgtaacgagtggggctgctggaactcaacagactatttacagttacagcatgaaggtggtgcttgaaggatttgctgcttcgtttcatttttctcatttcatctcatcatgaagtcgattgcattatatcagggggtggggaatggaacagacacagaggagaacccaccaagttctgtgtcttcaaacctgcagcatttccaggttccgactgcagagtcctatcaaagtaagcaaaattggaagtgatgcccatttcctgggctttcacaaactttgttattctgcagtctaccacaaaatctgaaaaggcagagaaatgtagctttcactgtttagaaaatctttgtgagtttttcttccccctagggaatggttttcagcacattattcattggaaaaatgaaatctgaaatgtaggtgtattttcagtgcacgtgctccggaggagcctcagcacccttgtgtcttgtctacccattcgctcagtgggcagggattgagcactgggaatgtgctgggtcggagccgagggctggaggcagagttgggaccagccccaggatggtgcctggctgtttgtcccagggctcactggaacagccctcctgggcagcccttggttggacttctttacgcagcccagtccacacctcacctgtgcattcgtcaagccattgagtgcagtgttgtggcctgaatcactccaggccttgctttggagggttgacagtaggggacacggcaggccgggggcattctgggacccaggtctcctgcctatgtggaatactgatgtgtgttgtgtggacaggtcactgatgtgtttaaatgtaaatctgaccttcctttaagagcaattgggcagcagtctgggagcttgagactgtatgatgtggacacctagtatctctttctggaagcttctagtgtataatagaaagtaggttggttactcattcccattgtctttgaataatggggcagtgggcctggattgttgtcctgtggattggggaagagatcatagagatcatagaagtaaccttagagtaaaagaaagtaaatcaaaatgctattctatgtagaatatatgccatcaagggcagagcatgtgggcgtgtggacttgtcatgatgaggagtgaccactggcttccatttcaaagaggagagctggagtgcttctattccacggagatgccccagactaaggtctttggagtcaggctttcattccattcctgggtctgtcccttatgcgtttggtaagttgttattacataacctccggacctcagtttcctgttttagaaatagagataatggtacctcccccaagggtctttgggaggaataaatagaacagcttataatggaatgcctggcacatgttaggcactcagtaaatagcagctgtgcagtgttgtgcgagagcttacatcgagctgttttcccagagtgcattgatcctcaaccgtgttcatgtacccctgcccaaggtgccatattgtgtaatggagatgtgacgtcgaggcgccatgttgcctggaacttctggagtcagccaccttgcctgtggctgaccttggctgtgttcctgagagagtgaggatgtgaaattgcatgacacaaagtcggtcatcttgtgcccgtctcatctactctcactggtggttcagttcttctctgcccctaaattcttacatcccagagcaggttcttggttgagacacaggtgcttgcctcaggtttccttggaaaactccagtggcaccaagcggtcagtagcctgtagcggccacttgcactgttgtccccttttgtggacgtggacgttgactctccatgtctggtctgtgcaggaaagagtgagtcctctctttctcactccagagcctgcaggggtacccaccctcagccgggcagggcaagccaggacagaggctttgagggcatctgaggaggaaactgcaaggtgtgcagtttggcccagcagagagagaccagaatgcagagggtactcagggcaggcggttgctactctgggctgtgtgcgtcatagcgtttgcatgacagacaccagcggttgaccagatgccccatttgaagcccatgtccaggcatgcagtgttgatctctgtgtatagatcgacgtggcttcttctctagggctggggaagagaactgtttaataatgcacagttgcctagcctcaaagatcctttgagaaatagctactctgtgcaagttttcaacaatttgtttagactaatggaatgactctttaaaagtttatatctttacagatatacaagcactttatttctaagcaactaatttaagctgggaaagaagaacgtgccctcatgtgtgtgtaaaacgttagaaagcagctctgttcactgccgtggtggtggaaggcatgtgcaacacagacataaggctatttgaactctttatttgccacatttacaatattaataatagcgtttctagaagttgtcacatcaagtaaaagatcttcattccaggctgtctttaggggccaaattgagactggatgcatgcatttaataaattgtagtctcacgtagtcatttttgtaaataattagtttcagtgaaagaataagttagcatattgtatgcatctaatgttgcaaatgtacatacagcaaactttgctattaatcaacagtcaggcaccgcaagtggggtctcatacataatgaattgtgcttaagcctcatgggcttcttgatagaaaaataaaagaaaacacaagtgcagtaagcttttgaataaaatttaactagattgctctgcatcctgtaattgttttggaatctttagggacctgatcattcatctatagttttggggtgtttttatcttcatctgtcaaatagtagagacttttaatgatatgttaaaatgttgataaaatacaattttccttttaatgatttgaacatttggaggggggaggtaaataggctttttaaggctttctgatctgccaagtatactatttgggttgtcttttaaaaatattttcattatttcctgtatttttaagaatcaattatttttaaaaagaaaaatatatatagtccttatggggaagagttgaaaatttacataaagtgttctctgtatttttggtgggtgttttaaaatactatggtaaatacctttgcagttttgtttaggatctgacattaatttgagccccagatattgagggcatagcgtgccggttaaaaatcggtatccagttttagcaagatacctacgaccacccagaaagtaacttggaacctaacttaattttaaatggcctctttctcctcttcacattattgacattagtacatgaacccgttggtggcctataataggatcataaacataggattcattttgggatggggttgaaggcataaaagcaaggagtgagatttatgtccacctttattatgaaccacacagtaaaagtgcagtaaagatctgctgacttgacagccagagctcctcacagccctcctgcaagcactcatggaacccgtccttctccaggaagacctcctgtttacttctgcgctaggaatgggctgtgctcatcacttacttccctgtcttatatgatgtccttttgtacagaatgcatctttaaaataggccctacaactaaacacataacagtcaatcagtagactcacctgtgataagtgggaggccctcttgtaccagaaagttttaaaaaaaaaatacattactcatacctgtcattgtttgttacgtaaacttaagcatatttttgatgttttgtgcgtgtttattcacttcttcctttcatagttgaacacatcttgttcttgaggttgcgttggaaatcagtagggtggcgcatgaatcactgagaacagcccacggtgtgtggtcagtgccatcgtcatcatcgtcatcagcaacggcagctcaagaccagcaaggccgcggttgtgtctgtcatgagcccgttggcatgccgtttgttttttatctttgccacagttgcactgttgagatccatgtttcctattactaacatcagcacttttaattttccgtttctactcagtttcctaaaagaactatagaatattcaaataattgcatgcgctttgtcaaacgtacatggtcatagtgcccaaacagttgctggccaccacgcagagccacggagcagtcactgccatgttccttcgcagcctcctcggggcctccatgaaacatcggggccaatggaaggcggaagtgctgtttctgatgttgacctgtgtgtttgaccctcaccttcccttcctgcgcagtcggctgtcaactccagaggaagggacagccctgagtcagtattctcaccactaaccgcatgcatttcagatcctcagtaaatgattgaatgaaattaagccactgcatttgtctgaaatacagagtcaaaaggttttattcagcctcctgtttaaaataaaatgatctttattaagagcaggtagcatagtttatttcttttcttcagtcttacccctgaaagaaaacatctgagctttagcaggaagttataattaaatgcaggacaaatccatcaaacacaagacactctgctagagatctctaaatgggacataattgtgcatttaccagtgatatttagcaagagtctccatgcagcgtggataatctttggctgaaggcatgttccttcctacatgagccccggagtctgctgctctgcccttcagtcccgaagcctctcctggccctccacaccaggttctggaagccagaggaggtggggtgctcactagctgggtttggaaaatgttgctcatcacctgagcatctgaagtgctgtgtgtggcgaggccactaaaagcttttcagatccccaccagtttccgtgcaacctccttcacagcctcatggaagccttgcgtccaagctcggcaccttgccagattccagaggaactcagaggagcacctgtctttggaacgaactctttccttgggtgaccctccagggtggtcaggtagcattcccagaccataagatgaaaacgtcgtccatggagagagagaggaggtgttcgggtcacaggagaggcagagggtacacagcactccccatctggagtgtcccacggtcagcccgatggtgcctcagatgtgagtaacttatgaaggactcttggccgattttcttaaatcaaacaggattcaagccaagtacatcgtgtgttaatgtctctggggagtagaattcattcagaaatggacatttagtgattctctactgccagtggaatcttaaggcacccaaaaatctgaatacccaaatctcccagctggctggtcaagttttagaatgttgagcactctaaactgggaagagcctggtagccgtggtaccaggaacactcactcttcctgcttgctgctttcctcatgctgagctgggctgagatcaagactcctggggcacttgcttcctctaccctttgtctgtggccaggtgggattcccacacagtcaaaggaagcccgtgtccaacaggggccatttcccttaaatttctctcatcacccccagctctgctgtgcctcaggtgggccgctgccactcttccttcacgttcttgataatatcagtgtcttgaaaggaagcttcttgcaggtagggaggacgcttttccctggaatagctgctgtgctcatatgagtttgtgctggaacattctaaccacctttctgtgccctggtttgggttgaagggaaggcgatttaaatcaaaataaatctgcaaggcagttcatcactgggacattgtttttccaagccggggaaggcgaatgggttagggcagcttcccacagacggcaactccgggagaatatcaccggggccttccagtctgccgcagccccgggagcttctacccagggcaggtcagtgttgtccggtttgattttaaggaacccctggcattgccaacagttgtgtttttcttaaagaaatccttgagccaggtccacatggctctagctttgctgtgttaaggtgcccgacgccctgttgtcacatgtacacacgcccagcaaagctgggctgcttcacccaccagccaccatcctctcgtgccaagtcaaagaaagtgaaagccaccagtgtcatgatatttgcctcgggattattctgtgggtgacacgtgatgtcctaggagaggcctaggggaggtgcgactctgatgggctctgagtgtttccccaccaatgctgggagagggtcttgtctcctgctgggttcaagggatgggataggaaggggctgaggtgccaggcaaaagtcttgtctcctgcagggtttgagggatgggacaggaaggggctgaggtaccaggtgagggtcttgtctcctgcactggctcctgctggcatcatgagctggcatccgtggcagcccccggagctgcaggatttgggcttccgagcaaaggtgctcccccggcaaggatggggcggaccacagggccggcatttcagtggtgggtgagttgcagggcccctggggaagactgggacgtggcatttccatgagcgtgggctacggagcccgtaattgttagtgtttcagggtttgccagtggggaagcttgaggaactcccccgtgataagcgccgccgtgagagaggccatcaccccagctcttcttccagggccgagcgcggcagggaaggaggagagggcagggcaggagaataaatttcattttactgtagaaatggaaatttgtgtcatggctttaaaaatctggttttatgtgtgtgtttaatgccattcattttaaatgtagtatcataaatcattgcttcagaatcaaagctgtttaattacatttcacccatgaatagttatctaatgccaatagagaaagagttaaaaaggagaactacagagtaaatcagaggttgagatcttcagcacaagcataaaaaatcaatttaagatgaattttactactataaaaattcttcaaatatccctttaagagtgggaactgctaggaaagccagctcacatttcaattccctcagcagcatgagagaaggacgcccgcgtgggcagaggcttggtgtgcaccccgttttgctcaggggtgatgaaggaatcctaactctggagtctgagcagttgctgggggcacagaacctcccagctctcgtggtagaatgccccctctcccacagtgtaccctcgcttccctgagaaaccccatctgcggggtgtgatggccagccagaccccgctagtcctgaagactaaccctgaccttgaggtgcatgcctcgccaaccaatcccacatcccagtcttacccggggaccgtacaactcacccaccactgaaacggcagcccctgtgctccactccatcctcgccgggggggcacctttgcttcggagcccaaatcctgcagccccaggtgccaccacggacgccagctcatgacaccagcagaggtagtgcaggagacaagaccctcacccagcgcctcagccccttcctgtcccatccctcgaaccctgaaggagatgtcagctgagctcttgctgcaggaggtgccaggcccaggtggcttgatcaggggttttgtttcctcagttgaaggtcggggcacatgggccccatcacgcttgctcttcctgtctgggcagtggtggttgacagcagccagctctgcatcactcaggagggagccggggctaaccctcactgcacagggcttccacccctctgttcggccgccttccccagggatcaggacagcaaagtacattacatatttctccatcgttcttcttagatagcatcagtacactgtttattcggttagcaaagagcagagcaagaattgaatgactgaaggtgtgtctctgaaattgaataatatttaagccaagcagaagttctcctttccgtggccagacctcactaacggggaaggaaattgggcagtgaaaagacagcactcccatgccctaaggaaactctgagagaggccacttcgttgcctgctcggcaggcccattctctgcctgcagagtgagcccggcttcccccagggcctctttgtgacgggaccgacaagggtttccaggcagtggcttgggctgtggagacctcagcctgtgtattaagggtactgggctgaatgagggcactgtctgcgtgagttcccttgggcagggatctgggtaaggcggcagtttggagaagaccggggcatgttctgtctggccgcagtgtccacggggtcagcgtaatttagccggctctgctgggcttggttcacaggtccgactgctggtcacagttatccgtggctgtcggtcatcctagtgagcttccttctttttcccttcattctctggctccttccttaaaaccgtcaggatttgtgtgcttggaaacctctgaccaccctcctgctccaccgtgaaaaacagtgtatgggggcccctatgtgcatctcacccaaaaaggtccatttttagaaagacccgaggatctcggcagagacttttacacccacaaaatgctccagcccagagacccagcctccagcacaggacagcgtgtgagactggcccgaggtcttccgtcgccgcccctgctgtcggatgacatgcacatttctgcacctgcaggacctcaaagcgaagtaaccctggacacacccttcactgggtctctttcccccacatctcccccaacaatggaaggcaagcaccgctccacacgaaaataacaacacgggtgcagttctgtgcctctccttagcttctccctgccgccccgtgggcttggtcatggtgtcaccacgcactgtagatgtcgcagacgcaggcccatggccgtgtgtgcccctgggcatgtctgctgtcttctggggaaatggaaacgccaccataggcatttactcaggcagaagctccagaactttagatcccagctttgccgtttttaattgtctcttgttaaaatgtgagtatcccagatggaatgcaaaagaggttcgtgctgctgaggccctggtttcttttctgaatggatgtgccagggtatttccgcccacagtacactttaagccaaagtaatttgtatcatctttaacacaaacccaaaacacgaaaggctgtgtttgtttaactagacgtgtaagctatagttatctttatttccgctttaactgcataagagaggaaacctttttaactataaggaaggtgttcggcttccttttatctcttgcctcattatgtacttttgactttattcagatttgtacaagcttggtttttacctcacaggaaaagcgagaactaatcgctccagagatcatctgagctctttgtgtgaaggtgttttaagaagttgtgactacatcttcttttctaaaacagcctccaattctgtgatacaaagtgaaatgccagttgtttgcagctccggggctgtggtcctcctggacaccagcggtagcaacaggccccatccacacagggctggggagacaggtccccttctgcacggggcccaggagacaggccctcattcatacaaggccagggagaccagcagaatcagcacggggccagggcaacagccccatccacacagggccgggcagacaggctgaatccgcacagagctggggttggagctgagagtcatccctgaccccagcttcatggtcctccagctcttccctgcaccattgccatgttcttactgctgcagccctgcgtcagggcagctgcggtgccttctgcctcttgccaggggcccccagcccccaccagtcacactgtgggccgcactcataggacaaagtgcccttcccgccctgacacgcacagtccttgcccacctttctgtgagtctcagtccccgaggcctccactctgcgtctacgttcacactgtctgtcctacgtccgggatggctctgttgcctcctctccatggactggccgtgcataccttgtgtggacagagttgggacggtgctcccggctgcatcggccgcctgtgctgggccacatgtccaggcaagtgaagccttcactgggaccctcccagagcagcatgggtgtgtcgaggagaaacattctgtagatctcagcgcacgccccccaaggcagcccaggaaggaagggtgaagggcccgcgggagctgtgcgtccacagcatccacagtgcagtgacgtttcccaccttttcacagaagcctgaggagcagcactgtctgcagaaggaaactagaaaacttccgtgctccaagcctgggaagtcccggggaagcatgccgtttgtctggggcctcgagaggcagggaaggaaggaagggagtcacctgaagaaatcggacccagggccagggcttcccacgggggtccacagcacttgaaatcacaacgggatgtgtcatgcactccacagccccaggtggcagcgggagacctccccttcagggccatgtcctcagtccgtggaacacagccccagaaaatccacccctgctggagatggggaatcctttccatgagggcccaccaggtcgaagccacagatgaatgaacaccccaaacagaagcagccacaaaacagtctgaagcgactcccagaggtacaggttcaaactgcaggaaatcaaagggaggagagtgtccagaaagaaccaagagggccgcgcagtagctcacacctttaatcccagcagtttggggggcccacgcgggcggatcacctgaggtcaggagttcgagaccagcctggccaacgtgatgaagccaacatggagaaaccccatctctactaaagatacaaaaagttagctggccgtggtggcagtcgcctgtaatcccagctactagggaagatgaggcagaagaatcacttgaacccgggatatggaggttgcagtgagccaagatcgagccattgtactccagccacggcaacaagagcaaaactccgtctcaaaacaaacaaacaaacaccaggaaggtttgagaaagaaccaagtagacacaggcacacgaggcacagggctgcccccgagaggacagactcaccgatgaaggaaacacagagtaggccctctggagcgtgggaatcaggggactgcaggtaaaccctgaggaatcccctgaacacagcacacggccatggaggaggcagaacgcgtggatgtggccttgcgttgttggactcggggtggggtgggccgtgtggtgcagtctaatgactgtgtcgatatttctgggaactgttttcaatagtgagtgcttgatgatttaggtgcagccgtgccatctgtaagtcttacaaagggacactgtcacttgggttgccttgcgctgtgatgcagactctcagaacacacgtcctgggaggcctgaaggtggagagtggttgcggggcctcggtgcgtccttgcctcaccagtccccctttctgctgcacagctagttgagacgtgtgtgcccatgaagcagccacaggtgtttgcccgtttagatgcagtaggtgtttgcttttccgatgtgtggaggcagggcccagaggtttactaagcccctgttctcacttttgcagtgccgtggaggtcccagcccccgctgcggttctcggaggtccggagcccctgatgcagtgcacagcctggctgaatgcctatttccaccagcccgaggctatcgaagagttccccgtgccggctcttcaccatcccgttttccagcaaggtcggtaactaagccatctgcggtgtttcctttggggagcttgacttattaacgatcgctgacatcacagttcattttattgagtataccaacttggtatttttacatcagctaaacagaggcagcgtttggccgagctggagggacgggggttcgccgcctccacccactccaacacttgtgttagttttggcacagggttgcataattcttggcaaaggcaataaaaatgaagcatgcagatcgactcttgactctcgctggctgaaaggtttaaataggaacacatctgaatggcagtaaatttttcaataagcttattgtgaacttcaactatctgcttgccaacagcacagaaaacgagacttgtgcgtggacatttagctatttccatacactctgttggtgacacttacatcatagcaggtagcagcattggagcttctcaaataattttacatttaatttctcaaacgtaccagagttagacatattctttcttaagagatgacttgagaacttacctgtatgtagcctgcttaaggcttgtgataatctaaaacatttcccagacatttcttttaaagcttgtgtttggctctgctcaatacagaaattaattacagcaactaaaatcattccagacacatgccagaaatttattttgcatagtgagtttttcataatcatttttgtgtataaatgaacatatattcatatatgatgtatatatggagttgtacacttatatatccttaaagggaaaaattaccttgagattttagatgtggtgaatttaaagcaattttgaatttcagatcagatttgctgggtaagcttaacagtattctaattgctgcggtgcttctcagcacaaaacaaacttgaaaatggagagaacttttcaagggaagcaggtaaagaaacccctgaaggttgggctaatacctgagttcactaaccaagtcagacaggcgaacatatgaagtcatgagcacgttttgtgcataatgaactgaagctgtgcagctataatgaaccaggcaccttgctgtcctctgaatcatacagaactgtctccagaagggttcagtggggatctctaggatgggcagataggaagctagagtgggtgggcctttacatggaaccacaaacgtccaagaaacctctcatcatctctgcccaccaatgggctgctgccaggacaaaggcactaccaaagcctcctgggctgccgccagctgggggccacctctccccagcgccacaagccagtgagccaattagacggtgtgggggaccttgctcactgtgcacctgatgggccgggcacagggcaggatgttgctgaatggcccaaggaagtcagagattggttttgtttattaaagttggggcttggggatcttagagtggtgaactcttctctatacgatctctttttgggggttcgcctgccaggaggagcaaggctgaagagctgtccagaggcttttcttctccttaagcctgtgaaatatgtgagctgaaatgtaaggtctcaggacagaaaagttctcttacaaaaccagggcaggaggtatctgcataatcatatggaggctgggagaatgagcctgcaaacccctgaagtttacctaaggtttgttgggcaacttcatgaaaaacataggggcaaaagttccatgaaaatcgttagttttctccaagtcatatggtggccctggccatggagctagaccctgctggcctggtctcaccagggtccagagagtggtgtgctctcaggcaggccaggaagaaccggaggaggaggcctccgcagctgctgacaggagctccagggcaggagtggccagcaaggaaggtggcaccggaaataatcagacactctccaaaccacccctgcaagcactgaacccccgctgagccttttccccctcacttctgcccatggcagtgtttgctgctcctagagccgaggacaggcgggcccctggggcttctcagtcaagtccctagtgcttaagcagagttgggattggccacacctacccctgcctccctggctttcagcccacgccaggccaggctgcttcctgggctggcaggtcatgataggtcttggtgaccaggaagacctcagagtagccgccaggatactggtaaaggctgtctggctcccccgtggccctgcccctcttggaaagccctacagtgcgggtggatacctctagctgggacgaggtccactccagccaagttttgggatggtagtgcgacagccgctcacatccttctctcttggtgttctagaactctgaggctggctgcagacccagggtgctgagctcagggccttctctcgagggtaggggctggagtcccctgggccaggcctgcctgcggatggttagtggttgctgtgggggctgggattccccaccacagcatgtgtaagccaggtttttaacatttagctcaatcgtttactcctgggcaggggccaggtgtatggattttactgtttgaagaaggggaggtggatggtggatggttgctaacagggagttaattggttctcccagatgtggatacgcccctctctgtctggcatgagtttggtttgctctctgtccaggttgttatcttgtaacatcagtgaaatcaacagtgagggggcaggtcttctagaggaaaagtcttttgacatctcagagccgcctggaagctgtggagtaacagaaatcaacctgctttgcagactgagaggagcgggtccattgtaacatggaatgaacatttccttgaccaattcctttttctgcacattttaatttctgtatatgtttaacatacttttgcatatcatttttcaccatagtctcacttctgagattgagaccaggtttatctatttcaacctggtttgtctatgtcaacatttttaaaaatgtgattgtatttgagctcatccttgagttccagcacattgaccatttctttctgaaggcctggctggtaaaacttctgactgcgcagtaccaagccctcatcccttcctcaggcctgtcctgctgctgaaagaccctctctcctgcacacggcctcttcgcggtaccacctcaccttccaggattcctctctggaacgaacatgctgtttgtgatttgctttttaaggctaaccacaaaaatatgcattacgttgaaccatatgaaattgctattttttaggttaaaacttatcaaataccagaaatttcagatggttcaacttcttatcttggggaatttccaaagacaggttagtagctaggtagctgttgaagtatttctgccaagggacagtgaagctgcctttcccgaccgggtgtccggaggtccccggggctgcctcattgtgaggttgggacaggtgggatttcccagtgggagggcgctgaggctctggaaggaagcctcattgttctgctgaagggattaagaggaaagctgagctgtccagtgaagcatattctaatttctcgttcaagtgttgttttagtcaggtcatttcctaaaataaaattagtcaaagttttcttggtttggggttttttggcttttttggtttgctattctggtttttttaaagtgtcaacaaaatccattttctagctactgtgtgaccgagggctagcatcttgtcgtacaacgtagctttttaaggaggtaattttttcccataagcctctcgcaagggtcagctttgtatttatttctaattcatttttcctcaagaaatacttatttaatgaagccattatttttgaaatacatttttacttttttcttttataatgaaatatcatttaaactttgaacactccctgatttcttagtgtttatttatgaaaatgtttagcttctttatataatgtgccttctggagaagctgtaggggtcagcagccaatgcagctacaagaaatcctttctaccttagtttgccaaaagcagctttttacaatgagttcaagaaaagcagacctacggaaagcgaggatggactttcagatacagaacccatctgggcacgtcctcaggtccctgagccctcccacccatggaaaccctgccagcaggtatggctgaccccaggctgctgagggaggtcctgccaaggcaggaccaggccttggggctgcccacgcgagactgtggggagcctagctgggaccccagccttctcacagttgaaggtgttcaacggacgagttctgagttttctttgtaaagtgactgcaatgttcccttttaaatgaaatatttaacactttaataattccttcgtcacagctattggcttacagctatgaaatccagttgcatgacagcagtaaaatctcccttttttaacacctgctggtagaagtaagtttttgtaacttctattatagagcctcagaaaggattcatatttttgtatttttgtgtctccatcgaattcctcatttcaaaagcgcctctaacaaaagccctgccccagagttaagggaaagggccttcagggtgaattcgttaaggttcccaccgtgtcctggaagatgggccctctttgctggtgcttctagtgaggactgcttgggtcctggaaggggcatgtcccgggagaggatgacgagggaggagaggagaagagagtggcgtcattacttgggtcctcaccggagccagccctttaagattagaaatccttcttgaagagccaagcaaaggctcatccagccccctacaaccccatcctgctgcctactcacatccaggaaagagcccacccctgatgggtgcccaagtagatggcctcccctggaaagaggcatattagccctcctcacccgagggtcctagggcccgtttgggtgttcttaaaatgtgccttataagtcgtgatccagcctgagtttttctacagagacactgcagccaagaggggatgtttttcttgtagcttccacatagatcacggcagcacgcaggctttgtcctttcagcactttgtaccgatattttccctgaacttaagaaaaaaattaccaattgaaagagaagagaatagctaaaataggagatgcatttgccaccacgtgtgggtggccaccgctgttccccttgattttaaacgagggctcataaatattgttgaccttgctgagatattacctggtggagctggaaggtttgtaaaccttcttccgatgcccgtttattgattagaacaagctaacaacactgcacttaagtggaaaaaacagctggtaaaaatgtaattctttcagccttagggctgctgtgctccttttctggagagcaaatgtggaaatcaagatctgtggccttctggaaccttcaccaggaaaggtgaaaagaagaagaacccatccacagctgagagtggatggcaggcccgcgggtttccaggtggccagtaggattgtccgatgtctggaatgagtaccggggccgccaccaggaacacttgtcatttctaccatggagaggaaagcccagtgcatttctgtggttcagaaacttgacacaaagagaaaagctggaatgtttaaaagcaaaaatagggcagagatcagtgaaagtgcaggatgtgtgtgaaacaagggtagagtgagcactggtggggatggaggtggtgaggggtcttctgagctggggacgtttacttacaccagccctgcctcccaagaacccatcccctgtgggtccagaagaccagatccccgccaatgtccttccctttcagagctgtctggaggagcatgccactagttcccagggtctcatctgccggcacacggcctgactttcatgggaagtccccattgatgctgttcccttcccagtgagtgggctcccgtcacccgtcctggctcatttgaatacctgcatcacctccagcccctcagcagaacaagaatgtcagataatccagaatgctgttgagagctgctccaggttgggggctcgcagccccagcatccaaaagcctggtttcagcagggcatgcccgcagagcccctaggcgccccgagctctcctggtttgcccgggctttgcctgcacgggctggccccgtggactgcctggccaggccagcccagtaacagcgaagcacaccactctcagctcctgagcttggctgaccagctatactctggcatattggtgaatttcatgggccaaagaacctgaggttcagattgtgtcttagttcattgtttcatatttgaatatgcagtttcctacctagcaattgtcatgagtactttcttgctgtttatactatgaacaacatcttgggctaggagagagtttttaaagtttcaacaatgattcattcaagcactttcctttttcaagttactcatatctcagttcattcaatggggttgggggatttatatcagaatcctctagacatttcatttataatattctacctataaatttttatacttcttacccctcctcaagatacactaaaaccttagcatgggcacacgcacacacataccctgtttctgagaattattgttctaaaggaatttatcaaaatggatgtagctcctatgaatgcttttgctgtgtgctttaccctctactaagcctaacattcctaatttaatagctatttttgtttgagacttaaaaactgtgcgcattgaaggaatgttttgccgttgaggaaatgccagcccctctcctaggaaaggggtgctcggctcctggtccactggcagtggctggaacagaaccacagcctgctgaatcccaggaaattcatgatgtccctgtgcagagccctctgactaatcagcgatcccacaatgcctgtagcagaagcatagttaggtgagagttttatcctgaatgtaagaggtggccaggtccttagttccctgaggttccgtgagtcgggggtaaaggaagcagccctcacacagagtaatttaccaagcctgagagggaaccaagaggactgtttgagagtcagccacttccaaaccttggtggacataacgagggtctctactacaataagcaggacttgtaatatgtaaaattattatgagtgctgcttttatgggaaaatattcacattaaaatataatttaactctggtgaagtaattaaacagtaaatcagtgatggcttctattaaaaattaagtcatcgtaattatgtgaatgcctttagaaggattttccgcagtgtcctggcgttggccttgagtggacttctcaaaaagtagaagtaaccaggtttctgcctgtgaggaaatgtaaattgcatcattgcttcctttaataaattttcattttaaatgggctttgaaaaataggaattttctctctgttttaaagtaaaaaacacacttttcacttaaatatgtttctaaatttctatttccactgtagtcattagctggacatgtgccgctccaaaagagaatgttaaccttcgtctcttttgtcgtcataaatgcacattcatgttttacaggtaatgttcgtgcatttgaaataattccagcaataataagtagaattatctccactacctgtgtttatagagaaaatgatgttttaataacgtgtgcatagaattggactatgttatcaatacgttaaatgtgtaaatattagtataaaattaatagtgataatgctgaaaaactattgcaggagctgaaagtgtaagaactatgacttaatgtaaatgctttcacacatacggtttttgcctgcaatccttatgttcaggctgactcggaatataagattcatgagtctctgtccctctttatatgttgtttcatgtgtcagaatggaaaaagcaaatatttacgtagagggaactcctccctcctgttggaggtacgcggcggtcagtgtagcttctgaggccgcgtggagatgggaacatcctcaagacagagcagacttcctggaggctcagccggaacgtctccagctctgtagcacgttttaattccatacaagaagttactcccaaagaagtaaattgaagaacgaaatcgaggaaaagaaagtccttttttgaaagctcttaaacacttgactccgtttagttcggatcaggccttctctgcccttccaaagattcaggttaggtattggtaacgcccaggaagcacccactctggcgagcccaccctctccgccagtaaatatatacagtgtagctgttactatgacaacgacttttttttcttgagtactgtttttaattgttgcacaaacacatattgtgtaagaaaggggaattgtccatagtcttccacgtgtggatgtgtgtgcccacactgtctgctttctttaaaaatgcacattcctttctggattgggctccgcgatcccccgcctgccaagcaacctgattttctcttcagcctttcctcacttagatggttttagtaagacctagcaaccgagctcaagagacacgtcaggacttactgcttgcccaagacatatacttttcatagaaaattcgcgtctcttcctcttttcagaataaaatatgcaagaaccaacagaaatggcacattcccctgcttttccccaagaattgggcctttgatgttcaagagcagctgatattaaaggctatccctagaaggctgtagaaactgtacctatttatgacaaatgtaaaacagcacaaatctagctgaatgtgatggtatcattagtttgtgaatcgcatccttgaaaataactgtgaaggagccaaatcggtttaaaagaagataacaaaatggtttaagctacttaggttgaatgccaattatattttaatattcaactgagcatattttactaagaaaaaaggccgcattgacgcatgcataactcattggcagcgtcggccagctgtgccgctccactctccgaatcactttgtgcattttagtagcatggtaatttagtagaggactacctgagtgatggcattttcaatgagcaggtaatctacagagaatttttatatggttatgagttctgtgcttcagcccggcaacacaaaaatacatcaagaccaattacggtatcaactttcagtgtgatacccttgccacgcaagtgcatgtatttctgccccaggcatttcaaattgcatctaatttgaaatctttggggttttaattaaatttcagaatatatggaattcttcattagtacctgctctgaatagcagatcatccttctcccagtctctcgttaaagaagtaggctgtggtaaatagcgtgttcagtagctgatcatttgtgggacctgggtattggaacagaaatagtgaaatgcaaaataatatcaaaaagattattagtccagggagagtctcttgatttgtattttaatggaattttacatttctcttaatgatttgcaaattgtcctctgattataagatgcattaagcttttcattttaatggcaaagacacagccattagcagaatttttttttctgtcttctttttagagtgcttccctgcagcagataaatattgaaaccattaacaccttttgatgtatggtacagtctgcatcttagacccacacatggctggccggctgtggtccctccgtgccgcacacctggccggggaccctgactcttctctgaggacagtgagcagcagtaatgcctgtttccttttctggaaaacaggattctttttgaaaatttcatcagaaggtggtgtttatttgtattaaagcaatgcatttaaatattattcatggcccaatgtgtatttaaaaagctggtcttaccagtgttagggttgacggtgcccacagctcctgccttgctctggtctgcggggctggccttggtgattttggaaatggaatctggccttgcccccaggatgtttctctgtcaacccatgtgctgtgagagacacacagagctctttctgtgttagccagctgaccacagcacgaccccaacgtggggacacttgactttggtttggcctctgagataatgtcttggttttaaggccaggacttctaatgccctagaagatgaatatgatttacacgaccagagctacaaggcaaagctcatctcttctgcttcatctgctgaatgtgcacagggagctttaggcttcgacctggcatgcagtgacagtctgtgaaggcagtggcgcttcgggctaggtgtctccttgtgtcggagacctgtggaatccagcagctccgtctgatcgtatagttaggaaaaccaaggggactagagaatggcactgctgagtgcgggcagtggtggctgccccccacccccaccctgggcaagtgaggtcaggcctggccctgcttgccctccatttcgaagggcaattcttcactccaggcttgcacagctgacccgagagtgagtgtctctgagcagctgtggctctcagtcacttaccccctcaccttctcacttctcttcatgggtcttccaggatctgagggatgaagccagacacacctcctgcccttcctttgtcctctcctggtgagtgtcaccttcccgggctgtcaagagctggaccatgtgcccactcaggtgtgtcaccttcctgggctgtctagagccagtctgcatgcctgctaaggcgtgtcaccttccgctcaggtgtgtcacctttctgagatgtctagagccagtccacgtgcctgctcaggcacatcaccttcctaggctgtctagaggcagtctgtatgcttgctcaggcatgtcaccttctgctcaggcatgtcaccttcccgggatgtctagagctagttcgtttgcccgctcaggtgcatcaccttccgctcaggtgtgtcccctttctgagatgtctagagccggtccatgtgcccgctcaggtatgtcaccttcctgagatgtctagagccggtccgtctgcctgctcaggcgtgtcaccgtcccaggctgtccagagccgatctgtgtgcccattcagctgtgtcaccttctgctcaggcatgtcaccttcccgaggtgcccagagctggtctgtgtgcccgctcaggcgtgtcaccttctgctcaggcatgtcaccttcccgggctgtctagagctggtccgtgtgtccactcaggtacgtcaccttcccaggctgtctagagccagtccgtgtgcctgctcagatatactgtcaccatgtgggccctactcttgtgtcagggccattagctggcacatgctgtgtggttgcctggtgcgcgctggggcaacctcgggaaacactcttagcctttgtattgatctgtgcaggctgccaaaacaaagtgatgccaactggggtcttatacaacagaaatctttctcagctctggagcctggaagtccgagaccgaggtgcggcagggtgtcagctactcagaccaaggtgctgaggctgtcctgcttgccctgcagatggccgtctccttgctgcgtcctcactaggcctttcctctgggcgtgcatcgctcgggtctctatatcataatctccccttcttagaaggacaccagtcagatgggattagggctacctgaacaaccgaatgagaacttcttcacctcttaaagaccccatctgctgatacagttgaaatgccgagggtcagggctgcaacatacgaattttggcagaacatagtttagcccataacaccctttccgagcctctgattatctgtctgtaaagtggggacagtagtaacaatgtgtaaaatgtcatgagggtaaaatgaggccaccaaacagtcagcaaaagaaatacctgcttatttcacagatagtcttttctccaaaatcccagtggtagttagcaagtcaggacagctgactccacctggtcctttggaactcagggaagattgggccgttattaggaagtgctgctctttgcagccaacagaacttcccaaggacgcccgccctccgcccttgcttgctatgtgtacgagttacaggaagtgtggctggtatagccccgcagctgttcagaaggagtgttttggtttgtcatctccacatgaaatgaatggagccaattcatactgtaactgagaaaagaacatttttcaaccattatttcttctccctactcactgttaagctctaggccacaataaatggctgcctgctgggactcctgcactctgggatgacacgttcaaagcgtgtgcccatgtaggctgctgcaagagggtaagcatgattggagtggggtcactggggtctggggagccagcctcggcccctcctggctcagcacagccctcgcggccttgggggcccacagggtcactctcccccaaccctcccacagcaccgggctgtctgctctgtgcttcactctgcactagctggttcctgagtaccaggaggcattctctgatatgctatggatacagttatggacaaaatggactcttaggaaggcagcaagtaaggggaatggaggggcaaagagcacacagctaaagattgcctgactcaactgtggtagtcactggtgcactgcaggttggcatttgcaccctgctagcatgtgctcctgaaactggggccggagagctttcttctctgtctgagcactcagagcagtgcctgccaatgctgtgacaatgaacgaatgaataagcaaaatgtcaacccattttcagagttttgtttaatgtccctggacctggatctctcttgagagtgagcattgaatgggccttccctgcccctactgagagctcagggcatggaccccaaacgcttgggtctctcctcttccctcttctgttgtaaatttaaatgtcagggggaaaaaaaaaaaagcaagaaaaatatgtaaataaatacatttgcaatcatatgttatcggatgagaagggtagcggtttcaagagttacattcagagtaatcgttgagcacattgatggcaagttgatagtttcgttattatgaaatatttactttggacaaaggagtattcaaaactgacttacgaggtataaataataaaggacaaagtcatatatatgccacccaggtgatgtaataatttgttttcttcccttctgtcagtagacatttgggttctgaagtttttgcctttaaaactaatgatgttacagatattctaggttgtgtgccctagtgctccagctggctggaattcatgggcggagttcgcgagaagagggaactatacagagaaagaattccagaggtctgcatggtatcccattgagtctgttgcagattacaaagtcatacatgcatttgtaaaccacatgaaaccagacaactattggggaactataagttgaacaaatttcagataagtgaacctcactagaactagaaaatatgtggacaagtatgaaaattttcttctattattttatttaaaagatgattaactgttcatgataaagttaataaagatgtattttgtagtttataatacacgtagaaggaaaacatatgacaacaatagcatagaagatgagactggggaaatggaaatacattgttctaagtttcttactttatgaacaagtataatatttaagggcagactttgataaattatgaatgcatattaaaaatcctagaataccagtaaaaataaccagaatctatagctcatgggccaacagaaaagataaaatagaatgctaattcttttattagaattagcatattagaatgctaaaatgtaaaagaagatagggtaaagggggaacaaagaacagatgggaaaaataacaagttggcagacttaaacccaatcatattaataattacattaaatgtaaatgttttaagattcaaataaaaagacatagattagtagactggtttaaaaagccagagcctgttatatattttctactagacaaaaataatgtaaaatgatgacagagtcctatgtaaagatggaaggaaaaaaaaaggaatacattgacagaaagatataagtaaaattgtatttattttcagatcacataattatttacatagaatatcttgaataatgttgaaaataactattaaaaccaataagtgaatttgagaagtttgaggatacaattttaacataaaatgtattctatttttatataatgtaattaaaaagtaaattataaaacagttgctttatgtatttaacattagcattattaaagattattatttaaagatatgcaaggcctctctactaaacagcataaaaacatgactgaaagaaattaaagaagacctaagtaaatggatctttattagttattggaagaggcggtgttacggagaggtcacatctacacaaattgccctctgcattcagttcagtcacacttttaaattatttcaaaatgcaaagagcctagaatatttaaaacaatcttgaaaaagaagaatgaatttgtaggacttacattacctggtttcaagacttcctacaaatctgtggtaatcaagacactgcagtaaggatcaaaacttagaacagtgcaacagagagagagaccagtgttttttcagttcttgtatctttgagaaagacacaaagtagatcaatgaggaaagtaaagtcttgttggccaggcatggtggcttacgcctgtaaccccagcactttgtgaggccatggcaggcggatcacttgaggccaggagttcaagaccagccttgcaaacatagcaagaccctgtctctactaaaaacacaaaaaacagccaagcatggtggtgcacacctgtaatcccagctactcgggaggctaaggcatatgaatcacttgaacccaggagacagaggttgcagtgagctgagatcatgccactgcattccagtttgggtgacagaggaagactctatcacaaaaaaaaaaaaaaaaaaaaaaaaaagtcttgtcaactaatggtgctgagcaactggatatccatttttttttccattccattttcagatcactttaatggttagaaatttgttccataacttatttatttccataggtttttggggaacagatggtatttggttacatgagtaagttctttagtggtggtttgtgagattttgtgcacccattacacgagcagtatacactgaacgtgatatgtagtctttcatccctcacccacttcccaaccattccccctgagtccccaaagtctattgtgtcattcttatgtctttacctcctcatagcttagctcccgtggataaccattttcagataaatattattcaccatgaccttgacctcacaccatacacaaaaattaatctgaactatatcatatacctaaaggagaagctgaaactctaaagctcttagaagaaaacatgagtatttttctgatttgggtaggcacacatttcttataacaccaaaataaaaaacaatgaaagaaattattaataaattaaactttattaaaagacttcattaagtaaatgaggaacaggccacagaatgagagaaatttttacaaaacacatatctgacaaaggacttctaagaagggtatatgaagactctgataactccataaaaggaccaacaacccagtaaataactggacaaaatatctcacattttcatcgcaaagacacataatacacagattggcccctgagctcatgagaaagtgctcggcatcatcagtcattagggaagtacaggttaaaaccacagtgaaagacatctgcatatatcccagggcagctcagatcagacaccaccaagtgtcgcagagactgccgcagcctcgcctctcgtatacattggtgggtgttaaaatgttgtaacctctttgcaaaaggtctagcagctgcttataaaactaagtgttctcctaccccgctacccaacaattccactctagggcatttatccaggagaaattaaaacctacgtccacaaaaacgtattcaagagtgttcacagcagctttgcttgctttatttataattgctgcaattgggaattgcttgtatgtccatctgtaggaaagtggataaattacctgagggatatccatgtagagcctgttcctatctgtgaacttagcattgaaaaggaataatccacagacacacacagcctcgtggatgagtctcggtaacgtcatgctgagcttaaggagccggacacagcaagagcctgcctctgattatatttattgaagctctgcagttgccaaaaacaatctggatagggaaaagttagaagaggaactgcttctggggttgtgcaggcagtgagaaactgggaaggggcatgagggaatgttctagaccatgacggccatggtctatatcttaacaggttaggtcacataggtatctatctgtgtttgtcagaattcatcaaatgatgttgaagatggtacatttcactgtgtgtgtaaattccaccttaaaggaaaaaagaaccataaatggacattgaactcttaatggtatatgtgctgaaggacttggagagagtacactgatgtctgcagcttattttgaaatgcagcaaaaataataataaaatggatatggggtggagagatggatagatatatgataaaaacaaatacaggctaaaatgtcaattatatcatctgaggtataaagctattcattgtaaaactcttccaactctatgtggctggggtttttcataatatgttggaggaaaatagtaaatattatggatttttattccttgaaagcaaatttgggggaaagatcatgaaaactgtggcctccttatcccagatggtgaagatacaacctagtatggcctcagcgagatactgagtgcactctcagtttgcacctggagggcagggtgagtctgggaggtctgtgaattgtcagtggacctcccggtcctctccagagccctgcaggatcgggtggatacactgacctgatggacaggaagaggaagcctctgggccagacctttggacactgttgccttactcttcttctctccagccaagcgagtggccttgggaggtgagtgtggtgtcgccttgcagccttgcactcagctttgcagccgtccctgtccagccagcttccacgcaagtggaagacacacagaatccacagcccaggcagctgctctcacctgtgtgtggagcacagggtgcccatcctcagagaccctgcccagcccctcgctgccatcccctctgctagaccaggcatgtgggtcagcgctgccctgtctggcccgaagttccatgtcagtagccgtggatcaaatgatgaaggcagagttatctaattacggagtgttttctctaatatttccacagcctgctgctgtcatggaacatggagattcattacttagaatgtcaaattaatagcgttcctggacctgaaacatcattgtgtcaacttctccaccttttccaggtggtggtttgagtttgtgcacatggcatgcctattgccccagcacggccacagctttccaaagtgccgcccagggctggggtctgcccacttcctcggaggtctgtccatgctctgggcaggctacagcctgcaggatgcagatgcccagattggagcagcaccctgtgccctcaagaggagcacagctcacacatccacgtaactcttgtccttagcagtagtgaggggcttctgcaggcagaggagtcggctccacggtcctccatgtaaactaccgggatcaggagcctagggttcaattctgctgtcacgtgtctgcactgtagcctgttctgccttctcaaccagccccttctagctcctggggcagtttctctttagctgaaacttcccttcatcttccaccaataccatgttgcgttacagtttccctcttctcacagaacgagccttgggagaggagtgtgttctgtcacacagcctggccatggctcaggtccacaaggtcagctccagactctcagtgcaatgagggaccatgagtagcttctgcttgctgagtgctttccaagtggcggggcctctgccaagtgctttgtgatcctcatatccaagtggaggaaactcaactttagacagtgactgagctccaacagctgatccttggcacagatgagacttgaacctgggtccttctgactccagaatgcaagctcataggaaggggtaaatttactgggaagatctctgctggccaggtccttgatggcacagggccacgtgcaggtggagtccaggcgagacttgtccttgggaacacgagctggttttgaagctactgtagtcctgggttgcccgcccatgggtgttgtgaggacgctctccagcatcactgctgcccacgtgccctgaggggtcttaggttccaccccaggtcacattcagtgttttgtctgattcttcaccagaagggagcagcctcacgcagactgagcaggaacagtggcattggtgttttccacagatcttttggaagaatttgaacttctgatcatgtatatatgacactttttaaagttttaagtgatgcatggaaacttgatattgtaaatttaaatatcagtcattttcagttttgtctctttgctgctcaaaatgaaaaatcttctcactcttcccctactccataatatggtcatggagttttgacctaattaaaagcatcagaattaagttgctaagtttgaatgggaatgtagtggtgtttaaggggacttaggagaccctgtcctcatgtcctttctgtcactataggttttgttactgtttaaagtccatctgcccagcttttagataattaattctaattttgagaacttgggagatgttgcaaaaactgttggagctgattttaagattggtgtaatatacctggtattactagagtcagtcagtgaagtcatagatgaagttgtgacatttggcccagggttccctgctgaattctgaaataccatgatgctatcaagagaagagccatgggttagccagtctccatgtgacacccagtgagcttcactgctggtactcccactcttgttccttctcggatggagtcaggtctggccccaagctacagcaggatatggaggaagtgatggtgtgcgacttccgaggctaggtcataagaggccttgcagctcccagtgtcctcagtcacctgctgtgagggcagccagtaccatgtcagaggacatacaggcagccccaggagaggcccatgtggtgaggagccagggaagtcagccctgttggaaatagatcctccagccccagtcgagccttcggatgagtgcagctatgcagaagaccccaagtgacaactgctgagcccgacccttctgaattcaaggccatgaaagaaaggtcatttgtgttgtttggggccacgaagttggggattatctgttacctgtctgtagtgactggcacaagatgtgaggcactccccagtagttacttattcatcacacttcctttcatagctggtccttgtcctttcctctggtgtaaagtacagactgtgaagacccgccctctgttccttccagctgtttttggctgtctcttgtgtacaaatgctgtaggagatgcaaaggtgactcgcagcatcccccaagaatgcctgggcttggtgctgccagaaaggtatatgaggagccccgggtaagccagcactgcaggcagcaaggtagccttcagctgtgtgggctggggagaacttcatggaggaggtagcatttgcaccagactttgaggtagatgggatttgaacacatggagtaaggggaaacaacatagactgaggctgggcctgtgtgtgaaacagcaagcaatcccttctggctggagcaggggagggtgtgaggaggggctgccagcctccctccaggccaagaaggccatcaggtctcactgggggacagtgaggagctactcaaggcatgatgggagccaggctggacttgaacaggactcattggactgtccaggtgctgggtgagagagggaggaggggacatggagccagcaccaggggacaagggggacctgaagcagctgtgaccgtggatggcagggaaaagaagaagaagggattcattttggcatagagttgggaattgcagcagtcacttgagaatgacagagatgggaaggttagggattagggtcagtggcatggacgtgagcgatgaacccatacaagtgggtgagaaaaaggctgaagaaggtgaggcagcatagggagtgggtgacgccagtgatggctgatgtggtgtgaccagaggaaggggccaagggggcggaccccgcagggtccataatggtggtgattgccttgggggagttcaggggtcgcagaagaggacctgattatgccatcctcacttgtaaattctgcttggtctcctgacgctatcagggtcagacccagccctctcatggcccgctgtgtggcatgtgctgctccctggctcttgcccatgcccctcctcctggccaagccacactccacctgcatcagccataggccctcccgccactgcccgcctgcaggtctcagcaccagcgttgcctccccagaagcctccctgaccatggtccctgttgtgtgccccaccaccccctgttctctgtccccctggtattggttcgtctgcttgtggtaactgctgaatgccagccccaatgcccccgcctcccatcgccatcagcgtcaccagcatcacaaaggtcagcacgaggtagctgctcacagaatatttattaagaataagaaattaataaagggactaattggtaaatcttaacatgcccacactgggtcttttccccatgtcacgtgagcctgaacttggaacatccatatttccagaagacatcaggctctttctctagtgaccttagaaatccccgcattgaagggagatggccctggcatggggcccctgccactgggtggggaggggtggggaccagactgtgccagggaccccaaggagttggagggtgcagagcttcttgacctgagtggacagggagaccctctgagctcatcctctgtaacaggatgagcatggactcttcaggggacaaacttcgtgcctcgtgtgaaaaacgaaagggccccacgggctgtgtctgatggtgttacccactgcacagggaaggcacctttgcaccccagtcccagccaggagagcagcaggtcgcaatgtcttgctagcctggcccctctgccctcaatgactttgcaagcaccttggcctccctgtcccactcccctgccggcacctgcgtgtccctgtcctgccgagctgccagcctcacctgcgtgcctctcgtcctcatttgaataggtgagcaaccaaagtcagctgtgccgttggagccggattccatcactcaaaatccaggcacagctccttttgaattcctcagctgccccgaggcaggggctcaatgttgatactgagattaatccccaaagagcttctcatttctctgcagagaaattaaagcttgccagtttccttttgcccgtccttctgacagctctgtcagtaatgatatgcctgccgcgtggcataatccgtgtcccgtggtaaagaataattcattaagaaatttagggcccagctcctttccgttgggttggtcttcaaaagttaactaatggcggcagcagcacgatgatcaatggaaaattattgaacagagctcagggctgcttcagaccagctcaaggagccacctgggtggagagcagtcagacccacccacccccttagatttgtcagcattccctgaaacacagtcagacggtgttgatatgaggtgtctgctgggcgtggacagtggggtggatggggtactgccctagtttgggaagcagcttatttttagccttgtagaagcagcgtgaagtgtctactggtaaagccagcacgacttctcctcccttctgaacaccagcaagaagcttctagatgtttctgatgaacaaataggagttcctgtactggctgagaggggcagcctacatacttaggttctttggggaggtcagtgcgtttttagcaaccattggcgcattgagcatgaaatggcgtggagctgaaactcactaccaactgcagtgaaaccaacaaatggaagacgtgaactgatgctggccctaatgactctgggcaagacgagggacattattgttttgcatgcattgataatgtgtcatctggaatcagattttctactttcatgttgttcgataacaaggttgtgccctgtgagtctgggattgtgtgaggcgagcgtgcgtattcattctactgcagaggaggctggggaggaatcagagcatcctgtgtctgcaaggtctggcgtgtttctaagggaaggcagagaaagccagtgctccaaagacagcagagcagacgcgaggtttgcaggcatgaggatgacaaatgaaattcgcagaattcctcagacttgatttccctcccttctataattaacctcagggataccttgactgcgctgaggtccatgtgcttgagcacttgctgtcctgcttgccctgccctcctctgatttttttttgcacagcatgattctatttctgctattgttcagaaaccattagcacctattcagaagtcagttattcagctttgagctgaatgacaattatttgaatggtaaagggtgttaatgtataattattcacattcataccaggacagtcacagtttaatcatttctctgtaggcttccttaagtttgtgcttaaagtcttaggcataattcttttgttaaataagtttaggaggctctaagtattgggaaagtgagtataaatacgcctctgggggagcttcaaggatgtggtgcctcacctccaggagcgagcctcctaggtgaaactgtcactaggcgccccacacttcagccaggaggaaggtccatttccgagggctggtagcataatctggcctccaggtgagctctgaggtcgtgttctggcgtgcccaggactagatggagcctaccggggcattcctatgtgtgacacagagccctgccaggcccggtcgggctcagagtgggcttaaattaacccttcagaccctcgattcctctggacccctctttaagatgattgacgaccccaaagagcttttgatgataagggctatattgtgcacatttgccatattggaaattaaacctaagacttttttttttttttttttttttttgcgacggagtctcgctctgttgcccaagcttgagtgcagtgacacgatctcggcttactgcaacatctgcctcctgggttcaagagattcttctgcctcagcttcatacaccctgcatatgccggctgcctcctcaagcagtacagctgggattacaggcacccgccaccacacccggctgattttagtgtttttagtagagttgcggtttcaccattttggccaggctggtcttgaactcctgatcttgtgatccacctgcctcggcctcccaaagtgctgggattacaggcctgagccaccacgccctgccctgagactttttaaatgtattaacttatttaaaaataacaacagtaaacctatggcaggatatcataggtaatatgcttctggaaatgagttttccaagacagacacttgaggagagtggcactgttgtccatttttgcagaatggaatgccttgatgcctgcctcagtggaagacagctgggttctcagatctgcctctgcgtttaatccgttgtgttgtcacatcacgtagcccccagaaaactcttttgtcacctgtaagagaatgagaatctaaaaggcaaataacatcctagtattgctatggaaatgattttgacctcacaaaccccctaaaggggtctcagtgacccctgatgatccctagaccacattttgagaatctctgttctaaaaagtccatttcttttactctaaaatattactcacattgcctgatatgttgtgggctcctccttttttaaattttttttattatactttaagttctagggtacatgtacacaatgtgcaggtttgttacgtaggtatacatgtgctatgttggtgtgctgcacccatctattcgtcatttatattaggtatttctcctaatgctatccctcccccaaccccccaccccccgacaggccccagtgtgtgatgttccctgccctgtgtccatgtgttctcattgttcagttcccacctgtgagtgagaacatgcggtgtttggttttctgtccttgtgatagtttgcttagaatgatggtttccaacttcatccatgtccctgcaaaggacatgaactcatccttttttatggctgcatggtattccatagtgtacacatgccacattttctttttttttggcattttttttaatttattattattatactttaagttttagggtgcatgtgcataatgtgcaggttagttacatatgtatacatgtgccatgcttgtgcactgcacccactaactcgtcatctagcattaggtatatctcccaatgctatccctcccccgtccccccaccccacaacagtccccagaatgtgatgttcgccttcctgtgtccatgtgttctcattgttcagttcccacctatgagtgagaatatgcagtgtttggttttttgttcttgcgatagtttactgagaatgatgatttccaatttcatccatgtccctacaaaggacatgaactcatcattttttatggctgcatagtattccatggtgtatatgtgccacattttcttaatccagtctatcattgttggacatttgggttggttccaagtctttgctattgtaaataatgccgcaataaacatacgtgtgcacgtgtctttatagcagcatgatttatagtcctttgggtatatacccagtaatgggatggctgggtcaaatggtatttctagttctagatccctgaggaatcgccacactgacttccacaatggttgaactagtttacagtcccaccaacagtgtaaaagtgttcctatttctccacatcctctccagcacctgttgtttcctgactttttaatgattgccattctaactggtgtgagacggtatctcattgtggtttggatttgcatttctctgatggccagtgatggtgagcattttttcatgtgttttttggctgcataaatgtctacttttgagaagtgtctgttcatgtccttcgcccacttttttgatggggttgtttgtttttttcttgtaaatttgtttgagttcattgtagattctggatattagccctttgtcagatgagtaggttgcgaaaattttctcccattttgtaggttgcctgttcactctgatggtagtttcttttgctgtgcagaagctctttagtttaattagatcccatttgtcaattttgtcttttgttgccattgcttttggtgtcttagacatgaagtccttgcccatgcctatgtcctgaatggtaatgcctaggttttcttctaggttttttatggttttaggtctaacgtttaagtctttaatccatcttgaattgatttttgtataaggtgtaaggaagggatccagtttcaactttctacatatggctagccagttttcccagcaccatttattaaatagggaatactttccccattgcttgtttttgtcaggtttgtcaaagatcagatagttgtagatatgcggcgttatttctgaggactctgttctgttccattggtctatatctctgttttggtaccagtaccatgctgttttggttactgtagccttgtagtatagtttgaagtcaggtagtgtgatgcctccagctttgttcttttggcttaggattgacttggcgatgcgggctcttttttggttccatacgaactttaaagtagttttttccaattctgtgaagaaagtcattggtagcttgatggggatggcactgaatctgtaaattaccttgggcagtatggccattttcacgatattgattcttcctacccatgagcatggaatgttcttccatttgtttgtatcctcttttatttcattgagcagtggtttgtagttctccttgaagaggtccttcacatcccttgtaagttggattcctaggtattttattctctttgaagtgattgtgaatgggagttcactcatgatttggctctctgtttgtctgttattggtgtataagaatgcttgtgatttttgtacattgattttgtatcctgagactttgctgaagttgcttttcagcttaaggagattttgggctgagacagtggggtcttctggatatacaatcatgtcatctgcaaacagggacaattttacttcctcttttcctaattgaataccctttatttccttctcctgcctgattgccctggccagaacttccaacactatgttgaataggagtggtgagagagggtatccctgtcttgtgccagttttcaaagggaatgcttccagtttttgcccattcagtatgatattggctgtgggtttgtcatagatagcacttattattttgagatacgtcccatcaatacctaatttattgagagtttttagcatgaagggttgttgaattttgtcaaaggccttttctgcatctattgagataatcatgtagtttttgtctttggttctgtttatatgctggattacatttattgatttgcatatattgaaccagccttgcatcccagggatgaagcccacttgatcatggtggatcagctttttgatgtgctgctggattcggtttgccagtattttattgaggatttttgcatcaatgttaattaaggatattggtctaaaattctcttttttggttgtgtctctgcccagctttggtatcaggatgatgctggcctcataaaatgagttagggaggattccctccttttctattgattggaatagtttcagaagcaatggtaccagttcctccttgtacctctggtagaattcggctgtgaatccatctggtcctggactctttttgttgataagctattgattattgccacaatttcagctcctgttattggtctattcagagattcaacttcttcctggtttagtcttgggagagtgtatgtgtcaaggaatttatccatttcttctagattttctagtttatttgtgtagaggtgtttgtagtattctctgatggtagtttgtatttctgtgggattggtgatgatatcccctttatcattttttattgcgtctatttgattcttctctctctttttctttattagtcttgctagcggtctatcaattttgttgatcctttcaaaaagccaactcctggattcgttaattttttgaagggttttttgtgtctctatttccttcagttctgctctgattttagttatttcttgccttctgctagcttttgaatgtgtttgctcttgcttttctagttcttttaattgtgatgttagggtgtcaattttggatctttcctgctttctcttgtgggcatttagtgctataaatttccctctacacactgctttgaatgcgtcccagagattctggtatgttgtgtctttgttctcgttggtttcaaagaacatctttatttctgccttcatttcattatgtacccagtagtcattcaggagcaggttgttcagtttccatgtagttgagcggttttgagtgagattcttaatcctgagttctagtttgattgcactgtggtctgagagatagtttgttataatttctgttcttttacatttgctgaggagagctttacttccaagtatgtggtcaattttggaataggtgtggtgtggtgctgaaaaaaatgtatattctgttgatttggggtggagagttctgtagatgtctattaggtcctcttggtgcagagctgagttcaattcctgggtatccttgttgactttctgtctcgttgatctgtctaatgttgacagtggggtgttaaagtctcccattattaatgtgtgggagtctaagtctctttgtaggtcactcaggacttgctttacgaatctgggtgctcctgtattgggtgcatatatatttaggatagttagctcttcttgttgaattgatccctttaccattaagtaatggccttctttgtctcttttgatctttgttggtttaaagtgtgttttatcagagactaggattgcaacccctgcctttttttgttttccatttgcttggtagatcttcctccatccttttattttgagcctgtgtgtgtctctgcccgtgagatgggtttcctgaatacagcacactgatgggtcttgactctttatccaatttgccagtctgtgtcttttaattggagcatttagtccatttacatttaaagttaatattgttatgtgtgaatttgatcctgtcattatgatgttagctggttattttgctcgttagttgatgcagttttttcctagtcttgatggtctacattttggcatgattttgcagcggctggtaccggttgttcctttccatgtttagtgcttccttcaggagctcttttagggcaggcctggtggtgacaaaatctctcagcatttgcttgtctgtaaagtattttatttctccttcacttaagaagcttagtttggctggatatgaaattctgggttgaaaattcttttctttaagaatgttgaatattggcccccattctcttctggcttgtagagtttctgccaagagatctgctgttagtctgatgggcttccctttgagggtaacccgacctttctctctggctgcccttaacatttttccttcatttcaactttggtgaatctgacaattatgtgtcttggagttgctcttctcgaggagtatctttgtggcattctctgtatttcctgaatctgaatgttggcctgccttgctagattggggaagttctcctggataatatcctgcagagtgttttccaacttggttccattctccctgtcactttcaggtacaccaatcagacatagatttggtattttcacatagtcccatatttcttggaggctgtgcgcgtttctttttattcttttttctctaaacttctcgcttcatttcattcatttcatcttccatcgctgataccctttcttccagttgattgcatcggctcctgaggcttctgcattcttcacgtagttctcgagccttggttttcagctccatcagctcctttaagcacttctctgtattggttactctagttatacattcttctaaatttttttcaaagttttcaacttctttgcctttggtttgaatgtcctcccgtagctcggagtaatttgatcgtctgaagccttcttctctcaactcgtcaaagtcattctccatccagctttgttccgttgctggtgaggaactgcgttcctttggaggaggagaggcgctctgctttttagagtttccagtttttctgctctgttttttccccatctttgtggttttatctacctttggtctttgatgatggtgatgtacagatgggtttttggtgtggatgtcctttctgtttgttagttttccttctaacatacaggaccctcagctgcaggtctgttggagtacccggccgtgtgaggtgtcagtctggccctgctggggggtgcctcccagttaggctgcttgagggtcaggggtcagggacccacttgaggaggcagtctgcccgttctcagatctgtagctgcgtgctgggagaaccactgctctcttcaaagctgtcagacagggacatttaagtctgcagaggttactgctgtctttttgttggtctgtgccctgcccccagaggtggagcctacagaggcaggcaggcctccttgagctgtggtgggctccacccagttcgagcttcccggctgcgttgttaacctaagcaagcctgggcaatggcgggtgcccctccccaagcctcgctgccaccttgcagtttgatctcagactgctgtgctagcaatcagcgagactccgtgggcataggaccctccaagccaggtgcgggatataatctcctggtgcgccgttttttaagcccgtcggaaaagggcagtattcaggtgggagtgacccgattttccaggtgccgtctgtcaccaatttctttgactaggaaagggaactccctgaccccttgcgcttccggagtgaggcaatgcctcgccctgctttggctcgcgcacggtgcacgcacccactgacctgcgcccactgtctggcactccctagtgagatgaatccggtacctcagatggaaatgcagaaatcacccatcttctgcgtcgctcacactgggagctgtagaccagagctgttcctattcggccatcttggctcctccccatgtgccacattttcttaatccacatcattgatgggcatttgggttggttccaagtctttgctattgtgaatagtgccgcagtaaacatacatgtgcatgtgtctttatagtagcatgattcacagctgaattctaccagaggtacaaagaagagctggtaccattccttctgaaactattccaatgaatagaaaaagagggaatcctcactaactcattttatgaggccagcatcatcctaataccaaaggctggcagagacacaacaaaaaaagagaattttaggccaatatccctgatgaacattgatgtgaaaatcttcaataaaatgctggcaaaccgaatccagcagcacatcaaaaagtttatccaccaccatcaagtcggcttcatccctgggatccaaggctggttcaacatacacaaatcaataaacatgttccatcacgtaaacagaaccaaagacaaaaaccatatgattatctcaatagatgcagaaaaggccttcaacaaaattcagcagcgcttcatgctaaaaactctcagtaaactaggtattgacggaacgtatctcaaataataagagctatttatgacaaacccacagccaatatcatactgaatgggcaaaactggaaacattcactttgaaaatcggcacaagacaaggatgcagtctctcaccactcctgttcaacatactgctggaagttctggctagggcaatcaggcaagagaaagaaataaagggtattcaattaggaaaagaggaagtcagttgtctctgtttgcagatgacatgattctatatttagaaaaccccattgtctcagcccaaaatctcctcttttttattttcgaaaaaattacagcagagttcactcttcttggtgtgcagcaggaggtgcacgtgctgtgcttgtccatcagtgtctgctttgtgcatctctgttgacctgcctctaacactgggacgagcatcagccaaatcagaaccaggtcagagcccctacgccctggtcagatcagaaccaggtcagaactcccctacaccacagtcagatcagaaccaggtcagaacccctataccaagcttgtccaatcctcagcctgcgagccacctgcagcccaggatagctttgaatgtggcccaacataaattcataaactttcttaacacattatgagtttttttatgattttttttaactcctcagctatcattagtgttagttattttatatgtggcctaagacaattcttccagtatggctcagggaagccaaaagattagacacccctgccctacaccttggtcagatcagatccaggtcagaggccctacatcctgtccccacagtggacaggttggaaatgtaaggtcgtgtggccactgggggcccaggatgggctctgcctcagaggcacttccttccacctggcctgttttaatcaacagtcattaaagggaaatctaaagatgtttaaaacgttgtgtattttctcgttagcagagccaagaatcagtctgcagggagcaaagagcttgagtgtggagttagaagtcggggtccgggaaagggtgcttgtttctgaggctaacatgcatcaggtgctccaagtgggctctcattgaccccaggatgccatcagcccccttgccctgcctggagtatatcacatgggccctgggtgcctgggcctgtggagccacagctgctgaggtccggtgtttttaaagcctgagagaggccatctgggggtagcactacaggagatgggaagaggcccccaggaaaccagggagagcaagaaggtcttctaaggactcatgtcctcttaccaactaccatgtagttaagaatgccttacgaagggggacgggagagtcaagggatagaaaatcagtccttaaaatctgcactgtcctttccacatacaaagcacctttcacacaggtgagctcatttaccctcagatggcacttactgttgtgggaacctcattttaccaggaggaaacggaggggcgacaggacagcgttctaggaagtagctcagctgtggacattttgtggtgagctctcagggacagcagcaggcatgggatgcctgcagagaggctttcaggagagcgctggccccacctgcaggcccccagggcgaccttggataggctgccgtctgggcctgggagacttctcacctgcagagtggatgatgggggaccttgaggactgaacaggagaaagcacactgaaccgagcctggtacctagtaagcactcagtaagtcttggcacttactgtgataattgcattttaagcccagctaccaaaatttccagacctacgttaccatcttcaaatgagtgcccctacccgtttccctaacgttgctcaaacttgcattttctgaggagcgtctgttggatgcctttggcccttgcaccacgtacagctttccacgcttattggctggccactgggtaccaaggaccatggcgggcactctggaatgctctgttttggcaaactttcttccccaagaacagatttgacttttgaaaagtggtctgaaagtcagcctccccagccctggtcacagcagaaatagttttggacccaggtgagttgagtccacaaaataacaggccgtgtctacttgagctgaagccttatcagttggcccagtaggtcccatctgaagaagccctgtatttttgaaaaatgttaactctccctaaaaggttacattgaacggcaacacccgggaggctgctgttggccttgccagcaagctgaacctgcagttgagtggccacgcgtgtggtgcgaggcgtgcagcccatccctgagggctcccctgcatgggaaaggaggctgggaggttcgccaggactgcatgtggccctcgcaccaagaacctgacccatggtggaggtggtgagtgctgtgtggtcggccttgatgtttatacgagagtctctgaggtgtagacatcagtgtctccattttggggagagggaggcggttttcttcccagcttaccattaccactgtgttcgaggagggactgatatttcgagtggggtcaccatcacactcacaccaccaaggctgctttccaccactcagctttctcatgcatcccgtttcccagaggtggccagtgcctgggccctgagtcggttgagactcatccagagcagagctgcagaagctgggctggctccagacagagatgacccaaagcctgtgtcagcatttgggtgcctgggcccaccgtccaggcctgagagagcatcagtgaggctcggagcccccatcagccaggtcaggccgtggctctgagcctagtgctcctttctaaatgggagttgcaacgccagctttgcaaagtggttgtcagggctcactgaggggctctggggagactttgggggaaggataatgattggggaagtagaaattggctcccaaaatgctagagcaggacttaagggactgatggccaggcacctgcccagtgtggcatcctcccatcgttggctcgagcgctgagctgcacctctgtgtcaggacttgctctcagtgttctgtctggggaggtcatgtgcctactgggtggggcaggtccttgtgtgggaggagccagaaactcccttttttcttaaaagttattgggccagaggtcatgaattcacccttagcctatgatctccagtaactctaccatccgcaggaaaatgacttcacaccatgcgtagggctggaaggagcactgggatggagtcccacctcggtgcgcgacccggggcgttcagcagtgccccaggaccgcagcagcccatgctcagagccaggtcctcagggccggggcattcagcagtgccccactaccatagcagcccatgctcagagccaggtcatcagggccagggcattcagcagtgccccacggctgcagcggcccatgctcagagccaggtcctcagggctggggcgttcagcagtgccccactaccacagcagcccatgctcagagccaggtcatcagggccggggcattcagcagtgccccacggctgcagcggcccatgctcagagccaggtcctcagggctggggcgttcagcagtgccccactaccatagcagcccatgctcagagccaggtcatcagggccggggcattcagcagtgcctcacaactgcaacggcccatgctcagagccaggttctcagggccggggcgttcagcagtgccgcacgactgcagtggcccatgctcagagccaggtcttcagggccggggcattcagcactgccccaccaccgcagctgcccatgctcagagccaggtcatcagggccggaagatggcaacttgatgcttagccttcaaagaggtggtaaacgataaaaaaacggagccatgcctggattcaagagcctctgaaatcctaccacctaatcactgtcttccctaatttccccttggccgctatgtgggtggtatatggtgggctgttgggtggagcggggcgggtcgttactgatctatctggaatacccgctttatctctacccagcaaactgctacccatccaagacccaggcccacctgtcacttccactctggcacctcgttcgccatcacctcactcaggagggttccactggtgcttgccggcgaacgccaccattttttgcagcatatctcatagcttgttggaaacccacgttgagttggggctttgttcatccacaggtgctgtcacgcatccgttttcaggagacagagatgtcctctgtggccctccgttggccgaccctgttgggtgcagcagctgtcagtggacagaggtgcatcagtgcgttggttggtggcatcgtggcctcaccggcccacagttctgacagaggtgtctgtgtttcaccaactcagtctgtccctgcccattgtccgcacactcattccctccatgccccagtctggcaccctcaagtgcaagtgcgtgcatttaattcacgtagtgtgttggttgggtgcactcctggacctttggggagactgtcttcttccatgttagctgcttccttcttccctgtggggtcatagaggtcacagctgacatgctgaaacaaatgccattgttttcacttaaaccacattgtattccatagccgctgtgtcatatgcgtatatataatagtgtgtaaggcgtatggaaagaagagattgtgtccagactggctacagatggtcatcctaatggcggaagcagccaggccagttgggcttgactctggagctttggagggccatcctcagtgtatttgtttttatttgtggaggccccgcagcgctcatgctggccatgcctggctgggatgggatgacctggtgaggacagaggaggacagcctctgcttccatgatgaataaaacagcatctggctgggtaggaggaaagcctgtgcttgttcagcctcaagtacgtgtttgaaagcttgccccaaagacattccaaaaaccaggcagtggtggtgtcctgtccttctagaggccaggttgtccaggcccaggggagtcttgcttaggggtcagtgagcgctgggactcagtctggctcctggcaagcccagagaaccccactgctgagtctctacacaaggcattggacggggctgctgtgggtgtgcgccaggccacctccatgcctgggcagctgtgcacaagctggctatgagctccatggcatacagagcacgtccaaactaacctggtagcccagtcccatggaaagtgtgtgacatcgtgtccctgccttcggagtgagcaagccacaagccagatgtcaggggctgttccttctgcaggtcacccactggctggccaagcaccgtgaagctgggcgcacctcctccagggaccatactaaagcagctagcagcaccttccccctgctgtgaaccccatgcctgacctgagcctgagccctcacaggcctggcaaaggctgcctgcagaggcctgggccacacaggccctatggctttcctgcgtgccacggagagccagccagtggggctgcaggcacctcctcccgctcactctcagtgtgcgcctccacagggaccacagaccacaggagctcctggcccgccacatcgccagccgtgtgcgcaaggtttatcaggttcctcttggccaggttgaagtagatgccgggtggggatctgtaggccctggttgtgtttacagaagatgctgcccttcactgtcttccagcctcccaggaaaggatggtccccaggctccatgctgacaccacccaccttgcttcacccagtaggcgcttactgtatgtctactctaggtcatccacagtgctgagtgttgggatagagccccgggaggtaggtgcctggtcctccgtgagtctggtggaggagccctccgtggtgacagccttctgtgagagcatggcaggtggtggggcctcgtagagggaaagattttgcagaaaatgtgacctagattcccttttaaataggaaatactggtccctagtgtcttgaactttggggagaaaactccctttgattaaagagaaggtaacttggaaatgtgttttccctcatctttttgttaatttattttttaaattaacatgtagtgaaattggctttttgtggggtatacagtcccgtgaatgttaacgcgtgtgtgtgtttctgtaaccacccccaaaatcagggtgcagaggagttccaccacctggacacccccacgccgccccctggcagccacggcctctccccacccccattccagctctcagcaactgcgacgtgttctccaacaccgtggctttgtgtttttgagaatgtcttataaatggaatcagacagtatttaacctttggagcctggcttttttcactcaggttaatgcctttgagattcatccaagttgttgcatgtatctacagcttattcatttttcttgctgagtgtacgctaccgtgtgggtatatctccattgatctgttttttattttggccattctaatagatatgtaatgatatctcattgttttcatttgcgtttccccgatggccagttatgttgaacatcttcttttgtggttattgacccctccttatatcctctttggggaagtgtcaattcaagtcttttgccttttttttaagttaggtggtttgttgagtttcagtttggaactgttgagtttggaaaaatctttatatattctggataggataggactcttgttggatttcttatttccaaatattttctcctagctagtagtagctagtcttttattctcttaacactgactttcagccgggtgcggaagctcatgcctgtaatcccagcactttgggaggccaagggggcggatcatgaggtcaggagatcgactgcatcctggctgacacagtgaaaccctgtctctactaaaaaaatacaaaaaaaattagccaggcgtggtggcaggcgcctgtagtcccagctactcaggaggctgaagcaggagaatggcgtgaacccgggaggcagagcttgcagtgagccgagatcgcaccactttgctccagcctaggggacagagcgagactctgtctcaaaaaaaaaaaaaaaaacaaacaaaaaaaaacacctgactttcatagaccaaactttttcacaaacaagttttttttccctttttaatgaagttcaatttatctctctcttttttttatcatgatttgaaggacatatctaacaactgtttgcctaaccccaggtcatgaagatttgtcatatagtttctttttttttttagtttaatgttttacatttaaatctatgatatattttgagttaatttgtttaagtaagtcatgagatttacatcacgtttcactatttgcctatggatatccaattttccagcacctctttttgaaaataatatgctttcttcattgaaatccctttgcacctttgtcaataaacatttggtcgtgcttcagtaggtctattttggaaatctctcttctattctgttaactccatccagtaactccatcaatactccaacaagctgggtatttatccctttgcaaatacataattattattatgtatagtaagtcttgaaacctgtcagtgtgatttctctaaccttttttgtctcttgtaaaatatgttggctagtctcaatcctttgccctttcatctaaattttagagtcaacatgtctatctgcaataaattcttctagggttttttaattggaatgataataaacctataggtcagtttgttagaattcaaattttatgatattgagatttccatgaacatgatatgtctcctcagttattcagacattcttgtgattactttttcagcattttgtaatttccaacaaacagagcctatatacaaattgttagatttacatctaagtattttatttggttggagccattatcagtggtatatagaaaggtgattgatttttatttagtaaccttgtatctagtgactttgctaaactcacttattagttctaagacttttctattatttcctgggtattttcccatagacaattatgttgtctgcaaatagggagagtttgtttcttcttttctaaaacaattgtcttctatttcctcatcttgctttttttgcacagttaggtatgatgttaactgtgggttttttgcagatacagttgtcagattgaggatgttaccttctgttcttaggttgctgagagcttttatcatgaataggtgttaaattgtattaaatattttttctgactggatatagattatgtgtttttctaggatattaatatgatagctattgttcgtttttaatagcctttgtttttagaatagtttcggatttacagaaaaattgaaaaatcagtagggttctctgatactgcacacctattttcccaaattataccattgattcttattatgatgacatttacacttgacatcttacattagtacggtacatgtgttatgattcatgaaccattgttggtaccttaatattaactaaagtcctatgatcttgaagttttcttagtttttacctactgcccttcttccattccaggatcctgccttggatactgcattcctagctcctttggcccctcttggctgtgacaggtccttagttttagatggcctagacagtgttaaggagtactgattaactattttgtagaatgttcctcttttggaatgttttatgcttttctcatgatttgactggagttacagtgtgtgaggagaaaaaccacataggtaagctgtcattttcctgagatcgtatcaaggagtcatgctgtcagtgtcatttatcattgttgatgtcaactttgattacctggctgggtagtggtgtttgtcaggtgactctatgataaagttaccttcccccatctcccctgcgtactgcactcgtcccgaagaagttgctgtacctaacacacttaggaatggggagttacgctccttgaagacagagtatctacataagttactgggaatgcttctgcatgggagagttcttctccctcacctatttctgtattcagtcatttttttatgttagtatggactcagggatattgatattttgggttgtcttccaatactactttattttgttgctgagattatcccagttttggccatttgggagattgtgcagtttgctcctgtgtccctttgtcgtactctcctcatcgtggtttgactggaatgtttgtctttgttcttttgcttcatttcattttggagtgtgtcctgactttctgatactgcaagattctcaaggctcatcttgtgtatttcctgtcccagtcctagggaggaaaaggccagttcttgaaggagtcttgtgtcttttattataaaatgcatgagaaaccatggactgggcactaggtttgctccttgctatgggggtggtgttgtttctaagtcttctcagttgacagaccacagaagtagctttctgtatactaacccacggacagataaatattgtaaacatttctgtatgcaattatctgtgtctatattaagctaaacattagttcctattgatatctgcaactctaatccattaccacatggattcttctagcctcctctccttacttatctgtaaaatcccactcacaatgagaaacctggctcacactttctgccatccatttacttaattattcaagcccagtatacatatagaatagtatcagagagtttaacacctgtgctcatgggaaacaactttatcaactagagttcagtatttatgtacagttccttttgcctttagtcttacagactccactcactttcaagttacttttggagaaatcagctcccctcccccattcagtgaggacgttttataagtttataatacagtcagattctcttgtcacagtctgtgtttcttcccaggatcccctgatctcctaaatattttgttgttgttaatttacatacattgcttagattcactctttgtgctgtaagcttctatggcctttgatagatgtatgatatcatgttttcaccattacagtaacatgcagaataattttacaccctaaaaatccccctgtgctccacctattcagtcccccgctccttctgaaagtgccccggcaaccacttatcttttttctgtctatatagttttgcttcttccagaatgtcatctagttgggatcatacagtatgtagccttttcggctggcttcctttgcttagcaatatacatttagttttctccgtgtcttctgcatagctcatttttttcactgaataatattccattgtatggatgtaccatagttgtttatccgttcacctatcgaacaacattttggtcacttacaacttttggcagtgttaataaagctgctataaacattcacaggcaggtttttgtgaggatgtcagttttcaaatcagtagagtaaatacctaggtgtgcaattgccagatcacatggtaaggctctgtctttgaaagaaattgcaaaacagtcttccaaagtggctttaccattttgcattcccatcagcaatgattaagcatcctttttgctccacatccttgccagcagtttttggtactgtcactgtttggatttttagccattctaaaagccattgtaatcatattcattattttagtgtgcagctcctaaagacaaattatgttaaatatctttccttgtgcttatttgtcacctatatatattctttggtgaagtgtctgttaagacttgcccattttttaattgggttgtttgacttttttcttgttgaattttaagagtctttttataatatattttagatgcaagtcttttttcagatatgtgtcttacatatatcttctcctagtctgcctctcgttttcagagtctcagcatcttttgtagtaaagaagtttttaattttaataaactccagcttattcatttttttctttcatgaatcatgttgtatctaaaaactcttctcccaacctaaggttgcttagattttctcctgtgttatattctgaaagtttatgattttcccttttagatttaggtccatgatccattttgagttcatttttgagaaaggtataaagtctgtatctggattcacttctttttcgtgtgatgtctaattgttccagggccatttgtttaaaagactatgctttctccattgaattgctttttgcttttttttgtcaaagatctttgtcaaagtctaaatttggcccttgtatttatgggttccacatccatgtattcaaccaactgcagataaaaaatgttcaacaacaaggaaagaatggttgcatctttactgaaagcgtacagactttttctccttgtcattatcctctcaacaatacagtataacagctatttacatagcatttacattattctagatatcctaagtaatctagaaatgatttaaagtctacaggaggatgtgcaagggttatatgcaaatactatgccattttatatcaggaacttaagcatccatggattttggtattctagaagggtcctggaaccaatacccaatggataccaaggaatgactgtatatctgtgtgtgcctgtttcattgacctttgtgtctgttcttttaccaatgccaccctgtcttgattactgtagtttcataatgtagatttattttcaaatattgaatcagccttgctttcctgggacaaaccccacttaattttgatgtcttgttctttttatatattgctggatttgatttgccaatattttgttgaggatttttaccctgtgttcataagagatactgaactgtactcttttggtttctgactttttctggttttgatggtggagtaatgctggtctcataaaacactttagaaaatgttcctttctctggaaaaaattatgtcaaatcaatcttatttttaaaacattttatagaattcactggtaaaaccatcttggccctagaggtttctttttcagaagattgtaagctatgaattcaacttctttaataattataggagtattcagtttcatcttggataagtttggtagtttgtagtttttgatgcattggtctattcgcagttgttggattttagtacacagttatttgtaggaataccttattatctctttaatatctgtgggatctgtggcaatatcttctcttttattcctgatattgattatttgtttcttcttttctgtcagtcttttagagatttataaattttattgatcatttcatggaactcatttttaatttcttggattttactcttatcatttgtctgttttcaattttgttgattttcgcctttgcctttattatttcctttctggttgttttgagtttatttttctcttctttttctggtttcttaagttggaagtttagattattgagacctttcttttttaatatagacacttaatactataaattttcctctaaatattgttttagctttgtcccataaattttaatatgctttattttcagtttcattctgttcagtatactcttttaattttccttcagactttctctttgacctattgattatttagaagtgatatgtttactgttcaaatgtttggagaattttctattatggtttttgtcgatttctagtctaattccattatgatcagaggatgtaacttatatgattgcagtcattttgcatgtgttaaggtttatggcccagaagaatatggcatatctttgtcaatgttttatgcacacttgaaaagagtatagattctactgttattgggtggagtgttctgtaaatatccattaaatccaatcggttgataatattttttatttgtgtatctttgctgattttctgtcacctagttctattgattattgagaaagaggtgtttaggtctccacatataattctagatttgtctaattttccttgaattttttcatgagttttgaaatctgttgtaagacacatatacatttagaattgatgatttctttttgtgaattgaccctctcactatgtaatattcctttttaccctctgggaattttatttgttcttaagtctgctttgtcttttattaatttttttttacatttgtgtttgcatggtatatctttttctatccgtttacttttaacctacctacaggtatcatttgaagtgaattctttatgacggcattttcttgtgcatgtttttaaaaatctattgtgacagtctctatcttttccttggcatggttagatcatttacatttaatgtaattattaatgtttcaatttaggtctaacattttattgtttgtgccctctttttttcctttttcttccttcttttgggctatttttaacttgttttagtgttttgttttatttgttgtggtttttactatatctcttcatatagtttttctagtgactgttttagggattataatactttctttcacagtctaattagaatcactgttttacctttttaagtggaatatagaaatcttatgactatatagatccttttagctctcccattatgttataatatcatgcattatgtttacataaattgaaaatctcatttcatatgtcataatttttgcttttggctaataaacatatcttgaaaaacttgaggaaaatagcctgtaatagttttccatatacttacatttttcttactctgcctgcattcctgatgttccaagcttctttagagtaagtatatggataactataaccatcatttcccttttttctaaagaatttcctttagccattctaaagatcagatctactggcactgaattaccttagattttcctttttatcagcaaatgtctctaactctaacttcattcctgaaggattcttaaacatcggatatagaatcctgagttgtcaggtttttttctttctttcagcacttcaaaagtgctgttttacttcctctggactcagtagtttctgatgagaattccacattcaaatgactgttgccttgtacataatgcattgtttgtttctagtggctttcaagactttctctgaagctttcagcagtttgatcatgatttatctgggaatggatttctttgaatgtgtcctgtttgcagttttttgggcatcttaaatctacagttgtgtatcttttgccaaatttgacaaaattttagctatcgtttatttgaattttttcccgtactacactttttttcctctttttctgtaactccagtgacataaatagatctgttgaccttgtctcacgtgttctctttttgtctattttaaatacttttttttctgttgtttggatgattttttgttaacttggcttcagttttattgactcttttctcggcatctccattctactattgatcctatgcagtacagtttttaattttggttattgtatttttcaacactaaattttctactttattattcttgatagcttctatttgtgttttttcatttgtttcaagagtgtcttcccttgcagcatttttataacagatctcttaaactttttgtcagatgatttcaacttttgggtcatctcagccttggcatgagttgattttttccctggtgagtttatttttctgattatttgcatgcttggtaattttggattgtatcctggtcattttgaatattatgagactctgggttttatataaatcctacagataatgttgatatttttgttttaggaggtagtcaacctggttggatttagttagttcataagttctgaccagccttcaatatttgttcaattttcaaacccttttccgtcctcttaacatcagttcttttgtgcaccactcaccagccagtttgggaactggcagtgccgaattcttacagcagttctcaaagtctgtggtttagggtcagatacacatgtgcataggcggggaagtagacagctcacccgaacaggtgagtccagaaatctatcaacagctttttggtttgcttccatgaactccttttcctccacaatctttttggcactttttagttctcagggctccctcctcagtcccctggacagacagctggggcttttccccactccgctaaactcttcctattactaaacctcaatctgggtccaagcattaggaagacagaggtaaagagcaaagacatttcgcccacctcttagggggagcacacctcttcccatcagaaagggaccatctccccctcactggtttgggctcctgcggcccctgttgtcccccacaccacaggattgcttagggaggagctgacgttcaagggctcagagataacaccaaaaagggatgattcctcactcgccctgaacatagttgtctcagcccattttctgctgctataacaacactgccatctaggtaattgataaagaataggaatttattgggctcacagctctggaggctgagaagtccaagagcatgacgccggcatctgctgagggccaccccgtggtggaaggcattccatggcgaggaagcatgccagacaggagaaaaggggccagagtccctcagtaaccaattccagcagtaacagcattcatccattcctgagggaggggccctcatgacctaatcacatcttaacactgtcacagtggcagttgtttccaacacaggaacacattgaaaccttagcagcaggtgatgcttttccttcctcaaagtggattagagccgagcccctagggggctccccagctgtgccaggctttgcctccagggctcaggctgtagtaagttcgggctgaggacaacagagggataacccaggaagcccattcatcttttccatggtacttgaaattcttatcttctttccaaggctgccaactactactgactcttctcagccctcacgtagctgctctgtgccttctgcccaggttttataaagacattcagtagaagaaacaagtatagagtgcttgcttcattttacctggaaccagaatccccctttccctccatttgtgtttcaggttagtttattctggctgcttttgatggccagggagcattaggtcaaatagctgtgacttgtgccagggacaccagctcctggggattccccttccaggccagtggctgctgcacagggatgtcctgcaggagctgaggacctgctctttcttgctctctgttgctctttgttggccatggccacagcacagctactgagatgctctgcaagcatgacccggcaggtagcacctgtgtgtatgggcctgagtatgcccctgctagctgcagcctggctaaggaaaagtcccaaagcctgggctgctgaaggatgccccttccccccaggaagccacacggaccttgacaggtcaccacccatggagctgtgatggttgagggaaaggagactcctcctcaagaacttggaagcacaatggcctgcctcccaggaaagagagcctcagtgcttgtcggagccctgatctcagagagggccagctgcctggccagctctgctgttgcctgtgctctgagcctggccgtgtgcagtggacgcacaggtgtgtttgctgaggtggctcgtagcagattatcaccgaggagagatggacacccaggataaggaagtgatgagtctgagcacagcggtggcagagccaggctggtcccggtctgtgtcctcctgccgtgctctggtgtgtgttgtcttccttattggagctgggtttggctgagttggtccaggttcaggtgtcaggcctgctcagagccttgagctccactccatggcgtggcatgaaaacacctcgcataaaaacccagtgtctgtgacacaaaacgatttctcccgtgaccagcatgagaaaagggcatccagacccttggcggaggatgcacaatgcaggcagagggtttagaaaacagtcttctctgggtgaggcagttatggtgcacacatttaaatagctgcccaagccgaaatgaaaatagccatgtccttcagatgcagagactccaagatgcaggtcctctcccttgaccccagccacagaagcccagcccaaggtacccagcaccacaggacaggcaggaggaagggcgagtgtgggaaggagacaagggaagtggaggggtaagagaggaacatccagaatgtggcgttcggaggccgcgtcacagagccccaaggtctcggggctgccctctggggaggcccatggtgaaagagagaaggctgctggggttttttttgttttgttttttgttttttgagacggagtctcgctctgtcgcccaggctggagcgcagtggcacaatctcagatcactgcaacctctgcctcccgggttcaagtgattcttctgcctcaccctcccgagtagctgggactgcagacgagcaccaccacgcctggctaatttttttatttttagtagagatggggtttcaccatattggctaggatggtcttgaactcctgacctcgtgatccgcccgcctcggcctcccaaagtgctgggattacaggcgtgagccaccgcgcctggaccagaaggctgctgttttaatggttgcccctttgggccacctgaagtgattgttccagctgctgaggactgatgtggtcacctcaacctcaagaacttctattttccacatgagttaatgtctatgagtggatttcactccattatagaatatgatgcttaacagcaaggattgcccttcttcaagaacgggtgtcattcagccatgtgattctgcacaggctagggttcgaagcactgtgctctttgagagctgcttcaactaattactgcattcgttcgctgcagggtgaaacagagttttcagatacatttgtaaaatcaggtgcctgattgctaaatactacattgtttgagctatacttcctcatatgttgcctggtacggaccagttaagaaatggtttcccatgagaaactgacaatgaagctgaacatgtttgataaactctgtgctcatctatggacatataattgttttattatacgatacttttacacttggaaagaaaggtgctccgtaatttggcagcaatttgtcagagcagcactcaaggctggcgctcagatgaggcccttggaaccatgccattgtttctcggaactgctctgtgctccggttaggtttgcacacacctccctcgtttcattcctacaagtttagtaaagttccaggccgttctcccagaacacctaacggaaagcacagaaaacaaaaccaccaactctgtgttcgccgaggaaggcaggaaattggcctctgcttcttgcggtattgacgtgctgctttcattgtttcttttccaagacagctgtccccgaaatctctttacctccaagtcaacagcaggctaccttgctttgctttgcttttttttaaagttaggcataacaacaacagcaaccatgataatgattaacagtttgatttcaaaacgttttctgaagaaatgacagtaaacagtgcatttgcccagggaaatccaccaccccgccagccatcagccggtaatacaactgcatgtgctaatgaacccaaagctgttaatgtggtttcttcagttaaattgattcatgaattttgaagagaacattatctaatgaattttctttgaatagaaagcaattaaaaggacaaatcagtctgattaaccccaaagtcaccctcctgccacaaatggtgtacagtttgaaattatatcataaaaaactagagcacatttgctatctttttgccctctactaatccatgtaaattaatgaacaacaaagttaatttctttgatgacccttttctagtatcacctggattatgctgatgtttaatttgcttaatgttataataaagactaaacagatttttttcccagtgaagtgattatcgttcccttcagttaagaagtgatttttattatttaacacacatgtaagggtgtgtttcctttaagaaccaaatcacactttgccagcttggcaccaagtgtaattagtgttcttgtggacacactcagaacatcgttcctgcccgcggaagccttccctttgttgctgctattcagaaactcctgcccctggaggggctggagcccctgcgatggaggacatggctctgtctccagtgctcctgagctgcatgtcccccttggaaagacaataggtactgattcagacaggccttcttcgcgtgccccagtttctctcccaccgacaccactcccaggtaacagttctgaaacctggaggcagagggagagaatgttctcctgcagtcacctcctcattcctgcagcaggatgcggcacaaatgcagttggatgtggttagtcaattaaaatgggaatcaagtcattttatttttgcagccctattcactaaagatgcctgtaaccaaggtcaccgccagcccctgcgtactgtggtgcttggcactccgagcagtagctgggggaatcctgcacgcggctggaggtggacagccggcataatatcgcagcctggcctgtggctgcttttgccttctttgtcccagttgaagttggaaattaaccagcagtacaaaagatttccaagcaggcgggcaggcagggacttctgtgtgtattaattgagccatgagctcacttacacacgcccagtcgctagaagagtggcacacgcaaccccacgcggaacacgggaagatggaaagaaattgcaaacctgtggtgccagctccaaggatgccttccaaggggccagcctgcatggtggcctgccacatgcttgcgtctcctcgcctggtgacatggtggcagcagtgcatggaggccgtgttttaattgagtataatacctctatttgtgtagatgcgtttcctgttttgggactagtggctatttatatcagagctgctgaagccgtttgtccaaataacattatcctgcattcttcctttcagagtcgttcaccagacaggtgttatggaagctgctgaaggttgtgaaattcggagaagtgatttcttaccagcaattagcagccctggcaggcaaccccaaagccgcgcgagcagtgggaggagcaatgagaggcaatcctgtgagttctcatggcgcaagcatggctgtgggtggcgggtgcgtgcaggtggcagggtgtcatctgatcccacgtgtttcctcggaaggcaggctgtgctgctggggtgggcagaggggcgatatctgtgatggggaccattatgccagatgcctccagaagaggcaaggaggctaccccagcactacactcctggaagctcccccctaccgggagcacatctccactgcatgagctcctggttgtcacagtgagcaggagaggagggagcctggaggagtggcaagcgggcagagggtgccccacctgctcactcaggaggtggacgtgttgggtgcctgttttatggcccacactcttctaggtgcccagagtacagcagctaacagacagaaaggtctacctgcgaggtgcctgcatcctagcaggatggccaagcaagggtgcacatccaaccccatctctctgtgggctgcactccccctgaggcccagggctccctgggtcccaagagctaaagcaccacacgtgagcacacgaggcaggaggccttgcagcatgggacaagggacctagaccacacgcacctcgtgtctcaccagggatggcgccctccccagagcccttctgtgtcctcgtccttcccatgcgtctgcagtcagatttcactaaactccaggctcccaggctatgcagcctcaggccatgctccccagaggacaaggcccaaccgggacacagcatgggtggggcagcgtggcctgtggtgcctgggggccacgtgggtgccgttgctctcccatctcacagcacccaggcctggcagctgggccgcgggccatctggcatctggcatgaggtggtaagtcacagcatgccatgtgcgcccggccaaggccacacgtgcctgtgtgtgtgggggcagaaagggtgccccgtctgcgtggcccattgggagaacccacacaacctcaagaatgcccctggaatattcacccagtgatggtgtgtggtcacgttggcagtgtcttctcccgaaagctctgtgaaagtttctagcatgatggaagcataccatctgatcagggagcacaaatatgatcactccatcatgggatgggaaattactaaatcagatagacctcactttttgaaaaattgctgtggctttactgtctatttccaaaactacttatatccctgctcacaggggagaggccggcgtgttcataccacagcctgctgctcctgctgcccgctgcagcagcctgggggcagagcctccgtttctaggagatgacagttacgtaggcttttgcacaaaactgcattgttagtccttaaaaagcaactctggtaggtttgtagtggattgcattgtcgtaatgtacaccctaatctaggcgagctttctaccctattaaaatatcccaaatatcccaggagtgagataccacagggacagccaccatccccacctcctccatctcttcctgtcctcagttttggtgacagtggctggtgggcgcaattgacccttccttttgcacctgttgcacattaattgcaatgtcttcagctacattgtcataaaacatctgcaccacgcagtagggatctgatttttacggcgcgttgggggatatttccgaatcaaatttctgaggatggtttttgacatttcccaataaaacttaacctacatgcccctctggaaggctgctgtcttctccccggttgtgagtcaattttgaggtgttcaacctgatgaaaaggcagctcagatgctgttgtgttgtggctccgtgtagggcccatgagaactgtggatgcgaatggggttttgggggtgctcttcctgcatcagtgcagtgactgtttcaggcagtgtctactctttgtgccccccgaggagagtaagtccttgtcttctccccactgaggtggattctgctccctccgtgcacacacatgaagatgggagtggccccgtcagcgggcgccgactgctcgctcccttgtgtgtgcagctccccttttgctgtaaggacaagctccactaactgacatgtgcagcgtggcagcaccctcccccaccagcctttggtgatgccagcagtttctcactctgcagtggagatgccgtcgctggttagcaatcctgcttgtggcgatattcggagacatttattgttctgcaaaccagcgtgactctcttctcctgctattaatctctatgagtgtctctgttccagtatggcctcagtcactgaaatgtataaagtagtatcacatgggatgtaaaaccctaatgtctgtaaagtccacacatcggcaccctgtcccatggcaaagccaagactggaggtgagcacagcatcaggcaggagggttctacaggcaccaagtctcgcccttctcggcgtccacatgcctcctgtgccgagggcagccaggcggtggtggcttctcgtggcctttctgtgggctccaccgtgtgcagtgaccttcagcctgaggagggggctgcagcaggacctgtggctacggtacccacagacgcctcaaattatagcacagatatgccagagatattcctgcaagaagccttcagctacgtagtttactatggttcaggttgacagcctcccaagttcccattagaaacctcattagaatgggctaggaggatgaaaaggtgacccagggacttgctagaggaagggcgctggccagcagtgagccattgctgctgtcagtgtcctcaggaatgtttccctttggcgctgacagcagtgtcccagccggaaggctgcgcacatccactccagcccagacggtgcgtcgctgagactcgctcattgaaaacatcccttatattcaggatgaatagagtgattgtgcatttaagggaggagagtgaaaaatggacttggaatgttagaaaacatcgtaaagctcattgtgcattaattccttaggtggcttgcaataaacaggagcacgtgctggttcatattactgcatttgctgtcggcatgagtttctcttccccaaccggagtaagggatggcttttgccatgcggagctttcctctatcctaggagcttgatttctccagaatcctccaggaaggactcaccagccggtgtaaggtggttggtcagcattcctggaaggctgtctccccaactcagcgggagaggatggtcagtttcccagtatattgagtagaaaactcctcacgacccaccccctccacaaagcacccttcctcttcatcctcagacagaatttgctaaatgcagttcaaaggcaatcgatacattgcacagagagtctccccacctttttctgaacaaatgcattcctgaggagttagtttattcacggattgccatgagcgttaatgaccccccgaggcttgttctgcccgtcacccggatggctgctgataaagacttagcatcatgttctaagtgtcaaggttgtcagtggagctgaaccatttgaccagaagaaaaaaacgcacagggagctattgattacagcttctcggtgtcacttgttcaccaggatttaggtattgatgaggctgcgagtgaaaacaagctctttcccttgtgggctgctgcccagaagaacaaaggcgaagttggaaaaaatattcagccggtaccagaatcagagggattccatcattgactgaaaggccccttcatgttatttttgttggaaacaaatctatgggtttggaagttttatagcgtttgagaaaggggctgcataagtgatggattcacgtattggatgaattagatttcacagcatgaagatttcaatgcagctgtgatattatgagcttcttggttattgataaaaattacattttatgcagcacatgctttaaaggagagggcatagagggtacagatcctttgaaaatgtccttagggccccaataaatttcagcaggtttcattatcttaatagtctgaaacctgccaccaaaattcacacaaacagaagcagcgttccctatttctaacggtaaaaatagtgcctatttggtaagtcacctcttccccatcacagcatgctaaggtgaggaccggtcacagctgtcggggtcattgttattccgtgccatctgtcctggcctctgcattgatgtacaggaagagggagagggagacatgtttattttactcatttttataatttcatagctcattgagagggagagaagaaaaaccaaagctctgctgtgaaatctgctattaggtaggaaaattgaattggtgcctaaatgtttataaaactagattgaattaaatgcctacctctttatcagtcaaaaacgtgaattgtgtattatctaataatgccctcacagcaattattaatgggactgttgtatttgataaaaatcatcaatcagggtaaatattccatcctggagatttcctgtgactccttctggaagactgggattctcagctgttccagaacttggcagttactacacctcactctagtaaactcaatgttaaaaacagtcagccctccgccacctgcatgttcccatgtcatagtcgtcagaagcctcttagactgcgtcattggtgcacgttaccaaactcatcgtcaaattaggatgagctgtgtgatgtgccggaagccagagtcccaccttgcagccatgtcatctgctggcaccggctgtcaccccacaaggtcccacctcaacagtccacgtcaaggaggagaagtgtggtgcgtggagccatgcaggagagtggttagagccccttctttgccacttaacagctttatgaacttgggcacgagactccattcggccggaggctgagacaggcctggtggggccttgcggggtgatgggggccatagatggggtcgaagatgcagcagcatcaggcatgggcacacccgctcccaggggctttaagcaccttttccaaggggggctggggcttcccccacctccctcggggacgtgtgtagctgggccccacagagggccacacccaccaggtgaaatctgtggcaggtacatgtgtggcagtgacacaagctgcctgcaccaaaagcctcaggggatgcaaaagtagcagtcacctccccaggaagcagaggtgcccaagaaatagagcttggagatgctgggcacacgcccccagctgcttcctctaaaagctcacctgaccagtagctggttgctttgtccagttcactggctttggagggtggagcgtggggaagctgggcatgggcagaaatcatttctctgttgagctggggatacgctcagctggagagaaaaagaagagtggagtcggagtgatacccgggggtacccggagtgatacccggaggtagcctggacacgccccaaccttgggatcctgcagaaacagctgtttgttctcatcagggcaggatgctgggagcagggcagccatgtgtgagggcccagggagaggccccgggtctgcagcatccgtgtctgggccatctaggttgcggggatgaatgtgctgccctccagctcaggaggaagggaggaaggggggccaggcagtaagcgatcgttaggcatctcccatgtgccttctacgtgtcgtgccagctgagaaccttccagagcgagcttggtgcccttccccattcttctggagcctgccctggctcctgtggtcatgctcattggcagtttaccttcttcacggagcagccactgtgatgctttgcacgatgatgaggcatgtccccccacacgtcccccgagatgtcctggccccttagtggctgcccacccatacacctgctccccaggcgccaggagctacttagggatgaaggctgttgcctgggaggctctccagccaattctttctttagaaatctgtgcaagacttccccacatgctcctgggaagccattctggagcagatcttcacagtaactgcttgttgggaagcttaagcaaatggccctggagcccccagagcccccagagtcccctgcggtggccatgcaggctgtgtggccatccctgtctgcccaggcagagggggacaaccagagagatgcccatatgttactgccttgtctttcacctttctgagccagctgagaaatggatagcagacctcaagattttagctttattagggtaaaagcgagattgaaggcagggggtggggggccagtggcatggccatggtggcttcccagtaattcccacaagaattacattcgccatcactgtcccctctggctaagctctggcctccccagccaaggcaggggctgaccatctcagaagagatcagggcgccccgaaccctggggcaggcaggtcacctgcaggagccctaacagtgctaagctgggcatacccctctcttcctcccttgtcggtggtcagtgactcattctcccttgtgggtgtgagagtggaggaggccagcacctacatggaaaccagaggcaggggccacagcacctgcccccacccaccacaggtggctctcagagcttcagccagacagtggacccatggagctcctcctgtctacacagctcgggcaacgccaaaggaccaaagcagagtctccctgaggactgcactgaaggaggcgcccgcccctctggagggaacagggattcccttcccctggtgggactggccataaagaagcagttggtaggcaggatccggggcctgtgtatggctgcgtggttgtggtcctcactctggatcagcccctatcagcacagggcatcctgaggcaggggttggccaagtcctcctgtcaagggccagagagtaaatatgttaggcttggcaaagcagccacagccagtatggagaaaaaggcatggctgcgttccagtaaagcttcatttgcaaaagcaggtggtgggctgcgtgcgcccacagccacagttggccggccatgggctggagaggcccgtgcaggtacggtcttctctgatgcgtcctgtgatgcctgcgtggtacctggggagtgtttgagagcgtcacataccaccagaactcggaaacgtagttttcagttttgtaagcgaacgttgtatattactcaccggatgaaattaagttttctcctcccaaatcgtgggcctaaagcaattctctgaggatgccccacgtcacctcaggacactcgtccctcccccaacccgtgctgagacccccagggactcaagggcctcaggggaggggaagtccatgctgagacatagctgacacccacccatgccaacagcctgcccctggcacaggcccctgcttggtgggcacaggactcctgtcagtcagggccttggccttgaccccaaagacctcgttgtccagatccctgactgacagtggctgcccccctgtcttccaggtccccatcctcatcccgtgccacagagtggtctgcagcagcggagccgtgggcaactactccggaggactggccgtgaaggaatggcttctggcccatgaaggccaccggttggggaagccaggcttgggagggagctcaggtctggcaggggcctggctcaagggagcgggagctacctcgggctccccgcctgctggccgaaactgagtatgtgcagtaggatggatgtttgagcgacacacacgtgtaacactgcatcggatgcggggcgtggaggcaccgctgtattaaaggaagtggcagtgtcctgggaacaagcgtgtctgccctttctgtttccatattttacagcaggatgagttcagacgcccgcggtcctgcacacatttgtttccttctctaacgctgcccttgctctatttttcatgtccattaaaacaggccaagtgagtgtggaaggcctggctcatgttgggccacagcccaggatggggcagtctggcaccctcaggccacagacggctgccatagccgctgtccagggccagctaaggcccatcccaggccgtccacactagaaagctggccctgccccatccccaccatgcctcccttcctggctgtgtccatggctgtgatggcattctccactcagcagttcctagcatcccacacccaggtctcactgaaagaaaggggaacaggccatggcagtcagtgcttacagaggttttctagctttgtttcctacctgccaaaaaggctaatgcaagatgcatccacttatggtctgtatcaggtgaatagaaaataaccatttgccaagatttggaaagacagagagctctctggacacgggttcgatggagcttgcacctctctgagagctgaagtcaagtctcaccctctctccatactccctggcctagtgtgctctgggcagcaggtaggaagggacagggacctctcatctcaagggctgccccaaagggccctcagggaccatgggcctgttaggaccccagcaccccagtgtcgatcctggaagtcaaaggtcacgactgtggggggccagctcatgtcactgatggcagcaggcagggtttccagcatgggcggtgcgctgctgtctgatacttcattattgtgttgtcatcctagctgtataattaactatatccaaaagccggaagggaaacctgtagctctgcatatggagaaataaaacagagcatatgatgtatagagaaaatgaactgcacccagctgtgcactagagcgccatgttcttacccagcattccttgccacggtgtgaaccacagcagggaagctcgcatggttctacacgtcaccgaggcctggatgaaaatgtggcctcacgatgtgtatggttgggacccgccttctatttcattttatcttaacaccaacgaaagaaaaccgatttcagacgtttttcgctgatttatgatttattatatccctttctggcatcagccaaaatctcggtttttcctatgacatgaagtgatgtgactcttaccccgttgtcttaactcttggtatttttgaagcaggataagtcacacagcgggtcacgtagacacgtgctgttttgtgggacaggccctgggcctccttgctcctggcaggcctcaggtgccgcacgccgcgtcaccgtcaggactcgcaggctgtctggtcatttttgacgttgctgaaggtgagtgggaaaagctgggtgcactctgccccaaaggtggtgccctgtgtcccccacagatgatggccctccccagtgatggccggtcaccaggcacggctttcccctctgcatgaacagaacagaagcttctggctctccaaggcagcagcttggggcctggtggcccgggtgtgcgagccgcgagtgctttccaacagagggcaccagagccgtgcggtgtgctgtggagaccccagcaccacttcccctgctggaggatggatttgaaggagggtggctgggcggcaccccgatggctccctgtgctccctgagaccctacaggccgccctctgcagccacacctggaccggcaggcatgcacgctgcaggcaggctgcctccgctgtttgggtcccatgaacgatggaagcctcccagtgagatcttcaggtctctcatcaggcacaggctctgagggagggtcctggggccacatgactgcagccagcgagggccgagcccccagaatccaggtcagctcctggtggcaggggacctgcccgtcaaagccgtccaaggtgagccagcaaatccgtgtggcctgggagcacaggtgggcctgctcggaccatgcccttggtgcagtacaaaaccatgttctgcttcctctccgagggtttccgcggccctgtcagaacaggcttgatagatgcccggaggttccctctgacagccgcagcagcagggctcaaaccggcggggccgtgtaccgctccaaggacaagctctgccgaggccgacatgaaaagccagcacgcgggtcgcctagagccgctctgcctccaagctgcagcgccgttcgtgaaaatacagagggagagggaaggcacaaagaaatacaaaactattttccaaataaaaagaaatgtcgaaacaagaaagctgtgttcttcagccttggccctgggtccccctcaccctgtcgcatttcccagcactgtgatgctttgaaggccgacaccgagacccgccgtgcacgacagccacctcgcagccactcagaccggcggaccacgctcccctgtttccagagagatgagagagtcagaagtaatacttgtttttgcagaaccacacttgtggcaaaataagttgcctttggccacgcaggagactgagttttgtgaggggttgtccttctcccagtctctcttcccgctgggaacagaagtgtccagtaaacccacctgcattccacgtgtcctgtggccgcctccagtggtgagtctgtgaggccagagaagagaagctatgaccgtgcaaacatgcatgttatggtgttggctgatgcggaatcaggaagcttggaggagctcttgcatgaggaattgcagaacttaggggcatgaatttgcacttccagatgtgaaggttgcaggcaccgggcgttgcagaggaagtgggcaagctcaccttgtagagaacttacttggggtttgtaatttgtatacacttcttacccagcagaaacagcttactgaacacccctcgggtggctggatgatgtgctagcaactgaaaccatctctgcgacttaagcttctctggtgcgtcgcgccccacgtgcttctccagaatcccgtttggaggggccaagcaagtccaatatagataggtttatactgaagccatcagttttgtttcttacatcgtttgtaaacagcagtattatcctggaacttgtttcctacagaactgtaagataaggataaaatcccatccacctgaattgctgagaaacgtaagaggtggtgtgacccgctggagccctgtggagtggcggactctggggagtagctggtcagtgagattctcgcagcaatgtgaggcatcctcctcacagaaatgcatttacggatgttgctgtatcccctgacctggcctacaaggacagaacagccctgggggccacgtcccctcccggtctcatctgccgcttgctcaccttggctgtccatgcacccgtagctgtgaccatgggcggtggcgccagctcggacttcaccccgttggagcgggcaggatgtcacactgagctaatgtgagattgttcatgaagctacagatcttagtgctacttgggcttctcacagcacagaggaggattctgaagtgagagataaattggcttcatgtatgagcaagggggaaagtgttttattttactaggaagattttactgaaagaccaatcccgaaacggcccttgcttcggccacagctgctgggatgtcctcgggcctcccctgtttgtctgcatgtcttcttgttgccatcggggcagtggagtccccggaaacagtccaaggccctggggtgggggatttaaatttttggcttccctcagacctcagaccgtgtgggtttttttttctttctttctttcctgttcatgggcatttgattaaaagtttgtgtttaaagagctgaacttcacatcagttttacttatcagtttgaaagacattgagatctaaacacggctctgcccaagacctctgccaagcagcgccgtctgtctgtctgtctgtctgaagggacgggaaggtggagaaactgcaggtactgacctgtctctaagccactgagggcagccatccagtgtcctcgggaccccatggctccagctgctgacagatgtgaaacgtctggcctccatcacccgggtcgccccgacaaggatctgtaatgggggcaggggtgggggtggatgagaaagtaggaagtggatgctgggcagcgaggtgtgaactgacggcagagcccagcccgacagcacctttgattgatgaaaggacattgttaacaagcctttaaagtttctcattaatgtttttttcgttggaaaaaaaagccaccagaaaaaaattccacatggacagtaattaagatcgatcccgtacagtatggtatcaatgtttgggagcctttaggaaaaaattatccaccctcctattaaagacttattttcaagctgccattttccaggctgttgaaagtccctggcagtgtgggtacctgggcagtcaggcacgttccgcagatgtgatgtggtcggcctcacaggtaatgtttctactgtggcctgaggatggagagtggagcccctgagctttagttgtcacggactctgatgcagtcaggcaaggaagggtggggaaggatctgatggatctgctgccatggagaagctggagttcttctcagctccgagtgagccccaaggagtgcgtctgagcagagtgcacgtggtgcccatggttctcaccagagatgctcaagcccttgggcgagggggctgagccagccccgacattgtacacacagcaccacacacgggcatacccaacggttctttacaggtcttcgagttacacgtcactgctgtttggatcccaaacaccagcggaacgcatgattccaggttgatttgttgactcacattaaggaaacccagctggagaaagtatcagggtcctaacgttaagcaacctgcgatattatgcaaaaaggattgcttttgtgtgttgtgattgccatggctacgagaagaaatggatgcacgtgtgagacttggctggtgacaaggaagcatgtatggacatggaatcaggtcctgagcaagcaggcggtcctccaaggcggtggaattggccctggatccctgcccaaaggccgctccgctctgggccttggtgggaaagctctgccctctaggctggcctctgagagggctttggtgtgaccttcctgtcactgcccactttctaaccagacaaggagggtgtctgtacctggcgctaacccagggtttgggggaccgtcctgcagtccccgtcggacagagaaggcttcgtttctcaggagctccaggctttgattcactcccacgatgtgtttctttttggggtaaaacagtccccacggggagttaaattttaggaagccatgagatccttccagatgaaaggcatcatgtaagtgtatgatactgttactgagcaaaagccccagtgctcccaggtgtggcaacgagacacctgcactcaccgggcaccacccagccggggcgggcgctccccgggactggcaggttctctaggtgtggcagtgagacatcactcaccgggcaccacccagccggagtgggtgctctccgggactggcaggttctccaggtgcctccttcctcttgcagctttgctcactttgtcaattttcaggaaggggaattttaaatgtccccccagtcctgaagagattgagcagcattttcaggaggaggcctcaccatcatcattgccacactggccataaaccagagactctgctggagaaaccctctgcagaccttggaggcctcacacatcccagttacgggcagcgcagctgtcccctccggagaagattcctctgcaatgggaa

SEQ ID NO: 490 - DNA, 43058 bp, Homo sapiens
  misc_feature 1..43058: note = GenBank Accession No. Z84721
  source 1..43058: mol_type = genomic DNA
gatcacgccattgcactccaccctgggcgacagagcgacgagaccccgtatcaaaaaaaaaaaaaagaaagaaagaaagaaaaaagaaaaaaaaaaggccgggcgcggtggctcacgcctgtaatcccagcactttgggaggccgaggcgggtgaatcacgaggtcaggagttcgagaccatcctggccaacatggtgaaaccccgtctctacaaaaaaaaaaaaaaaaattagccgggcgtggtggcgggcgcctgtaatcccagctactcgggaggctgagacaggaaaatcgcttgaacccgggaggcggagcttgcggtgagccgagattgcgccactgcactacagcctaggcgacagagcgagactccgtctcaaaaaaaaaaaaaaaaaaaaaaaacacttggaagccgacaggagatctttgagaccttgggcgaggcagtgacactaaaggcaggagcgactacagaagaataaattaaacttcatcagattaaaaactttactgcggccgggcgcggtggctcacgcctgaaatcccagcactttgggaggccgaggtgggcagatcatgagatcaggagatctagaccatcctggccaacatggtaaaaccccgtctctctactaaaaatacaaaaattagctgggtttggcggcgcctgcttctaatcccagctactcgggaggctgaggcaggagaatcgcttgaagccgggaggcggaggttgcagtgagccgagatcgtgccactgaactctggcctggcgacagagcgagactccatctcaaaacaaaacaaaaacttcggtgctttaaaggacaccatcaagaaaattaaaagtccacccacagaacgggagaaaatatttgtaagttacatatctgataagggaattgtatctagaatggaggaaacttacaactcaacaataaaaagacaattgaaaaatgcacaaaggatatgaatatttttccagtgcattatgcaaatggccaataagcaccagaagatgctcagctcaactggtagaggcttacgcctgtgaccccagcgctgagaggccaggaactccagaccagcctgggcaaaacagaaattaaaaatgctcaacattattaggcattagggagatgcaaatcaaaactacaaatagatgccacatcacacctcctacgatggctgtaatcaaaaagacaagcgtcagcaggggtgtggagaaacgggaatctctctcctgctggtgggaatgtaagaggctacactcgctatggaaaacaggctggcagttcctgaaaggttagagttaacacaacactcggcaaatcccccttttagatatatagccaagagaaatgaaagcatatgtccacacaaaaacatgtgtgttcttagtaatattattcataatagcccaaagtggaagcaatcctagggtatatcaattgatgaatgggtgaatatggtatagtttgtttaagggaatactattcagccataaaaaggaatgaagtacggcacatgaatccatcttgaagacacactaatatatgattccatttatataagatgcccagaataggcaaatccatagagacagaatgattagtggctgcctagggcttccagggggtcaggggaaatatggagcgattcatgggttttttgaaggggagtgatgaaaatgttctaacgttgactgtggtaatggttggacagctctgagaacgcgaatacactaaaagacatggaagtgccgggcgcagtggctcatgcctgtaatcccagcgctttgggaggccaaggcaggcggatcgcgaggtcaggagatcgagaccatcctggctaagacagtgaaaccccgtgtctactaaaaatacaaaaaattagctggacatggtgcgggcgcctgtagtcccagatactcaggaggctgaggcaggagaatggtgtgaacccgggaggcggagcttgcagtgagccaagatcgcaccattgcactccagcctgggcgacagagcgagactccatctcaaaaacaaaaaaaagatatggaagtgtacacttgaagtggataagctttatggtatgcaaattggtatggtatggtaaattatatctcaatgaagttgttttttaaaaaatcaccccacctaccctatcccaggcttccccaggaggtaactaaaggtaatgagcttctttggctgcttccagaactttcccaagcacatcaaatgcatcagaacctaaccacttgactgagggatgagcattttcactgttgcaagtaaccctcttgcaccaacactgacactaatgtgtattttgcagaacaaatttgtggattggcctcaccagggtgaagggtacgtgcatttgaaatggctcaacagtaccaacaggtgcgttttcttgcacagggctgcataacattttttttttttttttgagacagagtctcgctctatcacccaggctggagggcagtggcacaatctcagttcactgcaagctccacctaccaggttcacatcattctcctgcctcagcctcccaagtagctgggactacaggtgcccgccaccacaccaggctaattttttttttttttttgagatggagtcttgctctgtcgcccaggctggagtgcagtggcacgatctcagctcactgcaagctccacctcccaggttcacaccattctcctgcctcagcctccccagtagctgagactacaggcgcccgccaccacgtccggctaatttttttgtatttttagtagagacggggtttcaccgcgttagccaggatggtctcgatctcctgacctcttgatccacccgcctcggcctctcaaagtgctgggattacaggcgtgagccaccgtgcccggcctgcataacatttttttttttcctgaaattcccagaaaggaaaatggtgtcttgttctatgttgcatttctttgattgagagggagagctgcatcacttaattatttgcagagaattgcttttcttgttttctttacaggtggtctgttcttggatggtctggctgtgttctttctgaggaatacataacctctgctacacattttgcaaggctttatccccgttgtccatgttttgattttatgtataatcaaaaggtttgtgagttctcccgcacttcccaggagtgcctctgggatggaaatgagactgcaggagcagggcttgaggctggaggggtgagatgggacagatgggggtgggggaacccagggcagtggccggtggtggtaatggaggcctcctcacagggaccctcacagcgaccatgcgaatggagcaggactgtgactcaggtctcgctcttctgacctaatcgtgctgctgccccaatgggcagaaccttggggctccagactggacatctctgggctcaaaggatcccactgttcccccggttaccctctcagggttggcctcctgccagtaaccctggcactcattgttcattcttctgactatcgtcagtcataatgagagctcgaactggtgaaagtgcagggagctcaccatgaccccagcccacagaggtcctgggtgcgtccctgccctcgaagcagcactctggatcccagcgccaccctcatgtccatgtttgcacctcattggctgtgacagaaatgagacatcattgtcacacgctggcctgagggtcagtgggccttgctttggacctcagtttccccaccagtaacagggttcagagcagatggtccctgagtgagtcccagctctaagttctcccagggtctcctggacaatgaagcaccagggccaacctccatttgctacaggggacatcctcaggctcttctctgctaagaccccacacctccaagtctcctcattttacctttaaatagctgtttcatgacctgcttttttgacggtaagtagatttttggaaactgaaacccctgacccttcctcccagcctgggcctgcccttggcaggataggaggccttatcggtcctgccacttggtctgggcctcaaagggccaccgccatctgcaggagggccgggtggggttcacagacgctatctgggacttgcctggacacctccaccttctcagctgagtgttgctgccccaccagggagaaccactcacacacagtagtaatagaaataatttaaaattcatgctgcaagttcctgagcgccctcccaacactgaggtgggggctagtctaatccccatcctagaggtgaaaacagtgaaactaggactcacaaggcaaattagcctgttcagggtcaccgagggtccactctcatgggagagtttgcagatgcccaatccggcattctgctgagtgtccagtggcttgtaagtggccagacaccctttgagctcagcctcagctgctcaggcacagaacgtgcctggagcttggaattcaggccagaaaccaccagtggacaccagcattccacactcactgcacaggctggggctcaaaccaaggcccagggacaggaagggacaagccccagccccagccggactcccagcccacacaaaccatcagggcttgtttcctgctccatggaagcctcagacatgtttcataacctcctggagcctccgtttccttatctttccaatgtaatgatgcccatgtgcagtggctcacgcctgtaatcccaagcactttaggaggccgaggtgggtggatcactggagctcaggagtttgaggccagcctgggcaacatggcaaaacgccatctctactaaaaacacaaatattacccaggcatagtggcacatgcctatagtcccagctactcaggaggctgaggtgggaggatcacctgagcttgggaagttgagcctgcagtgagccaagattgtcacactgcactctagcctggaggacagagtaagaagaccctgtaacaaaacaaaacataacaaaacaaacaaacaaaaaacccaactaatgacaataaaataaaccctccctcacagggtggttgtgaggataaagcacccagaatgaagagtgttgctgccatgtgcagaacttagaaagtgctcaacagatgccagccaaacagacatggactcccctcaacacagtcaacccaaggttgactgtcaccaaacgcaaaagaccacactgtaaagcttttagaaatgtggtctagtggccgggcactgtggctcatgcctgtaatctcagcactttggaaggctgaggcgggcggatcacagggtcaggagttcgagaccagcctgaccacctgaccaacgtggtaaaaccccgtctctactaaagattcaaaaaattagccgggtgtagtgctacgtgcctgtaatcccagctgctcgggaggctgaggcaggagaatcgcttgaacccaggaggcggaggtacagtgagctgagatcgcgccattgcactccagcctgggagacagagagagactccgtctcaaaaaaaaaaaaaaaaaaaaagttagccgggtggtagtggcatgtacctgtaatcccagctacttgggaggctgaggtaggagaatcgcttgagcctgggaggtagagggttgcggtgagccaagatggcgccactgcactccaatctgggcgagacactgagaccctgtctcaaaaaaaaaaaaaaaatgtggtctaggagactctcttcactttgagataaaatttgcatcacgtaaagataaccattttaacgagagcaagtcaacggcattcagcacattcagagtgttgtgcaacaaccacttctccctggttccaggacattttcatcgcctcagatggaaacgccctcctcacggaggcatctctcccggcctttgtcctccccggccctgacaaccactaatctactttctgctgggatttgcccattctggatgtttcctaaaaatggcttatctaagccccacagtttcatgcagcacgtagcctctggtgtgtgacgtccttcacttggtgtaatggttcgaggcttgtccatgtcgtagcctgggtcagaacttcattttcatggctgaataatatctcacggtgtggaaatatcacagtttgcttatctgttcatccagtgatggacatttgggttgtttctaccttttggctattgggaatggaagggataacattttttaattggatttttaaagtcactagtttgactgcattaaaattacaaacttttgtttaacgagaatatcactaagatacagagttggggagatctaacacataaaagtgacaaaggaattatatccagaatatttttgaaatttctacaaatcagtgactggcaacacagtgggaaagtggccaagactaaaatactttaataaagaggaaaccgaaatggccagtaaatatgggctcaacctcactaattatcaggaaaatgtaaattaagaccacaagagaaaccactacacactcaccaaaaatcacacacccaataaaaaggtaatttttttttttttttgagatgaagtctcactctattgcccaggctggagtacaatggcgcgatcttggctcactgcaacctccgcctcctgggttcaagcgattctcctgcctcagcctcctgagtacctgggattacaggcgcacaccaccacacccagctaattttgcatttttaagtagagacggggtttcaccatgtgggcaaggctagtctcgaactcctgacctcgtgatctgcccgccttggcctcccaaagtgctgagattacaggcatcagccactgtgcccggcctaaaaaaggctaaaatttaagaagaccaggagtttgactgctatggttggaatgtttgtctcctctaaaactcttgttgaaacttaatccccagtgtggcagcgttgagaggtggggcctttggggtaaggaggttggatcatgagggtcctcccccaaggaatggattaatgagttgtcatgggagtgtggctggtggctttataagaagagagacctggccgggcacggtggctgacacctgtaatcccagcactttgtgaggccgagatgggcggatcacaaggtcaggggatcgagaccatcctggctaacacagtgaaaccctgtctctactaaaaaaaaaatgcaaaaaaattagccgggcgtggtggcgggcacctgtagtcccagctactaggaaggctgaggcaggagaatggcgtgaacctgggaggcggagcttgcagtgagccgagatcgcgccactgccctccagcctgggcgacagagcaagactctgtctcaaaaaaaaaaagaagagagatctgaggtggcacacaagcatgctcagcccacacgacctgcgattaatactctgtgccactttgggactctgcacgagtccccactgggctcgaaacttctcagcctccgtaactataggaaataaattccttttaaaataaattccacagtctcaggtattctattataagcaacagaaaatggagtactacaccgatcatatcaaatgtttagaaggatttggagcaaggagaatgctcgcacaccactagggaaaacataagttggttaaccactgtgaaaaagtttggcattctttactaaagttgaaaatctatatgccctatgacccagcaactttactcctaggtatgtatgtacaaaatagaatttcaggcatgtgggtaccaggtgacatgtaaaggaatgtttattgcagcattattcataatagccaagaactaaacaacacaaagttccagccccagtacaatgaataaactgtggtatattcctacaaggaaatattaatagatacagcaatgaaaatgaacacatataacatggctggtaaatctgacatgagagagtgaaagaagatggacattcagtgtgcagacagttggattaaaaatatttttttaaaggccaggcttggtggctcacatctataatcctagcacttacagaggccaaggcgggcagatcacctgaggtcaggagttcaggaccagcctggctaacacagtgaaaccccatctctactagaaaatacaaaaattagccaggtgtggtggtgcatgcctgtagtcccaactactcgggaggctgaggcaggagaatcacttgaacctaggaggcggaggttgcagtgagccaagatcgcatcactgtactccatcctgggtgacagagcaagactgcgtctcgaaaataaatagataaataaataaataaccaacaggccgggagcagtggctcatgcctgtaatcccagcactttgggaggctgaggtgggcagatcacgaggtcaggagatcaagaccatcctggctaacacagtgaaaccctgtctctactgaaaatacaaaaaaattagccgggcatggtggcgggcgcctgtagtcccagctactcaggaggctgaggcaggagaatggcatgaacccgggaggtggagcttgcagtgagccgagatcatgccactgcactccagcctgagcgacagagcgagactccatctcaaaaaaataataattaaaaataaataaattaaataaataaataacagattgcataaagtggctcatgcctgtaatccaagcactttgggaggccaaggcagaaggatcacttgagcccaggagttcaggacaagcctgagcaacatggtgaaaccccacctctacaaaaaaaaaaaaaaaattagctgggcatggtggcatgtgcctgtgatcccagctacttgggaggctgaggcaggaggatcacttaagcctgggaggtcgaggctgcaatgagctatgatcgtaccactgcactccagcctgggcaatagagcaagaccctgtctcaaaacaaataaacaaaagccagacagacacaaatgagagcattctgtatcgtttcatttctatgaaggtgaaaagcaggcaaaaacaaccaaagtgcttgcagatgcatatctgagtagttaaaaacttactgaaaagcaggcctggctcacgcctttaatcccagcactttgggaagcgggcggatcacgaggtcaggagatcgagaccatcctggctaacacggtgaaaccccgtctctactaaaaatataaaaaattagccaggtatggtggctagtgcctgtggtcccagctactcgagaggctgaggcaggagaatggcatgaatccgggaggtggagcttgcagtgagctaagatcgtgcaactgcactccagcctgggcagcagagcgagactccctctcaaaaaaaaaaaaacttactgaaaagcaagaagtcaggtggaggttacctttggggaggattggggtgctgtccgctttctaataattcgttaaactatagtctacatcttgtgctatatttcacaatggaaaaacagaaaagagctcctgcccataacgctgctttgcaggtttggaaatttcagattcaattcctctccttgcgggggccaaggatgggaagagcaggtggttccagtagggaaagaggaggccctggggcctcaaaatggctaaggaccattcctcagcgtgggtggcacctaccctggaaacaggactctacttcctcctctgttagggggcagagcagccctgcagtgccttctgggcacaggtcctcactctgcagctggaggaattctcccaggcactgagagcccttcacggcccaaatgccccgtgcgctcggcctctggacttgccttccctgctctgtatatctccctccgcctgaccctcagcctcctccatcactcactgtcttctctgccagtctattcatctgtctctgtccctctctctgccaccttctctcctattgagaagccgaaacctcaggcacagacccacatcccctcctcatgggcccatgtgcccaaggtgcccctaggtgccaggctgagatgaaccaggagtgtccttctgaacccagcaacagcgaagggtgaccagggagggccagttcatctcggtctgaaagaagccccagatgagcaaaggatacactggcctcctgcggtcagcagcacttcccaggacagtgagcaagacaggggtaaggccagagtgggtgggcacacccatgggagagaggagccgctgtgaaatgtgcacgaggaacagaccagcaaggaggatccacgcagtgctagaagggagttcctggaagcctggtggagagcccctcccatctgctaagcccggagggcatcaaaggctgctgctgccctcaacccctgacaatctcatcatctcatatctcaggcatggaagaatgagggccattacacgagtaaaacatcaagtacactccagcctggatgacagggccaggctccatctcaaaaaaaaatgcctgtggtcaaagctctcctgacaggggaaaacaaaacaaaacaaacttctccttaaagaaaacatttgcctttgactgcatcataattccagcaggattttgtgcagataactctttggctaactctaaaattaatacagaaaggtaaagaaattagaatagccaaagaaattttgaaaaggaagaataaagcgagaggaatcacattcctcaatttttaacagctctattgagataaaattcacataccatacggttcacccatttaaagtgtataattcaggccgggcgcggtggctcacgcctgtaatcccagcactttgggaggctgaagcgggcagatcacctgaggtcgggaattcgagaccagtctgaccaacatggagaaaccccgtctctactaaaaatacaaaattagccaggcgtggtggctcatgcctgtactcccagctactcggaagactgaggcaagagaattgcttgaacccgggagacggaggttgccatgagccgagatcgcgccaccacacccagctgccattttttaattgattacttgtctatttattactgagttgtaagatattttgggccaagcacggtggctaacgcctgtaatcccagcactttaggaggctatggtgggcaaatcacttgaggtcaggagttcgagaccaggctggccaacatggcaaaacaccatctctactaaaaatacaaaaaaattagccaggtgtggccaggcgtggtgactcacgcctgtaatcccagcactttgggaggccaaggcgggtggatcacctgaggtcgggggctcaagaccagcctgaccaacatggagaaaccccgactccgctaaaaatacaaaattagccgggtgtggtggtgcatgcctgtaatcccagctactcacgaagctgaggcaggagaatggcttgagcccaggaggcagaggttgtggtgagctgagatcatgccattgtactccagcctgggcgacaagagcgaaattctgtcacaaaaaaaaaaaaaccattagccagccatggtgatgcacacccgtggtcccagctactcaggaggctgaggtatgagaattgcttgaacccaggaggcagaggttgcagcgagccaggattacgccgctgcactccagtctgggtgacagagcaagactctgtctaaaaaaaaaacaaaaacaaaaaagatattttgtatgtgtttggataacttccctatcagatatatgatttgcaaatatgtttctctcattctgtgagacatcattcaattttaagacatcacagagctatgttaatcaaggcactgtggctgtggtaaaggatagacacacagaacagaacagagagcccagaaatggacccgcaaacctatgccccattcattttttacaaataagtgcgagaagccaactgaatagaaagcgtatagctttttcaaaaaacagtgctggaacaattggacatctgtaggcaaaaaaacaaacaagcaaacagaagaatctggacctgcccttcacacctcagacaaaagtcatctcaaaatggattgtagatctcaatataaacataaactatacaactttagaagaaaatataggtgaaactctttgtgttctgtggttaggcagacagttcctaggcatggcactaagtaagattcatttaaaattttttgacaaattggactttattaaaacttttgctctacaaaagacaatattaagagaatgaactaacaagctacaaactaagagaaaacatttgcaaattgcatatctgacaagggattgcttccagacgatacacagaattctaaaaattcatccttaagagaataaaccacccaatttttaaatgggcaaaacaggccaggcgtggtggtgcacgcctgtaatcctagcactttgggaggccgaggcaggcggatcacaaggtcaggagattgagaccatcctagctaacacggtgaaaccctgtctctactaaaaatacaaaaaattagccaggcatggtggcaggtgcctgtagtcccagctactcgggaggctgaggcaggagaatggcgtgaacctgggaggcggagcttgcagtgagtggagatcgcaccactgcgctccagcctgggcaacagagcgagactccgtctcaaaaaaaagacaaaatacttgaaaagatattggctaggcgcgctggctcatgcctgtaatcccagcactttgggaggccaaggcgggtggatcacaaggtcaggagttcaagcagcctggccaagatggtgaaaccccgtctctactaaaaaaaaaaaaaaaaaaaaaaaaaaaattggccgggcacagtggctcatgcctgtaatcccagcactttgggaggctgaggcaggtggatcaggagtcaggagatcgagaccatcctggccaacatggtgaaaccccatctctatgaaaatacaaaaattagccagagatgatgccgggtgcctgtaatcccagctactcatgaggctgaggcagaagaatcacttgaaccagggagtcagaggttgcagtgagctgagatcgcaccactgcactccaccctgggcgacaaatcgagattccatctcaaaaaaagaaaaaaaaattaaaaggaatatttgcctcattatgttacaataactaatatggaaagcaatattgcaatgcctattagcacatgacattaggtgaattctcctttgtccccggacctgctgcctcctcctgcttgtcaggggacagatccagtacatctcccctcagcgctgggtggacctaacccttgctttcttggaggaaacccaggaatccagagacaaagtggaagggtactggcatgtggttgggcagggctgcctgaggtcggtgtcagccgaccgtggggcttggtcccaggaggctgcttactgggccctgctcctctggtttcccccaagtcgtgattctgaaatgaataaggacggtgcagaactggactacaaatgcaggagtgacttcctgggagggtggggcccctatctctcctagactctgtggtcagactctggccaacaccccctgtaaggccacaggagaggaacaggagtgatagcccccaaaccccagtcccaccaggccctgagggcccctttgtcactggatctgataagaaacaccacccctgcagccccctcccctcacctgaccaatggccacagcctggctgggcccagctccctgtatataaggggaccctgggggctgagcactaccaaggccagtcctgagcaggcccaactccagtgcagctgcccaccctgccgccatgtctctgaccaagactgagaggaccatcattgtgtccatgtgggccaagatctccacgcaggccgacaccatcggcaccgagactctggagaggtgagtgtcagacgggactgccagagggactgggtgggaggccaggtatgtgagtggggacagtggggagggggcggtggggaggggacagtggggaggggaccatggagaggagacagtggggagggcactgtggggagaggacagtgaggaggggaccttggggaggggacagtgaggagggaaccgtggagaggggacagtgaggaagggacagtgaggacagatagcgttccctctcagtgaggagagcagggtaaggagggaacgattaggagttgcacaaccatctgggctcgctgagacctgggcaggcacaggcccaggttctgacaagcagagggtgaaaggtttcgttctaggcctgaagggccttacagggcagccagggcactacagcctctaaagtcccagcatctgggatcagggcactgtcccagcttcaaattcccagcatctgatcccctgggaggggccagggagcttttccttccctggaacgctgctgggaggtcatgagcctgcagaaggggtggcgggcaacccagtctggggctgggagggaggtcctgtggccagaggagacggtggaggggctgggggcaccaggcgtgctggaggcggagggcgggagatttggggaccaggctgcacagaacccgtcggaagcagggcgatcagccgggagctgcagaggcctggggggcctctagcccagggcagcctgggaggggcagctgcctgggcacccgggccccgcgaggaggggctggggcctgctgcggggtcgcagatgtgtcccggtgctcggagagggccgcagggcgcgtgggccgtggcgggaggccgcgctgctgggagctcacggcccccgccccccgtcccaggctcttcctcagccacccgcagaccaagacctacttcccgcacttcgacctgcacccggggtccgcgcagttgcgcgcgcacggctccaaggtggtggccgccgtgggcgacgcggtgaagagcatcgacgacatcggcggcgccctgtccaagctgagcgagctgcacgcctacatcctgcgcgtggacccggtcaacttcaaggtgcgcggggcgcggtgcgggcggggcgggacggggcggggcgcggtgcgggcggggcggggcggggcggggcggggaggggcggggaggggcggggtcgcggggcggatgcgggggtcgccgggcggggcccgggctaggccccgccccctcactgagccgcccccgcccccagctcctgtcccactgcctgctggtcaccctggccgcgcgcttccccgccgacttcacggccgaggcccacgccgcctgggacaagttcctatcggtcgtatcctctgtcctgaccgagaagtaccgctgagcgccgcctccgggacccccaggacaggctgcggcccctcccccgtcctggaggttccccagccccacttaccgcgtaatgcgccaataaaccaatgaacgaagcagcgtccacctggtctctgttgtccgtgggcggcgggcgcttggggaggcggagcgggaggagggcgccccggctgtctcggggccactgctgggccgcagggatccttgcaccgaccccagggtctctaagaggcagagggatgtgcagctcccggggcgggagcgggggtcactcgggacccaggcgtggtggagaaggggtgcagttaggcctttgcggaggggggagcagtgctggcgcccacccgccgcggctctccctgggacctccgtggtcttccttctttatttctcccgaatgtgtactatttcctgatttcagaacgatcaggacgaagaggggagggatgggcgtctgcgctcactcattccttcttccattcctcaatgaaacatttactgggcataagacagcctaggcatgtttctaggctatggataccgcagctgaaataaagaaagccctctgccccgtggggctgacaatctagtgggggatacagacgtgatgaagacagtcagatcacagttcacagaaatgagacaggaaaagaggctgagcctcactcataagagaaacgcaagttaaactacacaaaaataaaaaacctcactgagatccatgtctcacctccctgataggcaaaaatccaagagtttgatcagactgcaggcgcccctcctccactgggcacccctcatccagggcagagggaaccagcccggggcgcaagtccaccggggcatctcatttgctaaagacctgaaaacccaggtgtccatcatcaggactaactggaaaaaccaagggtatccgcaccatggagagctcgactgaaaaaaaaaaatgaggataattggataatttctttttttttttttttttttttcagacggagtctcgctctgtcgcccaggctggagtgcagtggtgcgatcccggctcactgcaagctccgcctcctggtttcaagcgattctcctgcctcagcctcccgagtagctgggtctacaggcgcccgccaccacggctggctaattttttgtatttttagtagagacggggtttcaccgtgttagccaggatggtctcgatctcctgacctcgtgatccacccgcctcggcctcccaaagtgctgggattacaggtgtgagccaccgcgcccgacctaaaatgaggataatttctaataatgaaaataaagaggttagaatggtgtgtatacaatggtggaacagaggagaaacacgaatatgtgtgtgcacatatatgtgagcttatgcataactatgtatgaggctgcgtgtggacatgtgtgtttgtgcacaaccatgtatgtgcccgcatgtgcttatttctgcaaaaataaaccatggcaggacaaaccggaaatgaatacaaataataaggtgggtggggatggaggggaaggtggaaggaagctcctgcaagtctgactctctacatagttttgacctttgatttgtgtaaatattttacattatcaaaaataaattcaggctgggcatggtggctcatacctgtagtcctagcactttgggagtccaaggggagaggattgcttgaggccaggagttgaaggccaccctggccaacatagagagaccctgtctttaaaaaaaattacaaaattaaggccgggcgcggtggctcacgcctgtaatcccagcactgtgggaggccgaggtgggcggatcacgaggtcaggagattgagaccgtcctggctaacacggtgaaaccccgtctctactaaaaagtagaagaaattagccgggtgtggtggcgggtgcctgtagtcccagctacttgggaggctgaggcaggagaatggtgtgaacccgggaggcggagcttgcagtgagccaggttcaagccactgcccttcagcctaggtgatagagtgagactccttctcaaaaaaaaaaaaaaaattacaaaattaataagattaaaataaaaagaggggccttgccagtggctcaagcctctaatcctaccacttgggaggccaaggctggaggatcccttgatgccaagagtcggaggccagcctaggtaacacagcaggacctcgtctcaaaaagattaaaaaattaactgggcatggtagcctccaaattgggggttagcctgggaggtttgcccaggaaggaattcaagggcaagctggtggtgttacacagcaactctgattgatatcgaagccacagcagacagcaggagcagaacactgctccttacagagcaggggtaccccataggctgtgtgcacaggagagcaactcagaggcactgctgcactcatctttatacccacttttcattatatgcaaattaagggaaagttatgcacaaatttctaggatgagtgtggtaacttctgggtggtccagtcactgccatggaaagggatggtaaactcccatggcacactggtgggtgtgtcttatggaaagctgcttctgccctacttgttttagctggtcctcagtttggtccggtgtccgagcccaacatccggagtacatgcagagtcccacctcctacgtcacacctgcagttccagctactcaggaggctgaggctggaggattgctggagcccagatgttgaaggctacagtgagctatgattgtgccaccgcacttcagcctgagcaacacagcaatactctctctctaaaaaagcaaagcacacaaacaaaaagagtgactgggtgcagtggctcacacttggaatcttagcactttgggaggccaaggtgggatggtcacttgagcctgggagttcaagaccagcctaggcaacatagcaagactttatctctactaaaatatatatatattttttaattagctggacatggtggtgcacctgcagtcccagctacttgggaggctgagttgggggtggaggggagtatcacttgagcccagaagttccaggctgtagtaagctatgattgcaccactgcactccagcctgggcaacagagagagaccttatctatatttaaaaaaaaaaaaaaaaagagagagaaaattgaaaactcctaattgaaaacccccaaattgaaaactaacttaaataaatgagccaatgtaagaatgtggtgatataataatcagaaaaaaggattgttccaggtgacctctgaacacagaacctcggctatgaccgaaagaactccaaagacactctaacactccgtggtttattgttcctcataacatatataaaataatttcataagcttttattttgaaacatattcagattatgaagaaataaaaacaccctgcaagaataagacaaagatggagaaggaaggatgactgctggtgggtttggggcttttggagggtgatggaaaccttctaaaattgattatggtgatggtcgcacaattatgtgaacacattaaaaattattgaaatgggccgggggtggtggctcacccctgtaatcccagcactttgggaggccaacgcgggcagattacctgagctcaggagttccagactaacctggccaacatggtgaaacccccgtccctactaaaaatgcaaaaattagccacgcatggtggcacatgcctgtaatcccagctactggggaggctgaggcaggagaattgcttgaacccaggagacagaggttgcagtgagccgagattgtgccactgaactccagcttggccgacagagtgagactctgtctcaaaaaaaaaaaaaattattgaaatgtacacattaagtgggtgaattttatctcaataaaactgttaaataaaataacaagaatatgaaaaactcttgaatactactcatccagactctccagctgttaacattctaccacatcggcttgctctctcttgcccccacttgctctttctctcggagcccttggagaggggtatgcaaatatccgtactctaaatatcctccatatactgtgtatttcctaaaatcaacaaggacattaggctgcacagccagagaacaaccatcaaaatcaggttaatattgatccaaatccatctatcaacagaagcaacatcaagttcaagacccttttgaaagcaatgataccagccatttactccatccctaaaggactgagggtgctgcgaatttaaccgtatcaatgcagtctttttgatgttatttactgaaggaaatggatgttctttaaaatatgtatttatttatttttcttttttgagacggaatcttgttctgtcgcccaggctggagggcagtgggacaatcttggttcactgcaacctctgcctcctgggttcaagaggttctcctgcctcagcctcccgagtagctgggattacaggcgcgaaccaccacgcccggttaattttggtatttttagtagaggcggggttttaccatgttggccaggctggtctcaaactcctgacatggtagcctgtaatcccagctactcgggaggctgaggcaggagaatcgcttgaacccaggaggtggggttgcagtgagccaagatcgtgccattgcactccagcctgggagacagagcgagactccatcaaaaaaaaaaaaaaaaaaaattcctgaagctcctcttgagcttacattctagtggactgtaaacagaaacatttttttttcctgtggataaagaaaagcagggcaagtaggggcttagacagaggaggggaggattcagattttaaatgggttggccactgtaggtctattaacgtggtgacatttgagggagtggcaatactagggaaggggcttcaggggagtggccaggagctagggatagagggagggaggacaggaggccttgtctgtcttttcctccatatgtaagtttcaggagtgagtggggggtgtcgagggtgctgtgctctccggcctgagcctcaggaaggaagggcagtagtcagggatgccagggaaggacagtggagtaggctttgtggggaacttcacggttccattgttgagatgatttgctggagacacacagatgaggacatcaaatacatccctggatcaggccctggggcctgagtccggaagagaggtctgtatggacacacccatcaatgggagcaccaggacacagatggaggctaatgtcatgttgtagacaggatgggtgctgagctgccacacccacattattagaaaataacagcacaggcttggggtggaggcgggacacaagactagccagaaggagaaagaaaggtgaaaagctgttggtgcaaggaagctcttggtatttccaatggcttgggcacaggctgtgagggtgcctgggacggcttgtggggcacaggctgcaagaggtgcccaggacggcttgtggggcacaggttgtgagaggtgccctggacggcttgtggggcacaggctgtgagaggtgcccaggacggcttgtggggcacaggctgtgagggtgcccgggacggcttgtggggcacaggttgtgagaggtgcccgggacggcttgtggggcacaggtttcagaggtgcccgggacggcttgtggggcacaggttgtgagaggtgcccgggacggcttgtgggacacaggttgtgagaggtgcctgggacggcttgtggggcacaggctgtgagggtgcctgggacggcttgtggggcacaggttgtgagaggtgcccgggtcggcttgtggggcacaggttgtgagaggtgcccgggacggcttgtggggcacaggttgtgagacgtgcccgggacggcttgtggggcacaggctgtgagggtgcccgggtcggcttgtggggcacaggctgcaagaggtgcccgggacggcttgtggggcacaggctgtgagggtgcccgggacggcttgtggggcacaggctgtgagggtgcccgggacagctcgtggggcacaggttgtgagaggtgcccgggacggcttgtggggcacaggctgtgagggtgcctgggacggcttgtggggcacaggttgtgagaggtgcccgggacggcttgtggggcacaggttgtgaggatgcccgggatggcttgtggggcacaggttgtgagaggtgcctgggacggcttgtggggcacaggctgtgagggtgcccgggacggcttgtggggcacaggctgtgagaggtgcctgggacggcttgtggggcacaggctgtgaggatgcccgggacggcttgtggggcacaggttgtgaggggtgcccaggacggcttgtggggcacaggctgcaagaggtgcccaggacggcttgtggggcacaggttgtgagaggtgcccgggacggcttgtggggcacaggctgtgagggagcccggcacggcttgcagctacagggagaaaagacttggtgctgtgggcctgccttggggctggtggtacagcccttatctgctgccctcaggatctcccggcccctctcgtccaggcccctgcaaccccatgccccagcctctgaggaccaaaggcgcccctgcttgggaagagggggctcaggggagtcgcctgacccggttccaagccaggctgatttaccgttgctaacatcctatcgcacgcatccctctgcctcatgcacccaaccccaaggcctggtacactgcaggccccaaggtcctgtgcgtcctttcaataccctcctcacctgcctcacctgccccccctaccctgactctggctggagaccccctccagggagttttcaaaacaaagggtgtcagtctcctgtgggattccctcacctctgcagcctgcggtctgaaagctgccccatggtgtgtagtgctaaacttccaacttactccaggccagcggtgacagcccgagggcaggaagggcacccacactgagcctcaaacagctaattttgcaactgtaagtccatataattgtcttgaaaagtaatttgtttcaaaaagctaaaaaacgaatactcttgagtctccttctagtaattccccttctagaggtctatcaccaggaaaagatccaaagcactgatattcttcatggagttgtttataatagaaaaaaactagagcttgttcacaaaggggagctctgcaggctgaagatgttgcacctgtcagcggggatgggggcacgcttgctgacgcagcaacggaaaagcatcagtgtgtgaagatgcattttctctctttctattattattatttttatttttattttttctgaggcagaacctcgctctgtcacccaggctggagtgcagtgatgcgacctcatcacaaccacgagccaccatgtgcggccccatgagcaagccaccacgcccagcctttttttcccttgttttaaaaaatcctctatttaaaaaagatgtgcatgggccgggcacggtggttcacgctcataatcccagctctttcagaggccgaggcaggcagatcacctgaggtcaagagttcgacaccagcctggccaacatggtgaaattccatctgtactaaaaatacaaaaattagccaggccgtggtggtgtgtgcctgtaatcccagctactcaggagactgaagcaggagaatcacttgaacccaggaggcagaggttgcagtgggtcaaaatcatgccaccacactccagtctgggagacagagcaagactccatctcagaaacaaactaacaaacaaaatttttatatctacctataattcgtataaatttaaaatacatgcataaaatcataccctttgcaagcacacgtactaactaaaaggaatatattcagcacatagaaatggttgtctaacggaggaggggggagttaataaacagagaggataaaaagaaataaatcagtagagctggaggagggtctcctccaggctgcgatgagaacatagtgagcagaattgcaggcctgcatgacctcaccttctgtgaggagtccggcctcccaagacgctttcctgcctaggtgcccggctcagagtgtcccctacaaggctactggaggagaaccccagaccgagcctcattcaggtgagggggctgcacaccggaggtgggagaggtctgtcccttcccaccctgtgacactgggtcccactttctctctagggggtctcggtttcctcatttgcaaactggagctcataaggtgggccagagaagtttcagtgaagtgaggaatggatcgtccctctgccagggcccatgtgctctaggtcaccctgtcatcacagggacagggaggtcaaggacagtcactcctgaggccagtccgggctgggctgaccacgtggactctcatgcccagattggggccccaatctccctgaagctggggctccagctgtgactcaggggtgggcagaaggggagacagaagcgataggttcctcagcccccagtcccacctgagggcccctttgtcactggatctgataagaaacaccacccctgcagccccctcccctcacctgaccaatggccacagcctggctgggcccagctccctgtatataaggggaccctgggggctgagcactaccaaggccagtcctgagcaggcccaactccagtgcagccgcccaccctgccgccatgtctctgaccaagacttaggggaccatcattgtgtccatgtgggccaagatctccacgcaggccgacaccatcggcaccgagactctggagaggtgagtgtcagatgggactgccagagggactgggtgggaggccaggtatgtgagtggggacagtggggagcgggcagtggggaggggaccgtggggaggggacagtgagtaggagacagtggggagaggacagtggagaggggacagtgaggaggggaccatgggaaggggaccgtggagtggggacagtgaggaggggaccatagggaggggacagtggggaggggacagtgaggaggggaccgtggggaggggacagtgaggaggggaccgtggggaggagacagtgaggaggggaccgtagggaggggacagtgaggaggggaccgtggggaggggacagtgaggaggggaccgtggggaggggacagtgaggaggggaccgtgggaaggagacagtgaggaggggaccttggggaggggacagtgaggaggggaccatggggaggggacagtgaggaggggacaatggagaggggacagtgaggaggggactgtggggagaggacagtgaggaggggaccatggggagggcacagtggggaggggagagtgaggaagggacagtgaggaggggactgtggggaggggacagtggagacagatagccttccctctcagtgaggagggcagggtaaggagggaacgattaggagttgcacaaccatctgggctcgctgagacctgggcaggcacaggcccaggttctgacaagcagagggtgaaaggtttcgttctaggcctgaagggccttacagggcagccagggcactacagcctctaaagtcccagcatctgggatcagggcactgtcccagcttcaaattcccagcatctgatcccctgggaggggccagggagcttttccttccctggaacgctgctgggaggtcatgagcctgcagaaggggtggcgggcaacccagtctggggctgggagggaggtcctgtggccagaggagacggtggaggggctgggggcaccaggcgtgctggaggcggagggcgggagatttggggaccaggctgcacagaacccgtcggaagcagggcgatcagccgggagctgcagaggcctggggggcctctagcccagggcagcctgggaggggcagctgcctgggcacccgggccccgcgaggaggggctggggcctgctgcggggtcgcagatgtgtcccggtgctcggagagggccgcagggcgcgtgggccgtggcgggaggccgcgctgctgggagctcacggcccccgccccccgtcccaggctcttcctcagccacccgcagaccaagacctacttcccgcacttcgacctgcacccggggtccgcgcagttgcgcgcgcacggctccaaggtggtggccgccgtgggcgacgcggtgaagagcatcgacgacatcggcggcgccctgtccaagctgagcgagctgcacgcctacatcctgcgcgtggacccggtcaacttcaaggtgcgcggggcgcggtgcgggcggggcggggcggggccgcggggcgggcggggccgcggggcggggtcgcggggcggggcggggtggggtcgcggggcggggcggggtcgcggggcggggcggggcggggcggggcgggcggggcggccggggcccggcggggcggggcggggcggggaggggctgggcggggcggggcgcggggcggggcgggccgggccggggcggggtcgcggggcggggtcgcggggcggggcgcggggcggggcggggcggggtggggtcgcggggcggggcccgggctaggccccgcccccgcactgagccgcccccgcccccagctcctgtcccactgcctgctggtcaccctggccgcgcgcttccccgccgacttcacggccgaggcccacgccgcctgggccaagttcctatcggtcgtatcctctgtcctgaccgagaagtaccgctgagcgccgcctccgggacccccaggacaggctgcggcccctcccctgcccttcaccctcccacagttcctgccctgactccaataaatggatgaggacggagcgatctgggctctgtgttctcagtattggagggaaggaggggagaagctgagtgatgggtccgggggcttcgcaggaactcggtcgtccccactgtcgtcgcggcctggggttcacttggggggcgccttggggaggttctagcccctgagcaccggagctgcggcccgggtggagcggagcagtcccgggccggcccgcggcgtctcctggggtccttgagtcggacgggcgtttgtgcgtctcccggcttcccatatcgcacaaagattgtcacttcactaagcgtattggaagcgtgtcggggctcagggaacttttccacaaagcctgacgtccgaatcccgggactctggcagctacgggggtccctgaggccggtccctccccgactcctaagagagtagggggtttcctgcccggtgttctctctccggttcctcccatgtgctccctcctggcagagcagtaactttacccgaggggagtaaacagatgcccctaaagtctgcagtaaaggtgcccacgcgcaacggcgtgggtcaatgccagaaaccctgggatcccggaggtcgaggcctccacacagacgggaacccgggctggttacgttccccggcgcaggccgagggtccccgcgttcccgccgcgctcgggccgataaggacgggcggggtgcccggaggctctataaggaggccagggcggcgggcgcggcccccagagcacgtcaggcggcgccatgctcagcgcccaggagcgcgcccaaatcgcgcaggtctgggacctgattgcgggccacgaggcgcaattcggggcggagctgctgctcaggtcggtagaggcggggtctccgggagctcagggaggtggagatgagggttttgggcgcgtgggccgccaacgccatccaaggtccttcgggtgcggatccccgggctctgggcggtgtgggcgctagtgaagccccacgcagccgccctcctccccggtcactgacctggtcctgcaggctcttcacggtgtaccccagcaccaaggtctacttcccgcacctgagcgcctgccaggacgcgacgcagctgctgagccacgggcagcgcatgctggcggctgtgggcgcggcggtgcagcacgtggacaacctgcgcgccgcgctgagcccgctggcggacctgcacgcgctcgtgctgcgcgtggacccagccaactttccggtgaggcctttccggccggggcaatggtgcagcgcgcagccggggtgggggggctctgggggtccctagcggggcagaccccgtctcaccggccccttctcctgcagctgctaatccagtgtttccacgtcgtgctggcctcccacctgcaggacgagttcaccgtgcaaatgcaagcggcgtgggacaagttcctgactggtgtggccgtggtgctgaccgaaaaataccgctgagccctgtgctgcgcaggccttggtctgtgcctgtcaataaacagaggcccgaaccatctgcccctgcctgtgtggtctttggggagctagcaaagcgaggtcactattgttggccagtgaagctcagggacctaaaaggagcctcctagaactctcaaatgcgccccacccccggaggtttgtcctcccatggcgaggagtgcgatggggcagagggagcactgtgatgtggcgggggtagggagggtggccttcgacttcaacccttgaatcgggcttccaaccatactgttcgcaaagcacttccccattcacgcatttattcattcattctccctccatccccacttcctgctgggacctgtagatgctaatcctggccctttttgcagagagatgcagaaactgaggtcccagagccaaatgtgcaacctaattcgttggcccagagcagagggctccgcagacctgttcctttccccttccttcccccatggacacttcctcagtggcaaacctgcgctagcctggttagccctccctgtgaccctgcagccctggggatgaggtcgggaggaagtcctcagtggccacaatttggcagacagagcaggtttagtcttccagcctgctcaatgacaagctgtgcgaccctgggcgtgtcccagagctctcaggcctttacctatcgaatagaaaaacaacgtccaactcacgagatttttgaaataatttttgaaatcataacacagggtgggtgcctgcagggtcgttgccaccccacccctccacccagccccagctgccgtgtctcaatctctgcaggtgcccaggccaaggcactcccttccccaggttccctcttctccctccccaggactgggaagggaatcttagggctccaccccaggcttttcagacaaagaataggggctgaggaaagagtgggaccttggaggtctccaaaccctgaatagggttggctctgggttggccatcctgggtctgtgtggggagcactggaccaggcctggcacccaggtctgacctggcagtcagcaacgaggtctgaagagagctgctggaagtggagccctgactgtgagtcggccaaactccccccagcagtcagtgccagtgacctgttgccctgcactgcctgggaccccagcccggtagtttggagaacttggccccacgttatctacatcccccaactgtttttttgtttttgggggttttttttttttttgctttgtttttgtttttgagataggcccttgctctgacaccccggctggagtgcagtggcacagttttggctcactgcagcctcaacctcctgggttcaagcgattctcctgcctctgtctcccgtgtagctgggattacaggcatgggccgccattcctggctaatttttgtatttttaatagagacacagtttcaccatgttgatcaggctggtctcaaactcctgacctcaagtgatctgccctcctcggtctcccaaagtgctgggatgacaggcgtgagccaccacacccagcccccgcaactgtttacatggataattaacagctttttgtcccaggcagagtttggtgtgaaagcagcttatgtttcactttggaaaaactgtgctcttctccccatccaggaagctgcctgggtctgggccatatgtggataccttatgggtataagctgctcaggaccctgtgtggaagctcaggacaatgccagcgggaaggctaccatgtggagagctggtctctgtttgggcaggactaagagacgcagggcagccttgggcaacctgtctactctcactcactcctcctcccctttcctgtgccaggcacctcctggcaacttgccagccaatgaccctgcatcccaggcataagagctcctactctcccccacctttcacttttgagcttacacagactcagaaataagctgccgtggtgctgtctcctgaggacaaggctaacaccaaggcggtctgggagaaagttggcaaccacactgctggctatgccacggaggccctggagaggcaagaaccctcctctccctgctcacaccttgggtccaacgcccactccagggctccactggccacccctaactattcttaccctggacccagcccccagcccctcactctttgcttccccctgaagcatgttcctgaccttcctctcacttggccctgagttatggctcagcccagatcaagaaacaatgcaagtaggtggccgacacgctgaccaatgccgtggtccacttagatgacatgcccaatgatgtgtctgagctgaggaagctgcatgtccacgagctgtgggtggacccaggcaacatcagggagagctttgggctgggaggaatctagggtgtgggggcagctggccttcctcataggacagaccctcccacgcgttcagggaggtggagcacaggtggcagtagtatctgcatcccctgactctctctccacagttcctgggtaaatgcctgctggtgacctaggcctgccacacccttcccagtttacccatgtggtgcctccatggacaaattatttgcttttgtgagtgctgtgttgacctaaaaacaccattaagctagagcattggtggtcatgccccctgcctgctgggcctcccaccaggccctcctcccctccctgccccagcacttcctgatctttgaatgaagtccgagtaggcagcagcctgtgtgtgcctgggttctctctgtcccggaatgtgccaacagtggaggtgtttacctgtctcagaccaaggacctctctgcagctgcatggggctggggagggagaactgcagggagtatgggaggggaagctgaggtgggcctgctcaagagaaggtgctgaaccatcccctgtcctgagaggtgccaggcctgcaggcagtggctcagaagctggggaggagagaggcatccagggttctactcagggagtcccagcatcgccaccctcctttgaaatctccctggttgaacccagttaacatacgctctccatcaaaacaaaacgaaacaaaacaaactagcaaaataggctgtccccaatgcaagtgcaggtgccagaacatttctctcattctcaccccttcctgccagagggtaggtggctggagtgagggtgctggccctactcacacttcctgtgtcatggtgaccctctgagagcagcccagtcagtggggaaggaggaaggggctgggatgctcacagccggcagcccacacctggggagactcttcagcagagcaccttgcggccttactcctgcacgtctcctgcagtttgtaaggtgcattcagaactcactgtgtgcccagccctgagctcccagctaattgccccacccagggcctctgggacctcctggtgcttctgcttcctgtgctgccagcaacttctggaaacgtccctgtccccggtgctgaagtcctggaatccatgctgggaagttgcacagcccatctggctctcagccagcctaggaacacgagcagcacttccagcccagcccctgccccacagcaagcctccccctccacactcacagtactgaattgagctttgggtagggtggagaggaccctgtcaccgcttttcttctggacatggacctctctgaattgttggggagttccctccccctctccaccacccactcttcctgtgcctcacagcccagagcattgttatttcaacagaaacactttaaaaaataaactaaaatccgacaggcacggtggctcacacctgtaatcccagtactttgggaggctgaggcgagaggatcacctgaggtcgggagtttgagaccagcctgaccaatatggagaaaccccagttatactaaaaatacaaaattagctgggtgtggtggcgcatgcctgtaatcctagctactaggaaggctgaggcaggagaatcgcttgaacccgggaggtggaggttgaggtgagctgagatcacgccattgcactccagcctgggcaacaagagcaaaactccgtctcaaaaaataaataaataaataaataaataaactaaaatctatccatgctttcacacacacacacacacacacacacacacacccttttttgtgttacttaaagtaggagagtgtctctctttcctgtctcctcacacccacccccagaagagaccaaaatgaagggtttggaactcagcccatgggccccatcccatgctgagggaacacagctacatctacaactactgccacaggctctctttttggacaaaaataccatcatactgtagatacctgtgtacaacttcctattctcagtgaagtgtctcccctgcatccctttcagccagttcattcagctctgcgccattccacagtctcactgattattactatgtttccatcatgatccccccaaaaaatcatgactttatttttttatttttattattattatttttttttttttttttgtgacggagtctcgctctgtcacccaggctggagtgcagtggcacaatctcggctcactgcaagctccacctcgcaggttcacgccattctcctccctcagcctcccgagtagctgagtagctgggactacaggcgccccccactacgcctggctaattttttctatttttaatagagacagagtttcactgcattagcgaggatggtctcgatctcctgacctcgcatctgcccgcctcagcctcccaatgtgctgggattacaggcgtgagccaccgcgcccggccttatgtatttatttttttgagacagagtctcgctgtgtcgtcaggctagagtgctgtggcacgatctcggctcactgcaacctccaactccctggttcaaaggattctccagcctccacctcccgagtagctgggattacaggcgtgcaccaccacacccagctaatttttgtatttttagtagagacggggtttctccatgttggtcagcctggtctcgaactcccgacctcagctgatccacccgccttggcctcccaaagtgctgggattacaggcgtgagccaccgagcctggccaaaccatcacttttcatgagcagggatgcacccactggcactcctgcacctcccaccctccccctcgccaagtccaccccttccttcctcaccccacatcccctcacctacattctgcaaccacaggggccttctctcccctgtcctttccctacccagagccaagtttgtttatctgtttacaaccagtatttacctagcaagtcttccatcagatagcatttggagagctgggggtgtcacagtgaaccacgacctctaggccagtgggagagtcagtcacacaaactgtgagtccatgacttggggcttagccagcacccaccaccccacgcgccaccccacaaccccgggtagaggagtctgaatctggagccgcccccagcccagccccgtgctttttgcgtcctggtgtttgttccttcccggtgcctgtcactcaagcacactagtgactatcgccagagggaaagggagctgcaggaagcgaggctggagagcaggaggggctctgcgcagaaattcttttgagttcctatgggccagggcgtccgggtgcgcgcattcctctccgccccaggattgggcgaagccctccggctcgcactcgctcgcccgtgtgttccccgatcccgctggagtcgatgcgcgtccagcgcgtgccaggccggggcgggggtgcgggctgactttctccctcgctagggacgctccggcgcccgaaaggaaagggtggcgctgcgctccggggtgcacgagccgacagcgcccgaccccaacgggccggccccgccagcgccgctaccgccctgcccccgggcgagcgggatgggcgggagtggagtggcgggtggagggtggagacgtcctggcccccgccccgcgtgcacccccaggggaggccgagcccgccgcccggccccgcgcaggccccgcccgggactcccctgcggtccaggccgcgccccgggctccgcgccagccaatgagcgccgcccggccgggcgtgcccccgcgccccaagcataaaccctggcgcgctcgcgggccggcactcttctggtccccacagactcagagagaacccaccatggtgctgtctcctgccgacaagaccaacgtcaaggccgcctggggtaaggtcggcgcgcacgctggcgagtatggtgcggaggccctggagaggtgaggctccctcccctgctccgacccgggctcctcgcccgcccggacccacaggccaccctcaaccgtcctggccccggacccaaaccccacccctcactctgcttctccccgcaggatgttcctgtccttccccaccaccaagacctacttcccgcacttcgacctgagccacggctctgcccaggttaagggccacggcaagaaggtggccgacgcgctgaccaacgccgtggcgcacgtggacgacatgcccaacgcgctgtccgccctgagcgacctgcacgcgcacaagcttcgggtggacccggtcaacttcaaggtgagcggcgggccgggagcgatctgggtcgaggggcgagatggcgccttcctctcagggcagaggatcacgcgggttgcgggaggtgtagcgcaggcggcggctgcgggcctgggccgcactgaccctcttctctgcacagctcctaagccactgcctgctggtgaccctggccgcccacctccccgccgagttcacccctgcggtgcacgcctccctggacaagttcctggcttctgtgagcaccgtgctgacctccaaataccgttaagctggagcctcggtagccgttcctcctgcccgctgggcctcccaacgggccctcctcccctccttgcaccggcccttcctggtctttgaataaagtctgagtgggcagcagcctgtgtgtgcctgggttctctctatcccggaatgtgccaacaatggaggtgtttacctgtctcagaccaaggacctctctgcagctgcatggggctggggagggagaactgcagggagtatgggaggggaagctgaggtgggcctgctcaagagaaggtgctgaaccatcccctgtcctgagaggtgccaggcctgcaggcagtggctcagaagctggggaggagagaggcatccagggttctactcagggagtcccagcatcgccaccctcctttgaaatctccctggttgaacccagttaacatacgctctccatcaaaacaaaacgaaacaaaacaaactagcaaaataggctgtccccagtgcaagtgcaggtgccagaacatttctctcattcccaccccttcctgccagagggtaggtggctggagtgagggtgctggccctactcacacttcctgtgtcacggtgaccctctgagagcagcccagtcagtggggaaggaggaaggggctgggatgctcacagccggcagcccacacctggggagactcttcagcagagcaccttgcggccttactcctgcacgtctcctgcagtttgtaaggtgcattcagaactcactgtgtgcccagccctgagctcccagctaattgccccacccagggcctctgggacctcctggtcttctgcttcctgtgctgccagcaacttctggaaacgtccctgtccccggtgctgaagtcctggaatccatgctgggaagttgcacagcccatctggctctcagccagcctaggaacatgagcagcacttccaacccagtccctgccccacagcaagcctccccctccacactcacagtactggattgagctttggggagggtggagaggaccctgtcactgctttccttctggacatggacctctctgaattgttggggagttccctcccctctccaccacccgctcttcctgcgcctcacagcccagagcattgttatttcagcagaaacactttaaaaaataaactaaaatccgacaggcacggtggctcacgcctgtaatcccagcactttgggaggccgaggtgggaggatcacctgaggtcgggagtttgagaccaccctgatcaacatgtagaaaccccatctatactaaaaatacaaaatcagccgggcatggtggcccatgcctgtaaacccacctactccggaggctgaggcaggagaatcattttaaccaaggaggcagaggttgcagtgagctaagatcacaccattgcactccagcctggaaaacaacagcgaaactccgcctcaaaaaaaaaaaagcccccacatcttatcttttttttttccttcaggctgtgggcagagtcagaagagggtggcagacagggaggggaaatgagaagatccaacgggggaagcattgctaagctggtcggagctacttccttctctgcccaaggcagcttaccctggcttgctcctggacacccagggcagggcctgagtaagggcctggggagacagggcagggagcaggctgaagggtgctgacctgatgcactcctcaaagcaagatcttctgccagacccccaggaaatgacttatcagtgatttctcaggctgttttctcctcagtaccatccccccaaaaaacatcacttttcatgcacagggatgcacccactggcactcctgcacctcccacccttccccagaagtccaccccttccttcctcaccctgcaggagctggccagcctcatcaccccaacatctccccacctccattctccaaccacagggcccttgtctcctctgtcctttcccctccccgagccaagcctcctccctcctccacctcctccacctaatacatatccttaagtctcacctcctccaggaagccctcagactaaccctggtcaccttgaatgcctcgtccacacctccagacttcctcagggcctgtgatgaggtctgcacctctgtgtgtacttgtgtgatggttagaggactgcctacctcccagaggaggttgaatgctccagccggttccagctattgctttgtttacctgtttaaccagtatttacctagcaagtcttccatcagatagcatttggagagctgggggtgtcacagtgaaccacgacctctaggccagtgggagagtcagtcacacaaactgtgagtccatgacttggggcttagccagcacccaccaccccacgcgccaccccacaaccccgggtagaggagtctgaatctggagccgcccccagcccagccccgtgctttttgcgtcctggtgtttattccttcccggtgcctgtcactcaagcacactagtgactatcgccagagggaaagggagctgcaggaagcgaggctggagagcaggaggggctctgcgcagaaattcttttgagttcctatgggccagggcgtccgggtgcgcgcattcctctccgccccaggattgggcgaagcctcccggctcgcactcgctcgcccgtgtgttccccgatcccgctggagtcgatgcgcgtccagcgcgtgccaggccggggcgggggtgcgggctgactttctccctcgctagggacgctccggcgcccgaaaggaaagggtggcgctgcgctccggggtgcacgagccgacagcgcccgaccccaacgggccggccccgccagcgccgctaccgccctgcccccgggcgagcgggatgggcgggagtggagtggcgggtggagggtggagacgtcctggcccccgccccgcgtgcacccccaggggaggccgagcccgccgcccggccccgcgcaggccccgcccgggactcccctgcggtccaggccgcgccccgggctccgcgccagccaatgagcgccgcccggccgggcgtgcccccgcgccccaagcataaaccctggcgcgctcgcggcccggcactcttctggtccccacagactcagagagaacccaccatggtgctgtctcctgccgacaagaccaacgtcaaggccgcctggggtaaggtcggcgcgcacgctggcgagtatggtgcggaggccctggagaggtgaggctccctcccctgctccgacccgggctcctcgcccgcccggacccacaggccaccctcaaccgtcctggccccggacccaaaccccacccctcactctgcttctccccgcaggatgttcctgtccttccccaccaccaagacctacttcccgcacttcgacctgagccacggctctgcccaggttaagggccacggcaagaaggtggccgacgcgctgaccaacgccgtggcgcacgtggacgacatgcccaacgcgctgtccgccctgagcgacctgcacgcgcacaagcttcgggtggacccggtcaacttcaaggtgagcggcgggccgggagcgatctgggtcgaggggcgagatggcgccttcctcgcagggcagaggatcacgcgggttgcgggaggtgtagcgcaggcggcggctgcgggcctgggccctcggccccactgaccctcttctctgcacagctcctaagccactgcctgctggtgaccctggccgcccacctccccgccgagttcacccctgcggtgcacgcctccctggacaagttcctggcttctgtgagcaccgtgctgacctccaaataccgttaagctggagcctcggtggccatgcttcttgccccttgggcctccccccagcccctcctccccttcctgcacccgtacccccgtggtctttgaataaagtctgagtgggcggcagcctgtgtgtgcctgagttttttccctcagcaaacgtgccaggcatgggcgtggacagcagctgggacacacatggctagaacctctctgcagctggatagggtaggaaaaggcaggggcgggaggaggggatggaggagggaaagtggagccaccgcgaagtccagctggaaaaacgctggaccctagagtgctttgaggatgcatttgctctttcccgagttttattcccagacttttcagattcaatgcaggtttgctgaaataatgaatttatccatctttacgtttctgggcactcttgtgccaagaactggctggctttctgcctgggacgtcactggtttcccagaggtcctcccacatatgggtggtgggtaggtcagagaagtcccactccagcatggctgcattgatcccccatcgttcccactagtctccgtaaaacctcccagatacaggcacagtctagatgaaatcaggggtgcggggtgcaactgcaggccccaggcaattcaataggggctctactttcacccccaggtcaccccagaatgctcacacaccagacactgacgccctggggctgtcaagatcaggcgtttgtctctgggcccagctcagggcccagctcagcacccactcagctcccctgaggctggggagcctgtcccattgcgactggagaggagagcggggccacagaggcctggctagaaggtcccttctccctggtgtgtgttttctctctgctgagcaggcttgcagtgcctggggtatcagagggagggttcccggagctggtagccataaagccctggccctcaactgataggaatatcttttattccctgagcccatgaatcacccttggtaaacacctatggcaggccctctgcctgcgtttgtgatgtccttcccgcagcctgtgggtacagtatcaactgtcaggaagacggtgtcttcgttatttcatcaggaagaatggaggtctgacctaaaggtagaaatatgtcaaatgtacagcagagggctggttggagtgcagcgctttttacaattaattgatcagaaccagttataaatttatcatttccttctccactcctgctgcttcagttgactaagcctaagaaaaaattataaaaattggccgggcgcggtggctcacacctgtaattgcagcactttgccaggcttaggcaggtggatcacctgaagtcaggggttcgagaccagcctagccaacatagtgaaaccctgtctctactaaaaagacaaaaattgtccaggtgtgatgactcatgcctgtaaacctggcactttgggaggcggaggttgtagtgagtcaagatcgcgccatcgcactccagcttgggcaacaagagcgaaactctgtctcaaaaaaaaatttaatctaatttaatttaatttaaaaattagcacggtggttgggcacagtggctcacgcctgtaatcccagcactttgggaagccaaggtgggcagatcacaaggtcaggaattcgagaccagcctggccaatatggggaaaccccatctctactaaaaatacaaaaaattagccgggtgtggtggcgcacgcctgtaatcccagctactcgggaggttgaggtaggagaatcacttgaacccaggaggcagaggttgcagtgacccgagatcacaccattgcactctagcctgggcaacaagagcaaaactccatctcaaaaaaaattataaaaattatacatcagtagatgaatgggtaaacaaaatgtggtggtctatacacacaatggaatattatttggccacaaaaagaaatgaagcactgataggatgtagctgcaccctgaaaatatttgacaagtaaaagaagccggacaccaaaggtcacaaactgcatgaccccatctatatgcaatatccgctacagccaaatccatagggaccaaaagcggattagtggctgccggggccagagttactgttaatgagtaccgaggtggcgtttgggatgatgaaaaagttctgacctagatagtggtgatggctgcataacactaagtgttcttaatatcaccaaattttatacctgaaaaatggctacaatggtaatttatgtctattttatcaccttttttaaaacaaaaaagatataaggggtacagcagagtgagtgctgcatatgcatttactattattcttgggttacatcccaggtactcaataaatgttcactgccctgaagaaacacctgctacgagtcaggcacctcacagttgttatccgtttaattctcacaatctgagaagaaactgtcaccctcattttatataataaatgagaaaacagactcgggcaagtgtcacaatagaatcaagaggcagaataaactgacttccaatgccaaatccatgccgaaattcagtgctataataatgtacatggccgggcgcggtggttcacgcctgtaatcccagaactttgggaggctgaggcgggaggatcacctgaggtcgggagtttgagatcagcctaacacggtgaaaccctgtctctactaaaaatacaaaattggcatggtggcatgcacctgtgatcccagttactcgggaggctgaggcaggagaatcgtttgaacccgggaggcggaggttgcagtgagccggaatggcgccactgcactcaccgcacccggccaatttttgtgtttttagtagagactaaataccatatagtgaacacctaagacggggggccttggatccagggcgattcagagggccccggtcggagctgtcggagattgagcgcgcgcggtcccgggatctccgacgaggccctggacccccgggcggcgaagctgcggcgcggcgccccctggaggccgcgggacccctggccggtccgcgcaggcgcagcggggtcgcagggcgcggcgggttccagcgcggggatggcgctgtccgcggaggaccgggcgctggtgcgcgccctgtggaagaagctgggcagcaacgtcggcgtctacacgacagaggccctggaaaggtgcggcaggctgggcgcccccgcccccaggggccctccctccccaagccccccggacgcgcctcacccacgttcctctcgcaggaccttcctggctttccccgccacgaagacctacttctcccacctggacctgagccccggctcctcacaagtcagagcccacggccagaaggtggcggacgcgctgagcctcgccgtggagcgcctggacgacctaccccacgcgctgtccgcgctgagccacctgcacgcgtgccagctgcgagtggacccggccagcttccaggtgagcggctgccgtgctgggcccctgtccccgggagggccccggcggggtgggtgcggggggcgtgcggggcgggtgcaggcgagtgagccttgagcgctcgccgcagctcctgggccactgcctgctggtaaccctcgcccggcactaccccggagacttcagccccgcgctgcaggcgtcgctggacaagttcctgagccacgttatctcggcgctggtttccgagtaccgctgaactgtgggtgggtggccgcgggatccccaggcgaccttccccgtgtttgagtaaagcctctcccaggagcagccttcttgccgtgctctctcgaggtcaggacgcgagaggaaggcgccgcccctccccaaggaaaggcgagggcctggggcacacccccagtgcccagatccaggcgcgcctctttccacctccagcaggtttggggcctcggccatgggggcaccgaactgcgtgcagcctgaccctcccgaatggggtggtaggtgagggccgcgggacgccccgggcggcgggctgcgaggacggccgactctgcccatcccgagggcggctggcttcgccctccccactctgcgccgagcacgcggcccggacccaccgcgagaactccgcacctgcagcgtgaacgcacgcgggcggcgttaagggcccggggctgactcggagcaggttagggaacagcgccccctcccggcgcgagccggtacctgcgcagcacccagccgccgcggctgtggcctggaatcggggacctggggtgccggggggttgtggtgaaggaggtgggaccagccccagcacctagccacgtagctggcgaggtggaccaggaaccgacccagacccctgccgtcacccgacatcactacggagagtgaagcttttttatatttgtccacataaaaccaatcatggtcattgtagaacttccgaaaacaaggcttgctgcaccttcctgtgtatcccaggtccaggaatgggtgcagcacatccttcagctgccgcttgacacgcggcaaactgtgtcatgtgtaaacaagaacaggacatggctgtcatatccaagagcacatgtgtaacacagacatgccacacacacacacacacacacacggggtagaggcaggcctcatccacacccctaacatttgatgcgtagctgttccagtcttctaggcacatgtagagatgcttttcctcagaaatggtattctcaaggtgacactgaggaaaagtggacaggccgggcgcggtggctcacgcctgtaatcccagcactccgggaggccgaggcgggcggatc

SEQ ID NO: 491 - DNA, 23 bp, synthetic construct
  source 1..23: mol_type = other DNA
gtggggaaggggcccccaagagg

SEQ ID NO: 492 - DNA, 26 bp, synthetic construct
  source 1..26: mol_type = other DNA
agacagatatttgcattgagatagtg

SEQ ID NO: 493 - DNA, 23 bp, synthetic construct
  source 1..23: mol_type = other DNA
ccttgtcaaggctattggtcaag

What is claimed is:

1. An O⁶BG-resistant O(6)-methylguanine-DNA-methyltransferase (MGMT) polypeptide, wherein the O⁶BG-resistant MGMT polypeptide comprises one or more amino acid mutations selected from L33F, L33K, L33P, L33R, L33W, L33Y, M134F, M134V, M134W, M134Y, R135G, R135K, R135L, R135T, N137D, N137F, N137P, P138K, P140E, P140F, P140H, G156I, G156P, G156V, Y158M, Y158W, S159F, S159I, S159L, S159P, S159T, S159W, S159Y, G160D, G160E, G160H, G160K, and G160P.

2. A nucleic acid encoding an O⁶BG-resistant O(6)-methylguanine-DNA-methyltransferase (MGMT) polypeptide, wherein the O⁶BG-resistant MGMT polypeptide comprises one or more amino acid mutations selected from L33F, L33K, L33P, L33R, L33W, L33Y, M134F, M134V, M134W, M134Y, R135G, R135K, R135L, R135T, N137D, N137F, N137P, P138K, P140E, P140F, P140H, G156I, G156P, G156V, Y158M, Y158W, S159F, S159I, S159L, S159P, S159T, S159W, S159Y, G160D, G160E, G160H, G160K, and G160P.

3. The nucleic acid of claim 2, wherein each of the one or more amino acid mutations is encoded in the nucleic acid by a corresponding nucleic acid mutation selected from Table 1.

4. A cell comprising the polypeptide of claim 1.

5. A cell comprising the nucleic acid of claim 2 or 3.

6. The cell of claim 4 or 5, wherein the cell is a mammalian cell, optionally wherein the mammalian cell is a human cell.

7. The cell of any one of claims 4-6, wherein the cell is a hematopoietic cell, optionally wherein the hematopoietic cell is a hematopoietic stem and progenitor cell (HSPC) or a hematopoietic stem cell (HSC).

8. The cell of any one of claims 4-7, wherein the cell comprises a therapeutic gene and/or encode a therapeutic expression product.

9. A pharmaceutical composition comprising the cell of any one of claims 4-8.

10. A method of hematopoietic stem cell (HSC) transplantation comprising administering the cell of any one of claims 4-8 or the pharmaceutical composition of claim 9 to a subject in need thereof.

11. Use of the cell of any one of claims 4-8 or the pharmaceutical composition of claim 9 in hematopoietic stem cell (HSC) transplantation.

12. The method or use of claim 10 or claim 11, wherein the HSC transplantation is an autologous therapy in that the cells are derived from cells of the subject.

13. The method or use of claim 10 or claim 11, wherein the HSC transplantation is an allogeneic therapy in that the cells are not derived from cells of the subject.

14. A method comprising contacting an endogenous O(6)-methylguanine-DNA-methyltransferase (MGMT)-encoding nucleic acid of one or more cells of a mammalian subject with an editing enzyme to produce a modified MGMT-encoding nucleic acid, wherein the contacting occurs in vivo, in vitro, or ex vivo and the modified MGMT-encoding nucleic acid encodes an O⁶-benzylguanine (O⁶BG)-resistant MGMT polypeptide,
wherein the O⁶BG-resistant MGMT polypeptide is MGMT^{P140K}.

15. A method comprising contacting an endogenous O(6)-methylguanine-DNA-methyltransferase (MGMT)-encoding nucleic acid of one or more cells of a mammalian subject with an editing enzyme to produce a modified MGMT-encoding nucleic acid, wherein the contacting occurs in vivo, in vitro, or ex vivo and the modified MGMT-encoding nucleic acid encodes an O⁶-benzylguanine (O⁶BG)-resistant MGMT polypeptide,
wherein the O⁶BG-resistant MGMT polypeptide is not MGMT^{P140K} and/or does not comprise a lysine (K) at position 140 corresponding to SEQ ID NO: 1.

16. The method of claim 15, wherein the O⁶BG-resistant MGMT polypeptide comprises one or more amino acid mutations selected from V139F, P140A, P140G, P140I, P140L, P140M, P140N, P140Q, P140R, P140S, P140T, L142M, C150Y, S152H, A154G, G156A, N157T, Y158F, Y158H, G160A, G160R, G160S, L162P, L162V, K165E, K165N, K165R, A170S, PVP(138-140)CMK, PVP(138-140)CIK, PVP(138-140)HLK, PVP(138-140)KIK, PVP(138-140)KIR, PVP(138-140)KLK, PVP(138-140)KMK, PVP(138-140)KVK, PVP(138-140)KWK, PVP(138-140)KYK, PVP(138-140)KYN, PVP(138-140)KYR, PVP(138-140)MIK, PVP(138-140)MLK, PVP(138-140)MMK, PVP(138-140)MVK, PVP(138-140)MWK, PVP(138-140)MYR, PVP(138-140)NIK, PVP(138-140)NLK, PVP(138-140)NLL, PVP(138-140)PLK, PVP(138-140)PYR, PVP(138-140)QLN, PVP(138-140)RFK, PVP(138-140)RTK, PVP(138-140)RYK, PVP(138-140)SFK, PVP(138-140)SMK, PVP(138-140)TIK, PVP(138-140)TLK, PVP(138-140)TLN, PVP(138-140)TNK, PVP(138-140)RCK, PVP(138-140)SYK, PVP(138-140)VMK, and PVP(138-140)YAK.

17. The method of claim 15, wherein the O⁶BG-resistant MGMT polypeptide comprises one or more amino acid mutations selected from L33F, L33K, L33P, L33R, L33W, L33Y, M134F, M134V, M134W, M134Y, R135G, R135K, R135L, R135T, N137D, N137F, N137P, P138K, P140E, P140F, P140H, G156I, G156P, G156V, Y158M, Y158W, S159F, S159I, S159L, S159P, S159T, S159W, S159Y, G160D, G160E, G160H, G160K, and G160P.

18. The method of claim 16 or 17, wherein each of the one or more amino acid mutations is encoded in the modified MGMT-encoding nucleic acid by a corresponding nucleic acid mutation selected from Table 1 and/or Table 2.

19. The method of any one of claims 14-18, wherein the contacting occurs in vivo.

20. Use of an editing enzyme for modification of an endogenous O(6)-methylguanine-DNA-methyltransferase (MGMT)-encoding nucleic acid of one or more cells of a mammalian subject to produce a modified MGMT-encoding nucleic acid,
wherein the use comprises contacting the endogenous MGMT-encoding nucleic acid with the editing enzyme in vivo, in vitro, or ex vivo and the modified MGMT-encoding nucleic acid encodes an O⁶-benzylguanine (O⁶BG)-resistant MGMT polypeptide,
wherein the O⁶BG-resistant MGMT polypeptide is MGMT^{P140K}.

21. Use of an editing enzyme for modification of an endogenous O(6)-methylguanine-DNA-methyltransferase (MGMT)-encoding nucleic acid of one or more cells of a mammalian subject to produce a modified MGMT-encoding nucleic acid,
wherein the use comprises contacting the endogenous MGMT-encoding nucleic acid with the editing enzyme in vivo, in vitro, or ex vivo and the modified MGMT-encoding nucleic acid encodes an O⁶-benzylguanine (O⁶BG)-resistant MGMT polypeptide,
wherein the O⁶BG-resistant MGMT polypeptide is not MGMT^{P140K} and/or does not comprise a lysine (K) at position 140 corresponding to SEQ ID NO: 1.

22. The use of claim 21, wherein the O⁶BG-resistant MGMT polypeptide comprises one or more amino acid mutations selected from V139F, P140A, P140G, P140I, P140L, P140M, P140N, P140Q, P140R, P140S, P140T, L142M, C150Y, S152H, A154G, G156A, N157T, Y158F, Y158H, G160A, G160R, G160S, L162P, L162V, K165E, K165N, K165R, A170S, PVP(138-140)CMK, PVP(138-140)CIK, PVP(138-140)HLK, PVP(138-140)KIK, PVP(138-140)KIR, PVP(138-140)KLK, PVP(138-140)KMK, PVP(138-140)KVK, PVP(138-140)KWK, PVP(138-140)KYK, PVP(138-140)KYN, PVP(138-140)KYR, PVP(138-140)MIK, PVP(138-140)MLK, PVP(138-140)MMK, PVP(138-140)MVK, PVP(138-140)MWK, PVP(138-140)MYR, PVP(138-140)NIK, PVP(138-140)NLK, PVP(138-140)NLL, PVP(138-140)PLK, PVP(138-140)PYR, PVP(138-140)QLN, PVP(138-140)RFK, PVP(138-140)RTK, PVP(138-140)RYK, PVP(138-140)SFK, PVP(138-140)SMK, PVP(138-140)TIK, PVP(138-140)TLK, PVP(138-140)TLN, PVP(138-140)TNK, PVP(138-140)RCK, PVP(138-140)SYK, PVP(138-140)VMK, and PVP(138-140)YAK.

23. The use of claim 21, wherein the O⁶BG-resistant MGMT polypeptide comprises one or more amino acid mutations selected from L33F, L33K, L33P, L33R, L33W, L33Y, M134F, M134V, M134W, M134Y, R135G, R135K, R135L, R135T, N137D, N137F, N137P, P138K, P140E, P140F, P140H, G156I, G156P, G156V, Y158M, Y158W, S159F, S159I, S159L, S159P, S159T, S159W, S159Y, G160D, G160E, G160H, G160K, and G160P.

24. The use of claim 22 or 23, wherein each of the one or more amino acid mutations is encoded in the modified MGMT-encoding nucleic acid by a corresponding nucleic acid mutation selected from Table 1 and/or Table 2.

25. The use of any one of claims 20-24, wherein the contacting occurs in vivo.

26. The method or use of any one of claims 14-25, comprising administering to the mammalian subject a nucleic acid encoding the editing enzyme.

27. The method or use of claim 26, wherein the nucleic acid encoding the editing enzyme further encodes a guide RNA that directs editing of the endogenous MGMT-encoding nucleic acid by the editing enzyme.

28. The method or use of claim 26 or claim 27, wherein the nucleic acid encoding the editing enzyme is administered parenterally.

29. The method or use of any one of claims 26-28, wherein the nucleic acid encoding the editing enzyme is administered by injection.

30. The method or use of any one of claims 26-29, wherein the nucleic acid encoding the editing enzyme is administered intravenously.

31. The method or use of claim any one of claims 14-30, comprising mobilization of hematopoietic stem cells of the subject prior to administration of the nucleic acid.

32. The method or use of any one of claims 14-31, comprising administering one or more immunosuppression agents to the subject, optionally wherein the administration of the one or more immunosuppression agents is prior to the administration of the nucleic acid.

33. The method or use of any one of claims 14-32, comprising administering one or more MGMT inhibitors to the subject after the nucleic acid has been administered.

34. The method or use of any one of claims 14-33, wherein the one or more MGMT inhibitors comprises O⁶BG or an analog or derivative thereof, and/or wherein the one or more MGMT inhibitors comprises Lomeguatrib.

35. The method or use of any one of claims 14-34, comprising administering one or more alkylating agents to the subject after the nucleic acid has been administered.

36. The method or use of any one of claims 14-35, wherein the one or more alkylating agent comprises 1,3-bis(2-chloroethyl)-1-nitrosourea (BCNU) or temozolomide.

37. The method or use of any one of claims 14-36, wherein the modified MGMT-encoding nucleic acid confers a selective advantage to, and/or permits selection of, cells comprising the modified MGMT-encoding nucleic acid.

38. The method or use of any one of claims 14-37, comprising selecting for cells comprising the modified MGMT-encoding nucleic acid.

39. A nucleic acid encoding an editing enzyme and optionally further encoding a guide RNA, wherein the editing enzyme, upon contact with an O(6)-methylguanine-DNA-methyltransferase (MGMT)-encoding nucleic acid, produces a modified MGMT-encoding nucleic acid that encodes an O⁶-benzylguanine (O⁶BG)-resistant MGMT polypeptide,
wherein the O⁶BG-resistant MGMT polypeptide is MGMT^{P140K}.

40. A nucleic acid encoding an editing enzyme and optionally further encoding a guide RNA, wherein the editing enzyme, upon contact with an O(6)-methylguanine-DNA-methyltransferase (MGMT)-encoding nucleic acid, produces a modified MGMT-encoding nucleic acid that encodes an O⁶-benzylguanine (O⁶BG)-resistant MGMT polypeptide,
wherein the O⁶BG-resistant MGMT polypeptide is not MGMT^{P140K} and/or does not comprise a lysine (K) at position 140 corresponding to SEQ ID NO: 1.

41. The nucleic acid encoding an editing enzyme of claim 40, wherein the O⁶BG-resistant MGMT polypeptide comprises one or more amino acid mutations selected from V139F, P140A, P140G, P140I, P140L, P140M, P140N, P140Q, P140R, P140S, P140T, L142M, C150Y, S152H, A154G, G156A, N157T, Y158F, Y158H, G160A, G160R, G160S, L162P, L162V, K165E, K165N, K165R, A170S, PVP(138-140)CMK, PVP(138-140)CIK, PVP(138-140)HLK, PVP(138-140)KIK, PVP(138-140)KIR, PVP(138-140)KLK, PVP(138-140)KMK, PVP(138-140)KVK, PVP(138-140)KWK, PVP(138-140)KYK, PVP(138-140)KYN, PVP(138-140)KYR, PVP(138-140)MIK, PVP(138-140)MLK, PVP(138-140)MMK, PVP(138-140)MVK, PVP(138-140)MWK, PVP(138-140)MYR, PVP(138-140)NIK, PVP(138-140)NLK, PVP(138-140)NLL, PVP(138-140)PLK, PVP(138-140)PYR, PVP(138-140)QLN, PVP(138-140)RFK, PVP(138-140)RTK, PVP(138-140)RYK, PVP(138-140)SFK, PVP(138-140)SMK, PVP(138-140)TIK, PVP(138-140)TLK, PVP(138-140)TLN, PVP(138-140)TNK, PVP(138-140)RCK, PVP(138-140)SYK, PVP(138-140)VMK, and PVP(138-140)YAK.

42. The nucleic acid encoding an editing enzyme of claim 40, wherein the O⁶BG-resistant MGMT polypeptide comprises one or more amino acid mutations selected from L33F, L33K, L33P, L33R, L33W, L33Y, M134F, M134V, M134W, M134Y, R135G, R135K, R135L, R135T, N137D, N137F, N137P, P138K, P140E, P140F, P140H, G156I, G156P, G156V, Y158M, Y158W, S159F, S159I, S159L, S159P, S159T, S159W, S159Y, G160D, G160E, G160H, G160K, and G160P.

43. The nucleic acid encoding an editing enzyme of claim 41 or 42, wherein each of the one or more amino acid mutations is encoded in the modified MGMT-encoding nucleic acid by a corresponding nucleic acid mutation selected from Table 1 and/or Table 2.

44. The nucleic acid nucleic acid encoding an editing enzyme of any one of claims 39-43, wherein the nucleic acid encoding the editing enzyme encodes a guide RNA that directs editing of the endogenous MGMT-encoding nucleic acid by the editing enzyme.

45. A pharmaceutical composition comprising the nucleic acid encoding an editing enzyme of any one of claims 39-44.

46. The pharmaceutical composition of claim 45, wherein the pharmaceutical composition is formulated for administration to a mammalian subject, optionally wherein the mammalian subject is a human subject.

47. The pharmaceutical composition of claim 45 or claim 46, wherein the pharmaceutical composition is formulated for parenteral administration.

48. The pharmaceutical composition of any one of claims 45-47, wherein the pharmaceutical composition is formulated for injection.

49. The pharmaceutical composition of any one of claims 45-48, wherein the pharmaceutical composition is formulated for intravenous injection.

50. A kit comprising the nucleic acid encoding an editing enzyme of any one of claims 39-44 or the pharmaceutical composition of any one of claims 45-49.

51. The kit of claim 50, wherein the kit comprises one or more MGMT inhibitors.

52. The kit of claim 51, wherein the one or more MGMT inhibitors comprises O⁶BG or an analog or derivative thereof, and/or wherein the one or more MGMT inhibitors comprises Lomeguatrib.

53. The kit of any one of claims 50-52, wherein the kit comprises one or more alkylating agents.

54. The kit of claim 53, wherein the one or more alkylating agent comprises 1,3-bis(2-chloroethyl)-1-nitrosourea (BCNU) or temozolomide.

55. The kit of any one of claims 50-54, wherein the kit comprises one or more mobilization agents.

56. The kit of any one of claims 50-55, wherein the kit comprises one or more immunosuppression agents.

57. The kit of any one of claims 50-56, wherein the kit comprises instructions for selection for cells comprising modified MGMT-encoding nucleic acids.

58. The method, use, nucleic acid, pharmaceutical composition, or kit of any one of claims 14-57, wherein the editing enzyme is a base editing enzyme that deaminates a nucleobase in the endogenous MGMT-encoding nucleic acid.

59. The method, use, nucleic acid, pharmaceutical composition, or kit of claim 58, wherein the base editing enzyme comprises a DNA binding domain and a deaminase domain.

60. The method, use, nucleic acid, pharmaceutical composition, or kit of claim 59, wherein the DNA binding domain and deaminase domain are fused.

61. The method, use, nucleic acid, pharmaceutical composition, or kit of claim 59 or claim 60, wherein the DNA binding domain is a zinc finger domain.

62. The method, use, nucleic acid, pharmaceutical composition, or kit of claim 59 or claim 60, wherein the DNA binding domain is a TALEN domain.

63. The method, use, nucleic acid, pharmaceutical composition, or kit of claim 59 or claim 60, wherein the DNA binding domain is an RNA guided DNA binding domain.

64. The method, use, nucleic acid, pharmaceutical composition, or kit of claim 63, wherein the RNA guided DNA binding domain is a modified Cas9 variant or a modified Cas12a variant.

65. The method, use, nucleic acid, pharmaceutical composition, or kit of claim 63 or claim 64, wherein the RNA guided DNA binding domain is a catalytically impaired nuclease domain.

66. The method, use, nucleic acid, pharmaceutical composition, or kit of any one of claims 63-65, wherein the RNA guided DNA binding domain is a nickase variant.

67. The method, use, nucleic acid, pharmaceutical composition, or kit of any one of claims 59-66, wherein the deaminase domain is a cytidine deaminase domain.

68. The method, use, nucleic acid, pharmaceutical composition, or kit of any one of claims 59-66, wherein the deaminase domain is an adenosine deaminase domain.

69. The method, use, nucleic acid, pharmaceutical composition, or kit of any one of claims 14-57, wherein the editing enzyme is a prime editing enzyme that comprises a DNA binding domain and a reverse transcriptase domain.

70. The method, use, nucleic acid, pharmaceutical composition, or kit of claim 69, wherein the DNA binding domain is an RNA guided DNA binding domain.

71. The method, use, nucleic acid, pharmaceutical composition, or kit of claim 70, wherein the RNA guided DNA binding domain and reverse transcriptase domain are fused.

72. The method, use, nucleic acid, pharmaceutical composition, or kit of claim 69 or claim 70, wherein the RNA guided DNA binding domain is a modified Cas9 variant or a modified Cas12a variant.

73. The method, use, nucleic acid, pharmaceutical composition, or kit of any one of claims 70-72, wherein the RNA guided DNA binding domain is a catalytically impaired nuclease domain.

74. The method, use, nucleic acid, pharmaceutical composition, or kit of any one of claims 70-73, wherein the RNA guided DNA binding domain is a nickase variant.

75. The method, use, nucleic acid, pharmaceutical composition, or kit of any one of claims 70-74, wherein the reverse transcriptase domain is an MLV reverse transcriptase domain.

76. The method, use, nucleic acid, pharmaceutical composition, or kit of any one of claims 14-57, wherein the editing enzyme is an RNA editing enzyme that deaminates a nucleobase in mRNA transcripts produced from the endogenous MGMT gene to produce a modified MGMT mRNA transcript.

77. The method, use, nucleic acid, pharmaceutical composition, or kit of any one of claims 26-76, wherein nucleic acid encoding the editing enzyme is encapsidated in a viral particle.

78. The method, use, nucleic acid, pharmaceutical composition, or kit of claim 77, wherein the viral particle is a recombinant adenovirus.

79. The method, use, nucleic acid, pharmaceutical composition, or kit of claim 78, wherein the recombinant adenovirus is a recombinant Ad35 virus.

80. The method, use, nucleic acid, pharmaceutical composition, or kit of claim 78, wherein the recombinant adenovirus is a recombinant Ad5 virus.

81. The method, use, nucleic acid, pharmaceutical composition, or kit of claim 78, wherein the recombinant adenovirus is an Ad3, Ad7, Ad11, Ad14, Ad16, Ad21, Ad34, Ad37, or Ad50 virus.

82. The method, use, nucleic acid, pharmaceutical composition, or kit of claim 78, wherein the recombinant adenovirus is a chimeric adenovirus.

83. The method, use, nucleic acid, pharmaceutical composition, or kit of claim 82, wherein the chimeric adenovirus is an Ad5/35 virus (e.g., an Ad5/35++ virus).

84. The method, use, nucleic acid, pharmaceutical composition, or kit of any one of claims 26-76, wherein nucleic acid encoding the editing enzyme is encapsulated in a lipid nanoparticle.

85. The method, use, nucleic acid, pharmaceutical composition, or kit of any one of claims 26-76, wherein nucleic acid encoding the editing enzyme is encapsulated in a liposome.

86. The method, use, nucleic acid, pharmaceutical composition, or kit of any one of claims 26-85, wherein the nucleic acid further comprises a therapeutic payload.

87. The method, use, nucleic acid, pharmaceutical composition, or kit of claim 86, wherein the therapeutic payload is a non-integrating payload.

88. The method, use, nucleic acid, pharmaceutical composition, or kit of claim 86, wherein the therapeutic payload is an integrating payload, optionally wherein the integrating payload does not encode the editing enzyme.

89. The method, use, nucleic acid, pharmaceutical composition, or kit of claim 86 or claim 88, wherein the therapeutic payload comprises a nucleic acid encoding a globin protein, wherein the globin protein comprises a γ-globin, a β-globin, and/or an α-globin.

90. The method, use, nucleic acid, pharmaceutical composition, or kit of claim 86 or claim 88, wherein the therapeutic payload comprises a nucleic acid encoding a chimeric antigen receptor (CAR), engineered T-cell receptor (TCR), checkpoint inhibitor, and/or therapeutic antibody.

91. The method, use, nucleic acid, pharmaceutical composition, or kit of any one of claims 14-90, wherein the endogenous MGMT-encoding nucleic acid is an MGMT gene in the genomes of the one or more cells.

92. The method, use, nucleic acid, pharmaceutical composition, or kit of any one of claims 14-91, wherein the endogenous MGMT-encoding nucleic acid is an MGMT mRNA transcript expressed from an MGMT gene of a genome of the one or more cells.

93. The method, use, nucleic acid, pharmaceutical composition, or kit of any one of claims 14-92, wherein the cells are hematopoietic cells.

94. The method, use, nucleic acid, pharmaceutical composition, or kit of any one of claims 14-92, wherein the cells are hematopoietic stem cells.

95. The O⁶BG-resistant MGMT polypeptide, nucleic acid, pharmaceutical composition, method, use, or kit of any one of claims 1-94, wherein the O⁶BG-resistant MGMT polypeptide has at least 80% sequence identity with SEQ ID NO: 1.
